(19) United States
(12) Patent Application Publication
(10) Pub. No.: US 2010/0291551 A1
(43) Pub. Date: Nov. 18, 2010

(54) GENEMAP OF THE HUMAN ASSOCIATED WITH CROHN'S DISEASE

(75) Inventor: Abdelmajid Belouchi, Ville-St-Laurent (CA)

Correspondence Address: DOWELL & DOWELL P.C., 103 Oronoco St., Suite 220, Alexandria, VA, 22314, US

(73) Assignee: GENIZON BIOSCIENCES INC., Ville St-Laurent, Quebec (CA)

(21) Appl. No.: 12/312,580

(22) PCT Filed: Nov. 16, 2007
(86) PCT No.: PCT/US07/84977

§ 371 Date: Mar. 18, 2010

Related U.S. Application Data
(60) Provisional application No. 60/859,546, filed on Nov. 17, 2006.

(51) Int. Cl. C12Q 1/68

(52) U.S. Cl. 435/6

(57) ABSTRACT

The present invention relates to the selection of a set of polymorphism markers for use in genome wide association studies based on linkage disequilibrium mapping. In particular, the invention relates to the fields of pharmacogenomics, diagnostics, patient therapy and the use of genetic haplotype information to predict an individual's susceptibility to IBD (e.g. Crohn's Disease) and/or their response to a particular drug or drugs.

### PRIORITY

[0001] This application claims priority to U.S. Provisional Application No. 60/859,546, filed Nov. 17, 2006, which is hereby incorporated by reference in its entirety.

### FIELD OF THE INVENTION

[0002] The invention relates to the field of genomics and genetics, including genome analysis and the study of DNA variations. In particular, the invention relates to the fields of pharmacogenomics, diagnostics, patient therapy and the use of genetic haplotype information to predict an individual's susceptibility to IBD (e.g. Crohn's disease) and/or their response to a particular drug or drugs, so that drugs tailored to genetic differences of population groups may be developed and/or administered to the appropriate population.

[0003] The invention also relates to a GeneMap for IBD (e.g. Crohn's disease), which links variations in DNA (including both genic and non-genic regions) to an individual's susceptibility to IBD (e.g. Crohn's disease) and/or response to a particular drug or drugs. The invention further relates to the genes disclosed in the GeneMap (see Tables 2-4), which is related to methods and reagents for detection of an individual's increased or decreased risk for IBD (e.g. Crohn's disease) and related sub-phenotypes, by identifying at least one polymorphism in one or a combination of the genes from the GeneMap. Also related are the candidate regions identified in Table 1, which are associated with IBD (e.g. Crohn's disease). In addition, the invention further relates to nucleotide sequences of those genes including genomic DNA sequences, DNA sequences, single nucleotide polymorphisms (SNPs), other types of polymorphisms (insertions, deletions, microsatellites), alleles and haplotypes (see Sequence Listing and Tables 5.1, 5.2, 6.2 and 6.3).

[0004] The invention further relates to isolated nucleic acids comprising these nucleotide sequences and isolated polypeptides or peptides encoded thereby. Also related are expression vectors and host cells comprising the disclosed nucleic acids or fragments thereof, as well as antibodies that bind to the encoded polypeptides or peptides.

[0005] The present invention further relates to ligands that modulate the activity of the disclosed genes or gene products. In addition, the invention relates to diagnostics and therapeutics for IBD (e.g. Crohn's disease) disease, utilizing the disclosed nucleic acids, polymorphisms, chromosomal regions, GeneMaps, polypeptides or peptides, antibodies and/or ligands and small molecules that activate or repress relevant signaling events.

### BACKGROUND OF THE INVENTION

[0006] Inflammatory bowel disease (IBD) is a collective term used to describe two intestinal disorders whose etiology is not completely understood: ex: Crohn's disease (CD) and ulcerative colitis (UC). The course and prognosis of IBD, which occurs worldwide and afflicts several million people, varies widely. Onset of IBD is predominant in young adulthood. Symptoms of IBD include abdominal cramps and pain, diarrhea, weight loss and intestinal bleeding. Anemia and weight loss are also common signs of IBD. Between 10% and 15% of people with IBD require surgery over a ten-year period. Patients with IBD are also at increased risk for the development of intestinal cancer. These diseases are accompanied by a high frequency of psychological symptoms, including anxiety and depression.

[0007] There are common features in many of the later stages of IBD. Inflammation at the disease site/target organ is typically present, caused by the release of inflammatory (also termed “proinflammatory”) cytokines by T cells and by other cells that contribute to the activation steps and effector pathways of immune/inflammatory processes. The current consensus opinion regarding the pathogenesis of IBD centers on the role of genetically determined dysregulation in the host immune response toward the resident bacterial flora.

[0008] UC involves the rectum and spreads proximally to contiguous portions or to the entire colon. Disease activity is usually intermittent, with relapses and periods of quiescence. The sigmoidoscopic or colonoscopic picture is characteristic. In mild disease, the colonic mucosa appears hyperemic and granular. In more severe disease, tiny punctuate ulcers are present and the mucosa is characteristically friable and may bleed spontaneously. Histologically, the inflammatory cell infiltrate in active disease usually includes neutrophils, often invading crypts as well as being associated with epithelial damage and crypt distortion. An increased number of lymphocytes in the lamina propria and basal plasmacytosis are usually present. Between 500,000 and 700,000 patients suffer from UC in the United States. Extra-colonic manifestations of UC include arthritis, uveitis, aphthous stomatitis, pyoderma gangrenosum, and erythema nodosum. Initial therapy for patients with mild to moderate disease is usually an aminosalicylate. In controlled trials, disease improvement by various criteria occurred in up to 30% of subjects in the placebo groups; thus, no specific treatment may be an option for patients with very mild disease. In patients with active UC who do not respond to standard 5-ASA treatment and in those with more severe disease, oral corticosteroids have been the mainstay of acute symptomatic therapy. However, corticosteroids are not effective in long-term maintenance of remission in patients with UC given that their use is associated with significant toxicity over time. Although the pathogenesis of UC is not fully understood, there is increasing evidence that UC may be an autoimmune disorder, with B cells playing a role in disease pathophysiology. B cells, as well as T cells, are present in basal lymphoid aggregates, a histopathologic feature considered indicative of UC and seen in histologic sections from patients with active UC. Whereas mucosal inflammation in UC is thought to be driven by activated T cells, these patients have a T-helper-2 (Th2) cytokine expression pattern profile. As. Th2 cytokines classically drive B-cell immune responses and antibody production, a central role for B cell may be postulated in UC.

[0009] Crohn's disease is an Inflammatory Bowel Disease (IBD) in which inflammation extends beyond the inner gut lining and penetrates deeper layers of the intestinal wall of any part of the digestive system (esophagus, stomach, small intestine, large intestine, and/or anus). Crohn's disease is a chronic, lifelong disease which can cause painful, often life altering symptoms including diarrhea, cramping and rectal bleeding. Crohn's disease occurs most frequently in the industrialized world and the typical age of onset falls into two distinct ranges, 15 to 30 years of age and 60 to 80 years of age. The highest mortality is during the first years of disease, and in cases where the disease symptoms are long lasting, an increased risk of colon cancer is observed. Crohn's disease presently accounts for approximately two thirds of IBD-related physician visits and hospitalizations, and 50 to 80% of Crohn's disease patients eventually require surgical treatment. Development of Crohn's disease is influenced by environmental and host specific factors, together with “exogenous biological factors” such as constituents of the intestinal flora (the naturally occurring bacteria found in the intestine). It is believed that in genetically predisposed individuals, exogenous factors such as infectious agents, and host-specific characteristics such as intestinal barrier function and/or blood supply, combine with specific environmental factors to cause a chronic state of improperly regulated immune system function. In this hypothetical model, microorganisms trigger an immune response in the intestine, and in susceptible individuals, this immune response is not turned off when the microorganism is cleared from the body. The chronically “turned on” immune response causes damage to the intestine resulting in the symptoms of Crohn's disease.

[0010] Current treatments for Crohn's disease are primarily aimed at reducing symptoms by suppressing inflammation and do not address the root, cause of the disease. Despite a preponderance of evidence showing inheritance of a risk for Crohn's disease through epidemiological studies and genome wide linkage analyses, the genes affecting Crohn's disease have yet to be discovered (Hugot J P, and Thomas G., 1998). There is a need in the art for identifying specific genes related to Crohn's disease to enable the development of therapeutics that address the causes of the disease rather than relieving its symptoms. The failure in past studies to identify causative genes in complex diseases, such as Crohn's disease, has been due to the lack of appropriate methods to detect a sufficient number of variations in genomic DNA samples (markers), the insufficient quantity of necessary markers available, and the number of needed individuals to enable such a study.

[0011] Unfortunately, new therapies for IBD are few, and both diagnosis and treatment have been hampered by a lack of detailed knowledge of the etiology. Despite the progress noted above, there remains a need in the art for new and improved methods for treating this debilitating group of diseases, and the present inventors have made a significant step forward with the invention disclosed herein. The invention includes a method for treating IBD and inflammatory diseases in a subject, comprising administering to a subject in need of such treatment an effective amount of a pharmaceutical composition that comprises (a) an compound that inhibits inflammation; and (b) a pharmaceutically acceptable carrier, thereby treating the disease.

[0012] The present invention also relates specifically to a set of IBD (e.g. Crohn's disease) causing genes (GeneMap) and targets which present attractive points of therapeutic intervention and diagnostics.

[0013] In view of the foregoing, identifying susceptibility genes associated with IBD (e.g. Crohn's disease) and their respective biochemical pathways will facilitate the identification of diagnostic markers as well as novel targets for improved therapeutics. It will also improve the quality of life for those afflicted by this disease and will reduce the economic costs of these afflictions at the individual and societal level. The identification of those genetic markers would provide the basis for novel genetic tests and eliminate or reduce the therapeutic methods currently used. The identification of those genetic markers will also provide the development of effective therapeutic intervention for the battery of laboratory, psychological and clinical evaluations typically required to diagnose IBD (e.g. Crohn's disease). The present invention satisfies this need.

### SEQUENCE LISTING AND TABLES

[0014] The Sequence Listing and Tables filed concurrently herewith are part of the instant application, and are hereby incorporated by reference in their entireties.

### Definitions

[0015] Throughout the description of the present invention, several terms are used that are specific to the science of this field. For the sake of clarity and to avoid any misunderstanding, these definitions are provided to aid in the understanding of the specification and claims.

[0016] Allele: One of a pair, or series, of forms of a gene or non-genic region that occur at a given locus in a chromosome. Alleles are symbolized with the same basic symbol (e.g., B for dominant and b for recessive; B1, B2, Bn for n additive alleles at a locus). In a normal diploid cell there are two alleles of any one gene (one from each parent), which occupy the same relative position (locus) on homologous chromosomes. Within a population there may be more than two alleles of a gene. See multiple alleles. SNPs also have alleles, i.e., the two (or more) nucleotides that characterize the SNP.

[0017] Amplification of nucleic acids: refers to methods such as polymerase chain reaction (PCR), ligation amplification (or ligase chain reaction, LCR) and amplification methods based on the use of Q-beta replicase. These methods are well known in the art and are described, for example, in U.S. Pat. Nos. 4,683,195 and 4,683,202. Reagents and hardware for conducting PCR are commercially available. Primers useful for amplifying sequences from the disorder region are preferably complementary to, and preferably hybridize specifically to, sequences in the disorder region or in regions that flank a target region therein. Genes from Tables 2-4 generated by amplification may be sequenced directly. Alternatively, the amplified sequence(s) may be cloned prior to sequence analysis.

[0018] Antigenic component: is a moiety that binds to its specific antibody with sufficiently high affinity to form a detectable antigen-antibody complex.

[0019] Antibodies: refer to polyclonal and/or monoclonal antibodies and fragments thereof, and immunologic binding equivalents thereof, that can bind to proteins and fragments thereof or to nucleic acid sequences from the disorder region, particularly from the disorder gene products or a portion thereof. The term antibody is used both to refer to a homogeneous molecular entity, or a mixture such as a serum product made up of a plurality of different molecular entities. Proteins may be prepared synthetically in a protein synthesizer and coupled to a carrier molecule and injected over several months into rabbits. Rabbit sera are tested for immunoreactivity to the protein or fragment. Monoclonal antibodies may be made by injecting mice with the proteins, or fragments thereof. Monoclonal antibodies can be screened by ELISA and tested for specific immunoreactivity with protein or fragments thereof (Harlow et al. 1988, Antibodies: A Laboratory Manual, Cold Spring Harbor Laboratory, Cold Spring Harbor, N.Y.). These antibodies will be useful in developing assays as well as therapeutics.

[0020] Associated allele: refers to an allele at a polymorphic locus that is associated with a particular phenotype of interest, e.g., a predisposition to a disorder or a particular drug response.

[0021] cDNA: refers to complementary or copy DNA produced from an RNA template by the action of RNA-dependent DNA polymerase (reverse transcriptase). Thus, a cDNA clone means a duplex DNA sequence complementary to an RNA molecule of interest, included in a cloning vector or PCR amplified. This term includes genes from which the intervening sequences have been removed.

[0022] cDNA library: refers to a collection of recombinant DNA molecules containing cDNA inserts that together comprise essentially all of the expressed genes of an organism or tissue. A cDNA library can be prepared by methods known to one skilled in the art (see, e.g., Cowell and Austin, 1997, “DNA Library Protocols,” Methods in Molecular Biology). Generally, RNA is first isolated from the cells of the desired organism, and the RNA is used to prepare cDNA molecules.

[0023] Cloning: refers to the use of recombinant DNA techniques to insert a particular gene or other DNA sequence into a vector molecule. In order to successfully clone a desired gene, it is necessary to use methods for generating DNA fragments, for joining the fragments to vector molecules, for introducing the composite DNA molecule into a host cell in which it can replicate, and for selecting the clone having the target gene from amongst the recipient host cells.

[0024] Cloning vector: refers to a plasmid or phage DNA or other DNA molecule that is able to replicate in a host cell. The cloning vector is typically characterized by one or more endonuclease recognition sites at which such DNA sequences may be cleaved in a determinable fashion without loss of an essential biological function of the DNA, and which may contain a selectable marker suitable for use in the identification of cells containing the vector.

[0025] Coding sequence or a protein-coding sequence: is a polynucleotide sequence capable of being transcribed into mRNA and/or capable of being translated into a polypeptide or peptide. The boundaries of the coding sequence are typically determined by a translation start codon at the 5′-terminus and a translation stop codon at the 3′-terminus.

[0026] Complement of a nucleic acid sequence: refers to the antisense sequence that participates in Watson-Crick base-pairing with the original sequence.

[0027] Disorder region: refers to the portions of the human chromosomes displayed in Table 1 bounded by the markers from Tables 2-6.

[0028] Disorder-associated nucleic acid or polypeptide sequence: refers to a nucleic acid sequence that maps to region of Table 1 or the polypeptides encoded therein (Tables 2-4, nucleic acids, and polypeptides). For nucleic acids, this encompasses sequences that are identical or complementary to the gene sequences from Tables 2-4, as well as sequence-conservative, function-conservative, and non-conservative variants thereof. For polypeptides, this encompasses sequences that are identical to the polypeptide, as well as function-conservative and non-conservative variants thereof. Included are the alleles of naturally-occurring polymorphisms causative of IBD (e.g. Crohn's disease) such as, but not limited to, alleles that cause altered expression of genes of Tables 2-4 and alleles that cause altered protein levels or stability (e.g., decreased levels, increased levels, expression in an inappropriate tissue type, increased stability, and decreased stability).

[0029] Expression vector: refers to a vehicle or plasmid that is capable of expressing a gene that has been cloned into it, after transformation or integration in a host cell. The cloned gene is usually placed under the control of (i.e., operably linked to) a regulatory sequence.

[0030] Function-conservative variants: are those in which a change in one or more nucleotides in a given codon position results in a polypeptide sequence in which a given amino acid residue in the polypeptide has been replaced by a conservative amino acid substitution. Function-conservative variants also include analogs of a given polypeptide and any polypeptides that have the ability to elicit antibodies specific to a designated polypeptide.

[0031] Founder population: Also a population isolate, this is a large number of people who have mostly descended, in genetic isolation from other populations, from a much smaller number of people who lived many generations ago.

[0032] Gene: Refers to a DNA sequence that encodes through its template or messenger RNA a sequence of amino acids characteristic of a specific peptide, polypeptide, or protein. The term “gene” also refers to a DNA sequence that encodes an RNA product. The term gene as used herein with reference to genomic DNA includes intervening, non-coding regions, as well as regulatory regions, and can include 5′ and 3′ ends. A gene sequence is wild-type if such sequence is usually found in individuals unaffected by the disorder or condition of interest. However, environmental factors and other genes can also play an important role in the ultimate determination of the disorder. In the context of complex disorders involving multiple genes (oligogenic disorder), the wild type, or normal sequence can also be associated with a measurable risk or susceptibility, receiving its reference status based on its frequency in the general population.

[0033] GeneMaps: are defined as groups of gene(s) that are directly or indirectly involved in at least one phenotype of a disorder (some non-limiting example of GeneMaps comprises varius combinations of genes from Tables 2-4). As such, GeneMaps enable the development of synergistic diagnostic products, creating “theranostics”.

[0034] Genotype: Set of alleles at a specified locus or loci.

[0035] Haplotype: The allelic pattern of a group of (usually contiguous) DNA markers or other polymorphic loci along an individual chromosome or double helical DNA segment. Haplotypes identify individual chromosomes or chromosome segments. The presence of shared haplotype patterns among a group of individuals implies that the locus defined by the haplotype has been inherited, identical by descent (IBD), from a common ancestor. Detection of identical by descent haplotypes is the basis of linkage disequilibrium (LD) mapping. Haplotypes are broken down through the generations by recombination and mutation. In some instances, a specific allele or haplotype may be associated with susceptibility to a disorder or condition of interest, e.g., CROHN disease. In other instances, an allele or haplotype may be associated with a decrease in susceptibility to a disorder or condition of interest, i.e., a protective sequence.

[0036] Host: includes prokaryotes and eukaryotes. The term includes an organism or cell that is the recipient of an expression vector (e.g., autonomously replicating or integrating vector).

[0037] Hybridizable: nucleic acids are hybridizable to each other when at least one strand of the nucleic acid can anneal to another nucleic acid strand under defined stringency conditions. In some embodiments, hybridization requires that the two nucleic acids contain at least 10 substantially complementary nucleotides; depending on the stringency of hybridization, however, mismatches may be tolerated. The appropriate stringency for hybridizing nucleic acids depends on the length of the nucleic acids and the degree of complementarity, and can be determined in accordance with the methods described herein.

[0038] Identity by descent (IBD): Identity among DNA sequences for different individuals that is due to the fact that they have all been inherited from a common ancestor. LD mapping identifies IBD haplotypes as the likely location of disorder genes shared by a group of patients.

[0039] Identity: as known in the art, is a relationship between two or more polypeptide sequences or two or more polynucleotide sequences, as determined by comparing the sequences. In the art, identity also means the degree of sequence relatedness between polypeptide or polynucleotide sequences, as the case may be, as determined by the match between strings of such sequences. Identity and similarity can be readily calculated by known methods, including but not limited to those described in A. M. Lesk (ed), 1988, Computational Molecular Biology, Oxford University Press, NY; D. W. Smith (ed), 1993, Biocomputing. Informatics and Genome Projects, Academic Press, NY; A. M. Griffin and H. G. Griffin, H. G (eds), 1994, ComputerAnalysis of Sequence Data, Part 1, Humana Press, NJ; G. von Heinje, 1987, Sequence Analysis in Molecular Biology, Academic Press; and M. Gribskov and J. Devereux (eds), 1991, Sequence Analysis Primer, M Stockton Press, NY; H. Carillo and D. Lipman, 1988, SIAM J. Applied Math., 48:1073.

[0040] Immunogenic component: is a moiety that is capable of eliciting a humoral and/or cellular immune response in a host animal.

[0041] Isolated nucleic acids: are nucleic acids separated away from other components (e.g., DNA, RNA, and protein) with which they are associated (e.g., as obtained from cells, chemical synthesis systems, or phage or nucleic acid libraries). Isolated nucleic acids are at least 60% free, preferably 75% free, and most preferably 90% free from other associated components. In accordance with the present invention, isolated nucleic acids can be obtained by methods described herein, or other established methods, including isolation from natural sources (e.g., cells, tissues, or organs), chemical synthesis, recombinant methods, combinations of recombinant and chemical methods, and library screening methods.

[0042] Isolated polypeptides or peptides: are those that are separated from other components (e.g., DNA, RNA, and other polypeptides or peptides) with which they are associated (e.g., as obtained from cells, translation systems, or chemical synthesis systems). In a preferred embodiment, isolated polypeptides or peptides are at least 10% pure; more preferably, 80% or 90% pure. Isolated polypeptides and peptides include those obtained by methods described herein, or other established methods, including isolation from natural sources (e.g., cells, tissues, or organs), chemical synthesis, recombinant methods, or combinations of recombinant and chemical methods. Proteins or polypeptides referred to herein as recombinant are proteins or polypeptides produced by the expression of recombinant nucleic acids. A portion as used herein with regard to a protein or polypeptide, refers to fragments of that protein or polypeptide. The fragments can range in size from 5 amino acid residues to all but one residue of the entire protein sequence. Thus, a portion or fragment can be at least 5, 5-50, 50-100, 100-200, 200-400, 400-800, or more consecutive amino acid residues of a protein or polypeptide.

[0043] Linkage disequilibrium (LD): the situation in which the alleles for two or more loci do not occur together in individuals sampled from a population at frequencies predicted by the product of their individual allele frequencies. In other words, markers that are in LD do not follow Mendel's second law of independent random segregation. LD can be caused by any of several demographic or population artifacts as well as by the presence of genetic linkage between markers. However, when these artifacts are controlled and eliminated as sources of LD, then LD results directly from the fact that the loci involved are located close to each other on the same chromosome so that specific combinations of alleles for different markers (haplotypes) are inherited together. Markers that are in high LD can be assumed to be located near each other and a marker or haplotype that is in high LD with a genetic trait can be assumed to be located near the gene that affects that trait. The physical proximity of markers can be measured in family studies where it is called linkage or in population studies where it is called linkage disequilibrium.

[0044] LD mapping: population based gene mapping, which locates disorder genes by identifying regions of the genome where haplotypes or marker variation patterns are shared statistically more frequently among disorder patients compared to healthy controls. This method is based upon the assumption that many of the patients will have inherited an allele associated with the disorder from a common ancestor (IBD), and that this allele will be in LD with the disorder gene.

[0045] Locus: a specific position along a chromosome or DNA sequence. Depending upon context, a locus could be a gene, a marker, a chromosomal band or a specific sequence of one or more nucleotides.

[0046] Minor allele frequency (MAF): the population frequency of one of the alleles for a given polymorphism, which is equal or less than 50%. The sum of the MAF and the Major allele frequency equals one.

[0047] Markers: an identifiable DNA sequence that is variable (polymorphic) for different individuals within a population. These sequences facilitate the study of inheritance of a trait or a gene. Such markers are used in mapping the order of genes along chromosomes and in following the inheritance of particular genes; genes closely linked to the marker or in LD with the marker will generally be inherited with it. Two types of markers are commonly used in genetic analysis, microsatellites and SNPs.

[0048] Microsatellite: DNA of eukaryotic cells comprising a repetitive, short sequence of DNA that is present as tandem repeats and in highly variable copy number, flanked by sequences unique to that locus.

[0049] Mutant sequence: if it differs from one or more wild-type sequences. For example, a nucleic acid from a gene listed in Tables 2-4 containing a particular allele of a single nucleotide polymorphism may be a mutant sequence. In some cases, the individual carrying this allele has increased susceptibility toward the disorder or condition of interest. In other cases, the mutant sequence might also refer to an allele that decreases the susceptibility toward a disorder or condition of interest and thus acts in a protective manner. The term mutation may also be used to describe a specific allele of a polymorphic locus.

[0050] Non-conservative variants: are those in which a change in one or more nucleotides in a given codon position results in a polypeptide sequence in which a given amino acid residue in a polypeptide has been replaced by a non-conservative amino acid substitution. Non-conservative variants also include polypeptides comprising non-conservative amino acid substitutions.

[0051] Nucleic acid or polynucleotide: purine- and pyrimidine-containing polymers of any length, either polyribonucleotides or polydeoxyribonucleotide or mixed polyribo polydeoxyribonucleotides. This includes single- and double-stranded molecules, i.e., DNA-DNA, DNA-RNA and RNA-RNA hybrids, as well as protein nucleic acids (PNA) formed by conjugating bases to an amino acid backbone. This also includes nucleic acids containing modified bases.

[0052] Nucleotide: a nucleotide, the unit of a DNA molecule, is composed of a base, a 2′-deoxyribose and phosphate ester(s) attached at the 5′ carbon of the deoxyribose. For its incorporation in DNA, the nucleotide needs to possess three phosphate esters but it is converted into a monoester in the process.

[0053] Operably linked: means that the promoter controls the initiation of expression of the gene. A promoter is operably linked to a sequence of proximal DNA if upon introduction into a host cell the promoter determines the transcription of the proximal DNA sequence(s) into one or more species of RNA. A promoter is operably linked to a DNA sequence if the promoter is capable of initiating transcription of that DNA sequence.

[0054] Ortholog: denotes a gene or polypeptide obtained from one species that has homology to an analogous gene or polypeptide from a different species.

[0055] Paralog: denotes a gene or polypeptide obtained from a given species that has homology to a distinct gene or polypeptide from that same species.

[0056] Phenotype: any visible, detectable or otherwise measurable property of an organism such as symptoms of, or susceptibility to, a disorder.

[0057] Polymorphism: occurrence of two or more alternative genomic sequences or alleles between or among different genomes or individuals at a single locus. A polymorphic site thus refers specifically to the locus at which the variation occurs. In some cases, an individual carrying a particular allele of a polymorphism has an increased or decreased susceptibility toward a disorder or condition of interest.

[0058] Portion and fragment: are synonymous. A portion as used with regard to a nucleic acid or polynucleotide refers to fragments of that nucleic acid or polynucleotide. The fragments can range in size from 8 nucleotides to all but one nucleotide of the entire gene sequence. Preferably, the fragments are at least about 8 to about 10 nucleotides in length; at least about 12 nucleotides in length; at least about 15 to about 20 nucleotides in length; at least about 25 nucleotides in length; or at least about 35 to about 55 nucleotides in length.

[0059] Probe or primer: refers to a nucleic acid or oligonucleotide that forms a hybrid structure with a sequence in a target region of a nucleic acid due to complementarity of the probe or primer sequence to at least one portion of the target region sequence.

[0060] Protein and polypeptide: are synonymous. Peptides are defined as fragments or portions of polypeptides, preferably fragments or portions having at least one functional activity (e.g., proteolysis, adhesion, fusion, antigenic, or intracellular activity) as the complete polypeptide sequence.

[0061] Recombinant nucleic acids: nucleic acids which have been produced by recombinant DNA methodology, including those nucleic acids that are generated by procedures which rely upon a method of artificial replication, such as the polymerase chain reaction (PCR) and/or cloning into a vector using restriction enzymes. Portions of recombinant nucleic acids which code for polypeptides can be identified and isolated by, for example, the method of M. Jasin et al., U.S. Pat. No. 4,952,501.

[0062] Regulatory sequence: refers to a nucleic acid sequence that controls or regulates expression of structural genes when operably linked to those genes. These include, for example, the lac systems, the trp system, major operator and promoter regions of the phage lambda, the control region of fd coat protein and other sequences known to control the expression of genes in prokaryotic or eukaryotic cells. Regulatory sequences will vary depending on whether the vector is designed to express the operably linked gene in a prokaryotic or eukaryotic host, and may contain transcriptional elements such as enhancer elements, termination sequences, tissue-specificity elements and/or translational initiation and termination sites.

[0063] Sample: as used herein refers to a biological sample, such as, for example, tissue or fluid isolated from an individual or animal (including, without limitation, plasma, serum, cerebrospinal fluid, lymph, tears, nails, hair, saliva, milk, pus, and tissue exudates and secretions) or from in vitro cell culture-constituents, as well as samples obtained from, for example, a laboratory procedure.

[0064] Single nucleotide polymorphism (SNP): variation of a single nucleotide. This includes the replacement of one nucleotide by another and deletion or insertion of a single nucleotide. Typically, SNPs are biallelic markers although tri- and tetra-allelic markers also exist. For example, SNP A\C may comprise allele C or allele A (Tables 5.1, 5.2, 6.2 and 6.3). Thus, a nucleic acid molecule comprising SNP A\C may include a C or A at the polymorphic position. For clarity purposes, an ambiguity code is used in Tables 5.1, 5.2, 6.2 and 6.3 and the sequence listing, to represent the variations. For a combination of SNPs, the term “haplotype” is used, e.g. the genotype of the SNPs in a single DNA strand that are linked to one another. In certain embodiments, the term “haplotype” is used to describe a combination of SNP alleles, e.g., the alleles of the SNPs found together on a single DNA molecule. In specific embodiments, the SNPs in a haplotype are in linkage disequilibrium with one another.

[0065] Sequence-conservative: variants are those in which a change of one or more nucleotides in a given codon position results in no alteration in the amino acid encoded at that position (i.e., silent mutation).

[0066] Substantially homologous: a nucleic acid or fragment thereof is substantially homologous to another if, when optimally aligned (with appropriate nucleotide insertions and/or deletions) with the other nucleic acid (or its complementary strand), there is nucleotide sequence identity in at least 60% of the nucleotide bases, usually at least 70%, more usually at least 80%, preferably at least 90%, and more preferably at least 95-98% of the nucleotide bases. Alternatively, substantial homology exists when a nucleic acid or fragment thereof will hybridize, under selective hybridization conditions, to another nucleic acid (or a complementary strand thereof). Selectivity of hybridization exists when hybridization which is substantially more selective than total lack of specificity occurs. Typically, selective hybridization will occur when there is at least about 55% sequence identity over a stretch of at least about nine or more nucleotides, preferably at least about 65%, more preferably at least about 75%, and most preferably at least about 90% (M. Kanehisa, 1984, Nucl. Acids Res. 11:203-213). The length of homology comparison, as described, may be over longer stretches, and in certain embodiments will often be over a stretch of at least 14 nucleotides, usually at least 20 nucleotides, more usually at least 24 nucleotides, typically at least 28 nucleotides, more typically at least 32 nucleotides, and preferably at least 36 or more nucleotides.

[0067] Wild-type gene from Tables 2-4: refers to the reference sequence. The wild-type gene sequences from Tables 2-4 used to identify the variants (polymorphisms, alleles, and haplotypes) described in detail herein.

[0068] Technical and scientific terms used herein have the meanings commonly understood by one of ordinary skill in the art to which the present invention pertains, unless otherwise defined. Reference is made herein to various methodologies known to those of skill in the art. Publications and other materials setting forth such known methodologies to which reference is made are incorporated herein by reference in their entireties as though set forth in full. Standard reference works setting forth the general principles of recombinant DNA technology include J. Sambrook et al., 1989, Molecular Cloning: A Laboratory Manual, 2d Ed., Cold Spring Harbor Laboratory Press, Cold Spring Harbor, N.Y.; P. B. Kaufman et al., (eds), 1995, Handbook of Molecular and Cellular Methods in Biology and Medicine, CRC Press, Boca Raton; M. J. McPherson (ed), 1991, Directed Mutagenesis: A Practical Approach, IRL Press, Oxford; J. Jones, 1992, Amino Acid and Peptide Synthesis, Oxford Science Publications, Oxford; B. M. Austen and O. M. R. Westwood, 1991, Protein Targeting and Secretion, IRL Press, Oxford; D. N Glover (ed), 1985, DNA Cloning, Volumes 1 and 11; M. J. Gait (ed), 1984, Oligonucleotide Synthesis; B. D. Hames and S. J. Higgins (eds), 1984, Nucleic Acid Hybridization; Quirke and Taylor (eds), 1991, PCR-A Practical Approach; Harries and Higgins (eds), 1984, Transcription and Translation; R. I. Freshney (ed), 1986, Animal Cell Culture; Immobilized Cells and Enzymes, 1986, IRL Press; Perbal, 1984, A Practical Guide to Molecular Cloning, J. H. Miller and M. P. Calos (eds), 1987, Gene Transfer Vectors for Mammalian Cells, Cold Spring Harbor Laboratory Press; M. J. Bishop (ed), 1998, Guide to Human Genome Computing, 2d Ed., Academic Press, San Diego, Calif.; L. F. Peruski and A. H. Peruski, 1997, The Internet and the New Biology. Tools for Genomic and Molecular Research, American Society for Microbiology, Washington, D.C. Standard reference works setting forth the general principles of immunology include S. Sell, 1996, Immunology, Immunopathology & Immunity, 5th Ed., Appleton & Lange, Publ., Stamford, Conn.; D. Male et al., 1996, Advanced Immunology, 3d Ed., Times Mirror Int'l Publishers Ltd., Publ., London; D. P. Stites and A. L Terr, 1991, Basic and Clinical Immunology, 7th Ed., Appleton & Lange, Publ., Norwalk, Conn.; and A. K. Abbas et al., 1991, Cellular and Molecular Immunology, W. B. Saunders Co., Publ., Philadelphia, Pa. Any suitable materials and/or methods known to those of skill can be utilized in carrying out the present invention; however, preferred materials and/or methods are described. Materials, reagents, and the like to which reference is made in the following description and examples are generally obtainable from commercial sources, and specific vendors are cited herein.

### DETAILED DESCRIPTION OF THE INVENTION

### Genome Wide Association Study to Construct a GeneMap for IBD

[0069] The present invention is based on the discovery of genes associated with IBD (e.g. Crohn's disease). In the preferred embodiment, disease-associated loci (candidate regions; Table 1) are identified by the statistically significant differences in allele or haplotype frequencies between the cases and the controls. For the purpose of the present invention, 378 candidate regions (Table 1) are identified.

[0070] The invention provides a method for the discovery of genes associated with IBD (e.g. Crohn's disease) and the construction of a GeneMap for IBD (e.g. Crohn's disease) in a human population, comprising the following steps (see also Example section herein):

### Step 1: Recruit Patients (Cases) and Controls

[0071] In the preferred embodiment, 382 patients diagnosed for CROHN disease along with 382 independent controls samples are recruited from the German population.

[0072] In another preferred embodiment, 500 patients diagnosed for CROHN disease along with 500 independent controls samples are recruited from the Quebec Founder population.

[0073] In another embodiment, more or less than 500 patients and controls are recruited.

[0074] In another embodiment, 500 patients diagnosed for CROHN disease along with two family members are recruited from the Quebec founder or German populations. The preferred trios recruited are parent-parent-child (PPC) trios. Trios can also be recruited as parent-child-child (PCC) trios. In another preferred embodiment, more or less than 500 trios are recruited

[0075] In yet another embodiment, the present invention is performed as a whole or partially with DNA samples from individuals of another population resource.

### Step 2: DNA Extraction and Quantitation

[0076] Any sample comprising cells or nucleic acids from patients or controls may be used. Preferred samples are those easily obtained from the patient or control. Such samples include, but are not limited to blood, peripheral lymphocytes, buccal swabs, epithelial cell swabs, nails, hair, bronchoalveolar lavage fluid, sputum, or other body fluid or tissue obtained from an individual.

[0077] In one embodiment, DNA is extracted from such samples in the quantity and quality necessary to perform the invention using conventional DNA extraction and quantitation techniques. The present invention is not linked to any DNA extraction or quantitation platform in particular.

### Step 3: Genotype the Recruited Individuals

[0078] In one embodiment, assay-specific and/or locus-specific and/or allele-specific oligonucleotides for every SNP marker of the present invention (Tables 5.1, 5.2, 6.2 and 6.3) are organized onto one or more arrays. The genotype at each SNP locus is revealed by hybridizing short PCR fragments comprising each SNP locus onto these arrays. The arrays permit a high-throughput genome wide association study using DNA samples from individuals of the Quebec Founder or the German populations. Such assay-specific and/or locus-specific and/or allele-specific oligonucleotides necessary for scoring each SNP of the present invention are preferably organized onto a solid support. Such supports can be arrayed on wafers, glass slide, beads or any other type of solid support.

[0079] In another embodiment, the assay-specific and/or locus-specific and/or allele-specific oligonucleotides are not organized onto a solid support but are still used as a whole, in panels or one by one. The present invention is therefore not linked to any genotyping platform in particular.

[0080] In another embodiment, one or more portions of the SNP maps are used to screen the whole genome, a subset of chromosomes, a chromosome, a subset of genomic regions or a single genomic region.

[0081] In the preferred embodiment, the individuals composing the cases and controls or the trios are preferably individually genotyped with at least 80,000 markers, generating at least a few million genotypes; more preferably, at least a hundred million. In another embodiment, individuals are pooled in cases and control pools for genotyping and genetic analysis.

Step 4: Exclude the Markers that Did not Pass the Quality Control of the Assay.

[0082] Preferably, the quality controls comprises, but are not limited to, the following criteria: eliminate SNPs that had a high rate of Mendelian errors (cut-off at 1% Mendelian error rate), that deviate from the Hardy-Weinberg equilibrium, that are non-polymorphic in the population or have too many missing data (cut-off at 1% missing values or higher), or simply because they are non-polymorphic in the population (cut-off between 1% and 10% minor allele frequency (MAF)).

### Step 5: Perform the Genetic Analysis on the Results Obtained Using Haplotype Information as Well as Single-Marker Association.

[0083] In the preferred embodiment, genetic analysis is performed on all the genotypes from Step 3.

[0084] In another embodiment, genetic analysis is performed on a subset of markers from Step 3 or from markers that passed the quality controls from Step 4.

[0085] In one embodiment, the genetic analysis consists of, but is not limited to features corresponding to Phase information and haplotype structures. Phase information and haplotype structures are preferably deduced from genotypes using Phasefinder. Since chromosomal assignment (phase) cannot be estimated when all trio members are heterozygous, an Expectation-Maximization (EM) algorithm may be used to resolve chromosomal assignment ambiguities after Phasefinder.

[0086] In yet another embodiment, the PL-EM algorithm (Partition-Ligation E M; Niu at al., Am. J. Hum. Genet. 70:157 (2002)) can be used to estimate haplotypes from the “genotype” data as a measured estimate of the reference allele frequency of a SNP in 15-marker windows that advance in increments of one marker across the data set. The results from such algorithms are converted into 15-marker haplotype files.

[0087] In another embodiment, the haplotype frequencies among patients are compared to those among the controls using LDSTATS, a program that assesses the association of haplotypes with the disease. Such program defines haplotypes using multi-marker windows that advance across the marker map in one-marker increments. Such windows can be 1, 3, 5, 7 or 9 markers wide, and all these window sizes are tested concurrently. Larger multi-marker haplotype windows can also be used. At each position the frequency of haplotypes in cases is compared to the frequency of haplotypes in controls. Such allele frequency differences for single marker windows can be tested using Pearson's Chi-square with any degree of freedom. Multi-allelic haplotype association can be tested using Smith's normalization of the square root of Pearson's Chi-square. Such significance of association can be reported in two ways:

[0088] The significance of association within any one haplotype window is plotted against the marker that is central to that window.

[0089] P-values of association for each specific marker are calculated as a pooled P-value across all haplotype windows in which they occur. The pooled P-value is calculated using an expected value and variance calculated using a permutation test that considers covariance between individual windows. Such pooled P-values can yield narrower regions of gene location than the window data (see Example 3 herein for details on various analysis methods, such as LDSTATS v2.0).

[0090] In another embodiment, conditional and subphenotype analyses can be performed on subsets of the original set of cases and controls using the program LDSTATS. For conditional analyses, the selection of a subset of cases and their matched controls can be based on the carrier status of cases at a gene or locus of interest.

### Step 6: SNP and DNA Polymorphism Discovery

[0091] In the preferred embodiment, all the candidate genes and regions identified in step 5 are sequenced for polymorphism identification.

[0092] In another embodiment, the entire region, including all introns, is sequenced to identify all polymorphisms.

[0093] In yet another embodiment, the candidate genes are prioritized for sequencing, and only functional gene elements (promoters, conserved noncoding sequences, exons and splice sites) are sequenced.

[0094] In yet another embodiment, previously identified polymorphisms in the candidate regions can also be used. For example, SNPs from dbSNP, or others can also be used rather than resequencing the candidate regions to identify polymorphisms.

[0095] The discovery of SNPs and DNA polymorphisms generally comprises a step consisting of determining the major haplotypes in the region to be sequenced. The preferred samples are selected according to which haplotypes contribute to the association signal observed in the region to be sequenced. The purpose is to select a set of samples that covers all the major haplotypes in the given region. Each major haplotype is preferably analyzed in at least a few individuals.

[0096] Any analytical procedure may be used to detect the presence or absence of variant nucleotides at one or more polymorphic positions of the invention. In general, the detection of allelic variation requires a mutation discrimination technique, optionally an amplification reaction and optionally a signal generation system. Any means of mutation detection or discrimination may be used. For instance, DNA sequencing, scanning methods, hybridization, extension based methods, incorporation based methods, restriction enzyme-based methods and ligation-based methods may be used in the methods of the invention.

[0097] Sequencing methods include, but are not limited to, direct sequencing, and sequencing by hybridization. Scanning methods include, but are not limited to, protein truncation test (PTT), single-strand conformation polymorphism analysis (SSCP), denaturing gradient gel electrophoresis (DGGE), temperature gradient gel electrophoresis (TGGE), cleavage, heteroduplex analysis, chemical mismatch cleavage (CMC), and enzymatic mismatch cleavage. Hybridization-based methods of detection include, but are not limited to, solid phase hybridization such as dot blots, multiple allele specific diagnostic assay (MASDA), reverse dot blots, and oligonucleotide arrays (DNA Chips). Solution phase hybridization amplification methods may also be used, such as Taqman. Extension based methods include, but are not limited to, amplification refraction mutation systems (ARMS), amplification refractory mutation systems (ALEX), and competitive oligonucleotide priming systems (COPS). Incorporation based methods include, but are not limited to, mini-sequencing and arrayed primer extension (APEX). Restriction enzyme-based detection systems include, but are not limited to, restriction site generating PCR. Lastly, ligation based detection methods include, but are not limited to, oligonucleotide ligation assays (OLA). Signal generation or detection systems that may be used in the methods of the invention include, but are not limited to, fluorescence methods such as fluorescence resonance energy transfer (FRET), fluorescence quenching, fluorescence polarization as well as other chemiluminescence, electrochemiluminescence, Raman, radioactivity, colometric methods, hybridization protection assays and mass spectrometry methods. Further amplification methods include, but are not limited to self sustained replication (SSR), nucleic acid sequence based amplification (NASBA), ligase chain reaction (LCR), strand displacement amplification (SDA) and branched DNA (B-DNA).

[0098] Sequencing can also be performed using a proprietary sequencing technology (Cantaloupe; PCT/EP2005/002870).

### Step 7: Ultrafine Mapping

[0099] This step further maps the candidate regions and genes confirmed in the IBD (e.g. Crohn's disease) in the human population.

[0100] In a preferred embodiment, the discovered SNPs and polymorphisms of step 6 are ultrafine mapped at a higher density of markers than the GWS described herein using the same technology described in step 3.

### Step 8: GeneMap Construction

[0101] The confirmed variations in DNA (including both genic and non-genic regions) are used to build a GeneMap for IBD (e.g. Crohn's disease). The gene content of this GeneMap is described in more detail below. Such GeneMap can be used for other methods of the invention comprising the diagnostic methods described herein, the susceptibility to IBD (e.g. Crohn's disease), the response to a particular drug, the efficacy of a particular drug, the screening methods described herein and the treatment methods described herein.

[0102] As is evident to one of ordinary skill in the art, all of the above steps or the steps do not need to be performed, or performed in a given order to practice or use the SNPs, genomic regions, genes, proteins, etc. in the methods of the invention.

Genes from the GeneMap

[0103] In one embodiment the GeneMap consists of genes and targets, in a variety of combinations, identified from the candidate regions listed in Table 1. In another embodiment, all genes from Tables 2-4 are present in the GeneMap. In another preferred embodiment, the GeneMap consists of a selection of genes from Tables 2-4. The genes of the invention (Tables 2-4) are arranged by candidate regions and by their chromosomal location. Such order is for the purpose of clarity and does not reflect any other criteria of selection in the association of the genes with IBD (e.g. Crohn's disease).

[0104] In one embodiment, genes identified in the GWAS and subsequent studies are evaluated using the Ingenuity Pathway Analysis application (IPA, Ingenuity systems) in order to identify direct biological interactions between these genes, and also to identify molecular regulators acting on those genes (indirect interactions) that could be also involved in IBD (e.g. Crohn's disease). The purpose of this effort is to decipher the molecules involved in contributing to IBD (e.g. Crohn's disease). These gene interaction networks are very valuable tools in the sense that they facilitate extension of the map of gene products that could represent potential drug targets for IBD (e.g. Crohn's disease).

[0105] In another embodiment, other means (such as fuctional biochemical assays and genetic assays) are used to identify the biological interactions between genes to create a GeneMap.

### Nucleic Acid Sequences

[0106] The nucleic acid sequences of the present invention may be derived from a variety of sources including DNA, cDNA, synthetic DNA, synthetic RNA, derivatives, mimetics or combinations thereof. Such sequences may comprise genomic DNA, which may or may not include naturally occurring introns, genic regions, nongenic regions, and regulatory regions. Moreover, such genomic DNA may be obtained in association with promoter regions or poly (A) sequences. The sequences, genomic DNA, or cDNA may be obtained in any of several ways. Genomic DNA can be extracted and purified from suitable cells by means well known in the art. Alternatively, mRNA can be isolated from a cell and used to produce cDNA by reverse transcription or other means. The nucleic acids described herein are used in certain embodiments of the methods of the present invention for production of RNA, proteins or polypeptides, through incorporation into cells, tissues, or organisms. In one embodiment, DNA containing all or part of the coding sequence for the genes described in Tables 2-4, or the SNP markers described in Tables 5.1, 5.2, 6.2 and 6.3, is incorporated into a vector for expression of the encoded polypeptide in suitable host cells. The invention also comprises the use of the nucleotide sequence of the nucleic acids of this invention to identify DNA probes for the genes described in Tables 2-4 or the SNP markers described in Tables 5.1, 5.2, 6.2 and 6.3, PCR primers to amplify the genes described in Tables 2-4 or the SNP markers described in Tables 5.1, 5.2, 6.2 and 6.3, nucleotide polymorphisms in the genes described in Tables 2-4, and regulatory elements of the genes described in Tables 2-4. The nucleic acids of the present invention find use as primers and templates for the recombinant production of IBD (e.g. Crohn's disease)—associated peptides or polypeptides, for chromosome and gene mapping, to provide antisense sequences, for tissue distribution studies, to locate and obtain full length genes, to identify and obtain homologous sequences (wild-type and mutants), and in diagnostic applications.

### Antisense Oligonucleotides

[0107] In a particular embodiment of the invention, an antisense nucleic acid or oligonucleotide is wholly or partially complementary to, and can hybridize with, a target nucleic acid (either DNA or RNA) having the sequence from any Tables of the invention as provided herewith (e.g. Tables 1, 2, 3, 4, 5.2). For example, an antisense nucleic acid or oligonucleotide comprising 16 nucleotides can be sufficient to inhibit expression of at least one gene from Tables 2-4. Alternatively, an antisense nucleic acid or oligonucleotide can be complementary to 5′ or 3′ untranslated regions, or can overlap the translation initiation codon (5′ untranslated and translated regions) of at least one gene from Tables 2-4, or its functional equivalent. In another embodiment, the antisense nucleic acid is wholly or partially complementary to, and can hybridize with, a target nucleic acid that encodes a polypeptide from a gene described in Tables 2-4.

[0108] In addition, oligonucleotides can be constructed which will bind to duplex nucleic acid (i.e., DNA:DNA or DNA:RNA), to form a stable triple helix containing or triplex nucleic acid. Such triplex oligonucleotides can inhibit transcription and/or expression of a gene from Tables 2-4, or its functional equivalent (M. D. Frank-Kamenetskii et al., 1995). Triplex oligonucleotides are constructed using the basepairing rules of triple helix formation and the nucleotide sequence of the genes described in Tables 2-4.

[0109] The present invention encompasses methods of using oligonucleotides in antisense inhibition of the function of the genes from Tables 2-4. In the context of this invention, the term “oligonucleotide” refers to naturally-occurring species or synthetic species formed from naturally-occurring subunits or their close homologs. The term may also refer to moieties that function similarly to oligonucleotides, but have non-naturally-occurring portions. Thus, oligonucleotides may have altered sugar moieties or inter-sugar linkages. Exemplary among these are phosphorothioate and other sulfur containing species which are known in the art. In preferred embodiments, at least one of the phosphodiester bonds of the oligonucleotide has been substituted with a structure that functions to enhance the ability of the compositions to penetrate into the region of cells where the RNA whose activity is to be modulated is located. It is preferred that such substitutions comprise phosphorothioate bonds, methyl phosphonate bonds, or short chain alkyl or cycloalkyl structures. In accordance with other preferred embodiments, the phosphodiester bonds are substituted with structures which are, at once, substantially non-ionic and non-chiral, or with structures which are chiral and enantiomerically specific. Persons of ordinary skill in the art will be able to select other linkages for use in the practice of the invention. Oligonucleotides may also include species that include at least some modified base forms. Thus, purines and pyrimidines other than those normally found in nature may be so employed. Similarly, modifications on the furanosyl portions of the nucleotide subunits may also be effected, as long as the essential tenets of this invention are adhered to. Examples of such modifications are 2′-O-alkyl- and 2′-halogen-substituted nucleotides. Some non-limiting examples of modifications at the 2′ position of sugar moieties which are useful in the present invention include OH, SH, SCH3, F, OCH3, OCN, O(CH2), NH2 and O(CH2)n CH3, where n is from 1 to about 10. Such oligonucleotides are functionally interchangeable with natural oligonucleotides or synthesized oligonucleotides, which have one or more differences from the natural structure. All such analogs are comprehended by this invention so long as they function effectively to hybridize with at least one gene from Tables 2-4 DNA or RNA to inhibit the function thereof.

[0110] The oligonucleotides in accordance with this invention preferably comprise from about 3 to about 50 subunits. It is more preferred that such oligonucleotides and analogs comprise from about 8 to about 25 subunits and still more preferred to have from about 12 to about 20 subunits. As defined herein, a “subunit” is a base and sugar combination suitably bound to adjacent subunits through phosphodiester or other bonds.

[0111] Antisense nucleic acids or oligonulcleotides can be produced by standard techniques (see, e.g., Shewmaker et al., U.S. Pat. No. 6,107,065). The oligonucleotides used in accordance with this invention may be conveniently and routinely made through the well-known technique of solid phase synthesis. Any other means for such synthesis may also be employed; however, the actual synthesis of the oligonucleotides is well within the abilities of the practitioner. It is also well known to prepare other oligonucleotides such as phosphorothioates and alkylated derivatives.

[0112] The oligonucleotides of this invention are designed to be hybridizable with RNA (e.g., mRNA) or DNA from genes described in Tables 2-4. For example, an oligonucleotide (e.g., DNA oligonucleotide) that hybridizes to mRNA from a gene described in Tables 2-4 can be used to target the mRNA for RnaseH digestion. Alternatively an oligonucleotide that can hybridize to the translation initiation site of the mRNA of a gene described in Tables 2-4 can be used to prevent translation of the mRNA. In another approach, oligonucleotides that bind to the double-stranded DNA of a gene from Tables 2-4 can be administered. Such oligonucleotides can form a triplex construct and inhibit the transcription of the DNA encoding polypeptides of the genes described in Tables 2-4. Triple helix pairing prevents the double helix from opening sufficiently to allow the binding of polymerases, transcription factors, or regulatory molecules. Recent therapeutic advances using triplex DNA have been described (see, e.g., J. E. Gee et al., 1994, Molecular and Immunologic Approaches, Futura Publishing Co., Mt. Kisco, N.Y.).

[0113] As non-limiting examples, antisense oligonucleotides may be targeted to hybridize to the following regions: mRNA cap region; translation initiation site; translational termination site; transcription initiation site; transcription termination site; polyadenylation signal; 3′ untranslated region; 5′ untranslated region; 5′ coding region; mid coding region; 3′ coding region; DNA replication initiation and elondation sites. Preferably, the complementary oligonucleotide is designed to hybridize to the most unique 5′ sequence of a gene described in Tables 2-4, including any of about 15-35 nucleotides spanning the 5′ coding sequence. In accordance with the present invention, the antisense oligonucleotide can be synthesized, formulated as a pharmaceutical composition, and administered to a subject. The synthesis and utilization of antisense and triplex oligonucleotides have been previously described (e.g., Simon et al., 1999; Barre et al., 2000; Elez et al., 2000; Sauter et al., 2000).

[0114] Alternatively, expression vectors derived from retroviruses, adenovirus, herpes or vaccinia viruses or from various bacterial plasmids may be used for delivery of nucleotide sequences to the targeted organ, tissue or cell population. Methods which are well known to those skilled in the art can be used to construct recombinant vectors which will express nucleic acid sequence that is complementary to the nucleic acid sequence encoding a polypeptide from the genes described in Tables 2-4. These techniques are described both in Sambrook et al., 1989 and in Ausubel et al., 1992. For example, expression of at least one gene from Tables 2-4 can be inhibited by transforming a cell or tissue with an expression vector that expresses high levels of untranslatable sense or antisense sequences. Even in the absence of integration into the DNA, such vectors may continue to transcribe RNA molecules until they are disabled by endogenous nucleases. Transient expression may last for a month or more with a nonreplicating vector, and even longer if appropriate replication elements are included in the vector system. Various assays may be used to test the ability of gene-specific antisense oligonucleotides to inhibit the expression of at least one gene from Tables 2-4. For example, mRNA levels of the genes described in Tables 2-4 can be assessed by Northern blot analysis (Sambrook et al., 1989; Ausubel et al., 1992; J. C. Alwine et al. 1977; I. M. Bird, 1998), quantitative or semi-quantitative RT-PCR analysis (see, e.g., W. M. Freeman et al., 1999; Ren et al., 1998; J. M. Cale et al., 1998), or in situ hybridization (reviewed by A. K. Raap, 1998). Alternatively, antisense oligonucleotides may be assessed by measuring levels of the polypeptide from the genes described in Tables 2-4, e.g., by western blot analysis, indirect immunofluorescence and immunoprecipitation techniques (see, e.g., J. M. Walker, 1998, Protein Protocols on cD-ROM, Humana Press, Totowa, N.J.). Any other means for such detection may also be employed, and is well within the abilities of the practitioner.

### Mapping Technologies

[0115] The present invention includes various methods which employ mapping technologies to map SNPs and polymorphisms. For purpose of clarity, this section comprises, but is not limited to, the description of mapping technologies that can be utilized to achieve the embodiments described herein. Mapping technologies may be based on amplification methods, restriction enzyme cleavage methods, hybridization methods, sequencing methods, and cleavage methods using agents.

[0116] Amplification methods include: self sustained sequence replication (Guatelli et al., 1990), transcriptional amplification system (Kwoh et al., 1989), Q-Beta Replicase (Lizardi et al., 1988), isothermal amplification (e.g. Dean et al., 2002; and Hafner et al., 2001), or any other nucleic acid amplification method, followed by the detection of the amplified molecules using techniques well known to those of ordinary skill in the art. These detection schemes are especially useful for the detection of nucleic acid molecules if such molecules are present in very low number.

[0117] Restriction enzyme cleavage methods include: isolating sample and control DNA, amplification (optional), digestion with one or more restriction endonucleases, determination of fragment length sizes by gel electrophoresis and comparing samples and controls. Differences in fragment length sizes between sample and control DNA indicates mutations in the sample DNA. Moreover, sequence specific ribozymes (see, e.g., U.S. Pat. No. 5,498,531 or DNAzyme e.g. U.S. Pat. No. 5,807,718) can be used to score for the presence of specific mutations by development or loss of a ribozyme or DNAzyme cleavage site.

[0118] Hybridization methods include any measurement of the hybridization or gene expression levels, of sample nucleic acids to probes corresponding to about 2, 3, 4, 5, 6, 7, 8, 9, 10, 15, 20, 25, 30, 50, 75, 100, 200, 500, 1000 or more genes, or ranges of these numbers, such as about 5-20, about 10-20, about 20-50, about 50-100, or about 100-200 genes of Tables 2-4.

[0119] SNPs and SNP maps of the invention can be identified or generated by hybridizing sample nucleic acids, e.g., DNA or RNA, to high density arrays or bead arrays containing oligonucleotide probes corresponding to the polymorphisms of Tables 5.1, 5.2, 6.2 and 6.3 (see the Affymetrix arrays and Illumina bead sets at www.affymetrix.com and www.illumina.com and see Cronin et al., 1996; or Kozal et al., 1996).

[0120] Methods of forming high density arrays of oligonucleotides with a minimal number of synthetic steps are known. The oligonucleotide analogue array can be synthesized on a single or on multiple solid substrates by a variety of methods, including, but not limited to, light-directed chemical coupling, and mechanically directed coupling (see Pirrung, U.S. Pat. No. 5,143,854).

[0121] In brief, the light-directed combinatorial synthesis of oligonucleotide arrays on a glass surface precedes using automated phosphoramidite chemistry and chip masking techniques. In one specific implementation, a glass surface is derivatized with a silane reagent containing a functional group, e.g., a hydroxyl or amine group blocked by a photolabile protecting group. Photolysis through a photolithogaphic mask is used selectively to expose functional groups which are then ready to react with incoming 5′ photoprotected nucleoside phosphoramidites. The phosphoramidites react only with those sites which are illuminated (and thus exposed by removal of the photolabile blocking group). Thus, the phosphoramidites only add to those areas selectively exposed from the preceding step. These steps are repeated until the desired array of sequences have been synthesized on the solid surface. Combinatorial synthesis of different oligonucleotide analogues at different locations on the array is determined by the pattern of illumination during synthesis and the order of addition of coupling reagents.

[0122] In addition to the foregoing, additional methods which can be used to generate an array of oligonucleotides on a single substrate are described in PCT Publication Nos. WO 93/09668 and WO 01/23614. High density nucleic acid arrays can also be fabricated by depositing pre-made or natural nucleic acids in predetermined positions. Synthesized or natural nucleic acids are deposited on specific locations of a substrate by light directed targeting and oligonucleotide directed targeting. Another embodiment uses a dispenser that moves from region to region to deposit nucleic acids in specific spots.

[0123] Nucleic acid hybridization simply involves contacting a probe and target nucleic acid under conditions where the probe and its complementary target can form stable hybrid duplexes through complementary base pairing. See WO 99/32660. The nucleic acids that do not form hybrid duplexes are then washed away leaving the hybridized nucleic acids to be detected, typically through detection of an attached detectable label. It is generally recognized that nucleic acids are denatured by increasing the temperature or decreasing the salt concentration of the buffer containing the nucleic acids. Under low stringency conditions (e.g., low temperature and/or high salt) hybrid duplexes (e.g., DNA:DNA, RNA:RNA, or RNA:DNA) will form even where the annealed sequences are not perfectly complementary. Thus, specificity of hybridization is reduced at lower stringency. Conversely, at higher stringency (e.g., higher temperature or lower salt) successful hybridization tolerates fewer mismatches. One of skill in the art will appreciate that hybridization conditions may be selected to provide any degree of stringency.

[0124] In a preferred embodiment, hybridization is performed at low stringency to ensure hybridization and then subsequent washes are performed at higher stringency to eliminate mismatched hybrid duplexes. Successive washes may be performed at increasingly higher stringency until a desired level of hybridization specificity is obtained. Stringency can also be increased by addition of agents such as formamide. Hybridization specificity may be evaluated by comparison of hybridization to the test probes with hybridization to the various controls that can be present (e.g., expression level control, normalization control, mismatch controls, etc.).

[0125] In general, there is a tradeoff between hybridization specificity (stringency) and signal intensity. Thus, in a preferred embodiment, the wash is performed at the highest stringency that produces consistent results and that provides a signal intensity greater than approximately 10% of the background intensity. Thus, in a preferred embodiment, the hybridized array may be washed at successively higher stringency solutions and read between each wash. Analysis of the data sets thus produced will reveal a wash stringency above which the hybridization pattern is not appreciably altered and which provides adequate signal for the particular oligonucleotide probes of interest.

[0126] Probes based on the sequences of the genes described above may be prepared by any commonly available method. Oligonucleotide probes for screening or assaying a tissue or cell sample are preferably of sufficient length to specifically hybridize only to appropriate, complementary genes or transcripts. Typically the oligonucleotide probes will be at least about 10, 12, 14, 16, 18, 20 or 25 nucleotides in length. In some cases, longer probes of at least 30, 40, or 50 nucleotides will be desirable.

[0127] As used herein, oligonucleotide sequences that are complementary to one or more of the genes or gene fragments described in Tables 2-4 refer to oligonucleotides that are capable of hybridizing under stringent conditions to at least part of the nucleotide sequences of said genes. Such hybridizable oligonucleotides will typically exhibit at least about 75% sequence identity at the nucleotide level to said genes, preferably about 80% or 85% sequence identity or more preferably about 90% or 95% or more sequence identity to said genes (see GeneChip® Expression Analysis Manual, Affymetrix, Rev. 3, which is herein incorporated by reference in its entirety).

[0128] The phrase “hybridizing specifically to” or “specifically hybridizes” refers to the binding, duplexing, or hybridizing of a molecule substantially to or only to a particular nucleotide sequence or sequences under stringent conditions when that sequence is present in a complex mixture (e.g., total cellular) DNA or RNA.

[0129] As used herein a “probe” is defined as a nucleic acid, capable of binding to a target nucleic acid of complementary sequence through one or more types of chemical bonds, usually through complementary base pairing, usually through hydrogen bond formation. As used herein, a probe may include natural (i.e., A, G, U, C, or T) or modified bases (7-deazaguanosine, inosine, etc.). In addition, the bases in probes may be joined by a linkage other than a phosphodiester bond, so long as it does not interfere with hybridization. Thus, probes may be peptide nucleic acids in which the constituent bases are joined by peptide bonds rather than phosphodiester linkages.

[0130] A variety of sequencing reactions known in the art can be used to directly sequence nucleic acids for the presence or the absence of one or more polymorphisms of Tables 5.1, 5.2, 6.2 and 6.3. Examples of sequencing reactions include those based on techniques developed by Maxam and Gilbert (1977) or Sanger (1977). It is also contemplated that any of a variety of automated sequencing procedures can be utilized, including sequencing by mass spectrometry (see, e.g. PCT International Publication No. WO 94/16101; Cohen et al., 1996; and Griffin et al., 1993), real-time pyrophosphate sequencing method (Ronaghi et al., 1998; and Permutt et al., 2001) and sequencing by hybridization (see e.g. Drmanac et al., 2002).

[0131] Other methods of detecting polymorphisms include methods in which protection from cleavage agents is used to detect mismatched bases in RNA/RNA, DNA/DNA or RNA/DNA heteroduplexes (Myers et al., 1985). In general, the technique of “mismatch cleavage” starts by providing heteroduplexes formed by hybridizing (labeled) RNA or DNA containing a wild-type sequence with potentially mutant RNA or DNA obtained from a sample. The double-stranded duplexes are treated with an agent who cleaves single-stranded regions of the duplex such as which will exist due to basepair mismatches between the control and sample strands. For instance, RNA/DNA duplexes can be treated with RNase and DNA/DNA hybrids treated with S1 nuclease to enzymatically digest the mismatched regions. In other embodiments, either DNA/DNA or RNA/DNA duplexes can be treated with hydroxylamine or osmium tetroxide and with piperidine in order to digest mismatched regions. After digestion of the mismatched regions, the resulting material is then separated by size on denaturing polyacrylamide gels to determine the site of a mutation or SNP (see, for example, Cotton et al., 1988; and Saleeba et al., 1992). In a preferred embodiment, the control DNA or RNA can be labeled for detection.

[0132] In still another embodiment, the mismatch cleavage reaction employs one or more proteins that recognize mismatched base pairs in double-stranded DNA (so called “DNA mismatch repair” enzymes) in defined systems for detecting and mapping polymorphisms. For example, the mutY enzyme of E. coli cleaves A at G/A mismatches (Hsu et al., 1994). Other examples include, but are not limited to, the MutHLS enzyme complex of E. coli (Smith and Modrich Proc. 1996) and Cel 1 from the celery (Kulinski et al., 2000) both cleave the DNA at various mismatches. According to an exemplary embodiment, a probe based on a polymorphic site corresponding to a polymorphism of Tables 5.1, 5.2, 6.2 and 6.3 is hybridized to a cDNA or other DNA product from a test cell or cells. The duplex is treated with a DNA mismatch repair enzyme, and the cleavage products, if any, can be detected from electrophoresis protocols or the like. See, for example, U.S. Pat. No. 5,459,039. Alternatively, the screen can be performed in vivo following the insertion of the heteroduplexes in an appropriate vector. The whole procedure is known to those ordinary skilled in the art and is referred to as mismatch repair detection (see e.g. Fakhrai-Rad et al., 2004).

[0133] In other embodiments, alterations in electrophoretic mobility can be used to identify polymorphisms in a sample. For example, single strand conformation polymorphism (SSCP) analysis can be used to detect differences in electrophoretic mobility between mutant and wild type nucleic acids (Orita et al., 1989; Cotton et al., 1993; and Hayashi 1992). Single-stranded DNA fragments of case and control nucleic acids will be denatured and allowed to renature. The secondary structure of single-stranded nucleic acids varies according to sequence. The resulting alteration in electrophoretic mobility enables the detection of even a single base change. The DNA fragments may be labeled or detected with labeled probes. The sensitivity of the assay may be enhanced by using RNA (rather than DNA), in which the secondary structure is more sensitive to a change in sequence. In a preferred embodiment, the method utilizes heteroduplex analysis to separate double stranded heteroduplex molecules on the basis of changes in electrophoretic mobility (Kee et al., 1991).

[0134] In yet another embodiment, the movement of mutant or wild-type fragments in a polyacrylamide gel containing a gradient of denaturant is assayed using denaturing gradient gel electrophoresis (DGGE) (Myers et al., 1985). When DGGE is used as the method of analysis, DNA will be modified to insure that it does not completely denature, for example by adding a GC clamp of approximately 40 by of high-melting GC-rich DNA by PCR. In a further embodiment, a temperature gradient is used in place of a denaturing gradient to identify differences in the mobility of control and sample DNA (Rosenbaum et al., 1987). In another embodiment, the mutant fragment is detected using denaturing HPLC (see e.g. Hoogendoorn et al., 2000).

[0135] Examples of other techniques for detecting polymorphisms include, but are not limited to, selective oligonucleotide hybridization, selective amplification, selective primer extension, selective ligation, single-base extension, selective termination of extension or invasive cleavage assay. For example, oligonucleotide primers may be prepared in which the polymorphism is placed centrally and then hybridized to target DNA under conditions which permit hybridization only if a perfect match is found (Saiki et al., 1986; Saiki et al., 1989). Such oligonucleotides are hybridized to PCR amplified target DNA or a number of different mutations when the oligonucleotides are attached to the hybridizing membrane and hybridized with labeled target DNA. Alternatively, the amplification, the allele-specific hybridization and the detection can be done in a single assay following the principle of the 5′ nuclease assay (e.g. see Livak et al., 1995). For example, the associated allele, a particular allele of a polymorphic locus, or the like is amplified by PCR in the presence of both allele-specific oligonucleotides, each specific for one or the other allele. Each probe has a different fluorescent dye at the 5′ end and a quencher at the 3′ end. During PCR, if one or the other or both allele-specific oligonucleotides are hybridized to the template, the Taq polymerase via its 5′ exonuclease activity will release the corresponding dyes. The latter will thus reveal the genotype of the amplified product.

[0136] Hybridization assays may also be carried out with a temperature gradient following the principle of dynamic allele-specific hybridization or like e.g. Jobs et al., (2003); and Bourgeois and Labuda, (2004). For example, the hybridization is done using one of the two allele-specific oligonucleotides labeled with a fluorescent dye, and an intercalating quencher under a gradually increasing temperature. At low temperature, the probe is hybridized to both the mismatched and full-matched template. The probe melts at a lower temperature when hybridized to the template with a mismatch. The release of the probe is captured by an emission of the fluorescent dye, away from the quencher. The probe melts at a higher temperature when hybridized to the template with no mismatch. The temperature-dependent fluorescence signals therefore indicate the absence or presence of an associated allele, a particular allele of a polymorphic locus, or the like (e.g. Jobs et al., 2003). Alternatively, the hybridization is done under a gradually decreasing temperature. In this case, both allele-specific oligonucleotides are hybridized to the template competitively. At high temperature none of the two probes are hybridized. Once the optimal temperature of the full-matched probe is reached, it hybridizes and leaves no target for the mismatched probe (e.g. Bourgeois and Labuda, 2004). In the latter case, if the allele-specific probes are differently labeled, then they are hybridized to a single PCR-amplified target. If the probes are labeled with the same dye, then the probe cocktail is hybridized twice to identical templates with only one labeled probe, different in the two cocktails, in the presence of the unlabeled competitive probe.

[0137] Alternatively, allele specific amplification technology that depends on selective PCR amplification may be used in conjunction with the present invention. Oligonucleotides used as primers for specific amplification may carry the associated allele, a particular allele of a polymorphic locus, or the like, also referred to as “mutation” of interest in the center of the molecule, so that amplification depends on differential hybridization (Gibbs et al., 1989) or at the extreme 3′ end of one primer where, under appropriate conditions, mismatch can prevent, or reduce polymerase extension (Prossner, 1993). In addition it may be desirable to introduce a novel restriction site in the region of the mutation to create cleavage-based detection (Gasparini et al., 1992). It is anticipated that in certain embodiments, amplification may also be performed using Taq ligase for amplification (Barany, 1991). In such cases, ligation will occur only if there is a perfect match at the 3′ end of the 5′ sequence making it possible to detect the presence of a known associated allele, a particular allele of a polymorphic locus, or the like at a specific site by looking for the presence or absence of amplification. The products of such an oligonucleotide ligation assay can also be detected by means of gel electrophoresis. Furthermore, the oligonucleotides may contain universal tags used in PCR amplification and zip code tags that are different for each allele. The zip code tags are used to isolate a specific, labeled oligonucleotide that may contain a mobility modifier (e.g. Grossman et al., 1994).

[0138] In yet another alternative, allele-specific elongation followed by ligation will form a template for PCR amplification. In such cases, elongation will occur only if there is a perfect match at the 3′ end of the allele-specific oligonucleotide using a DNA polymerase. This reaction is performed directly on the genomic DNA and the extension/ligation products are amplified by PCR. To this end, the oligonucleotides contain universal tags allowing amplification at a high multiplex level and a zip code for SNP identification. The PCR tags are designed in such a way that the two alleles of a SNP are amplified by different forward primers, each having a different dye. The zip code tags are the same for both alleles of a given SNPs and they are used for hybridization of the PCR-amplified products to oligonucleotides bound to a solid support, chip, bead array or like. For an example of the procedure, see Fan et al. (Cold Spring Harbor Symposia on Quantitative Biology, Vol. LXVIII, pp. 69-78 2003).

[0139] Another alternative includes the single-base extension/ligation assay using a molecular inversion probe, consisting of a single, long oligonucleotide (see e.g. Hardenbol et al., 2003). In such an embodiment, the oligonucleotide hybridizes on both side of the SNP locus directly on the genomic DNA, leaving a one-base gap at the SNP locus. The gap-filling, one-base extension/ligation is performed in four tubes, each having a different dNTP. Following this reaction, the oligonucleotide is circularized whereas unreactive, linear oligonucleotides are degraded using an exonuclease such as exonuclease I of E. coli. The circular oligonucleotides are then linearized and the products are amplified and labeled using universal tags on the oligonucleotides. The original oligonucleotide also contains a SNP-specific zip code allowing hybridization to oligonucleotides bound to a solid support, chip, and bead array or like. This reaction can be performed at a high multiplexed level.

[0140] In another alternative, the associated allele, a particular allele of a polymorphic locus, or the like is scored by single-base extension (see e.g. U.S. Pat. No. 5,888,819). The template is first amplified by PCR. The extension oligonucleotide is then hybridized next to the SNP locus and the extension reaction is performed using a thermostable polymerase such as ThermoSequenase (GE Healthcare) in the presence of labeled ddNTPs. This reaction can therefore be cycled several times. The identity of the labeled ddNTP incorporated will reveal the genotype at the SNP locus. The labeled products can be detected by means of gel electrophoresis, fluorescence polarization (e.g. Chen et al., 1999) or by hybridization to oligonucleotides bound to a solid support, chip, and bead array or like. In the latter case, the extension oligonucleotide will contain a SNP-specific zip code tag.

[0141] In yet another alternative, a SNP is scored by selective termination of extension. The template is first amplified by PCR and the extension oligonucleotide hybridizes in the vicinity of the SNP locus, close to but not necessarily adjacent to it. The extension reaction is carried out using a thermostable polymerase such as ThermoSequenase (GE Healthcare) in the presence of a mix of dNTPs and at least one ddNTP. The latter has to terminate the extension at one of the allele of the interrogated SNP, but not both such that the two alleles will generate extension products of different sizes. The extension product can then be detected by means of gel electrophoresis, in which case the extension products need to be labeled, or by mass spectrometry (see e.g. Storm et al., 2003).

[0142] In another alternative, SNPs are detected using an invasive cleavage assay (see U.S. Pat. No. 6,090,543). There are five oligonucleotides per SNP to interrogate but these are used in a two step-reaction. During the primary reaction, three of the designed oligonucleotides are first hybridized directly to the genomic DNA. One of them is locus-specific and hybridizes up to the SNP locus (the pairing of the 3′ base at the SNP locus is not necessary). There are two allele-specific oligonucleotides that hybridize in tandem to the locus-specific probe but also contain a 5′ flap that is specific for each allele of the SNP. Depending upon hybridization of the allele-specific oligonucleotides at the base of the SNP locus, this creates a structure that is recognized by a cleavase enzyme (U.S. Pat. No. 6,090,606) and the allele-specific flap is released. During the secondary reaction, the flap fragments hybridize to a specific cassette to recreate the same structure as above except that the cleavage will release a small DNA fragment labeled with a fluorescent dye that can be detected using regular fluorescence detector. In the cassette, the emission of the dye is inhibited by a quencher.

Methods to Identify Agents that Modulate the Expression of a Nucleic Acid Encoding a Gene Involved in IBD

[0143] The present invention provides methods for identifying agents that modulate the expression of a nucleic acid encoding a gene from Tables 2-4. Such methods may utilize any available means of monitoring for changes in the expression level of the nucleic acids of the invention. As used herein, an agent is said to modulate the expression of a nucleic acid of the invention if it is capable of up- or down-regulating expression of the nucleic acid in a cell. Such cells can be obtained from any parts of the body such as the hair, mouth, rectum, scalp, blood, dermis, epidermis, skin cells, cutaneous surfaces, intertrigious areas, genitalia and fluids, vessels and endothelium. Some non-limiting examples of cells that can be used are: digestive system cells, muscle cells, nervous cells, blood and vessels cells, T cell, mast cell, lymphocyte, monocyte, macrophage, and epithelial cells.

[0144] In one assay format, the expression of a nucleic acid encoding a gene of the invention (see Tables 2-4) in a cell or tissue sample is monitored directly by hybridization to the nucleic acids of the invention. Cell lines or tissues are exposed to the agent to be tested under appropriate conditions and time and total RNA or mRNA is isolated by standard procedures such as those disclosed in Sambrook et al., (1989) Molecular Cloning: A Laboratory Manual, Cold Spring Harbor Laboratory Press).

[0145] Probes to detect differences in RNA expression levels between cells exposed to the agent and control cells may be prepared as described above. Hybridization conditions are modified using known methods, such as those described by Sambrook at al., and Ausubel et al., as required for each probe. Hybridization of total cellular RNA or RNA enriched for polyA RNA can be accomplished in any available format. For instance, total cellular RNA or RNA enriched for polyA RNA can be affixed to a solid support and the solid support exposed to at least one probe comprising at least one, or part of one of the sequences of the invention under conditions in which the probe will specifically hybridize. Alternatively, nucleic acid fragments comprising at least one, or part of one of the sequences of the invention can be affixed to a solid support, such as a silicon chip or a porous glass wafer. The chip or wafer can then be exposed to total cellular RNA or polyA RNA from a sample under conditions in which the affixed sequences will specifically hybridize to the RNA. By examining for the ability of a given probe to specifically hybridize to an RNA sample from an untreated cell population and from a cell population exposed to the agent, agents which up or down regulate expression are identified.

Methods to Identify Agents that Modulate the Activity of a Protein Encoded by a Gene Involved in IBD

[0146] The present invention provides methods for identifying agents that modulate at least one activity of the proteins described in Tables 2-4. Such methods may utilize any means of monitoring or detecting the desired activity. As used herein, an agent is said to modulate the expression of a protein of the invention if it is capable of up- or down-regulating expression of the protein in a cell. Such cells can be obtained from any parts of the body such as the hair, mouth, rectum, scalp, blood, dermis, epidermis, skin cells, cutaneous surfaces, intertrigious areas, genitalia and fluids, vessels and endothelium. Some non-limiting examples of cells that can be used are: digestive system cells, muscle cells, nervous cells, blood and vessels cells, T cell, mast cell, lymphocyte, monocyte, macrophage, and epithelial cells.

[0147] In one format, the specific activity of a protein of the invention, normalized to a standard unit, may be assayed in a cell population that has been exposed to the agent to be tested and compared to an unexposed control cell population. Cell lines or populations are exposed to the agent to be tested under appropriate conditions and times. Cellular lysates may be prepared from the exposed cell line or population and a control, unexposed cell line or population. The cellular lysates are then analyzed with a probe, such as an antibody probe.

[0148] Antibody probes can be prepared by immunizing suitable mammalian hosts utilizing appropriate immunization protocols using the proteins of the invention or antigen-containing fragments thereof. To enhance immunogenicity, these proteins or fragments can be conjugated to suitable carriers. Methods for preparing immunogenic conjugates with carriers such as BSA, KLH or other carrier proteins are well known in the art. In some circumstances, direct conjugation using, for example, carbodiimide reagents may be effective; in other instances linking reagents such as those supplied by Pierce Chemical Co. (Rockford, Ill.) may be desirable to provide accessibility to the hapten. The hapten peptides can be extended at either the amino or carboxy terminus with a cysteine residue or interspersed with cysteine residues, for example, to facilitate linking to a carrier. Administration of the immunogens is conducted generally by injection over a suitable time period and with use of suitable adjuvants, as is generally understood in the art. During the immunization schedule, titers of antibodies are taken to determine adequacy of antibody formation. While the polyclonal antisera produced in this way may be satisfactory for some applications, for pharmaceutical compositions, use of monoclonal preparations is preferred. Immortalized cell lines which secrete the desired monoclonal antibodies may be prepared using standard methods, see e.g., Kohler & Milstein (1992) or modifications which affect immortalization of lymphocytes or spleen cells, as is generally known. The immortalized cell lines secreting the desired antibodies can be screened by immunoassay in which the antigen is the peptide hapten, polypeptide or protein. When the appropriate immortalized cell culture secreting the desired antibody is identified, the cells can be cultured either in vitro or by production in ascites fluid. The desired monoclonal antibodies may be recovered from the culture supernatant or from the ascites supernatant. Fragments of the monoclonal antibodies or the polyclonal antisera which contain the immunologically significant portion(s) can be used as antagonists, as well as the intact antibodies. Use of immunologically reactive fragments, such as Fab or Fab′ fragments, is often preferable, especially in a therapeutic context, as these fragments are generally less immunogenic than the whole immunoglobulin. The antibodies or fragments may also be produced, using current technology, by recombinant means. Antibody regions that bind specifically to the desired regions of the protein can also be produced in the context of chimeras derived from multiple species. Antibody regions that bind specifically to the desired regions of the protein can also be produced in the context of chimeras from multiple species, for instance, humanized antibodies. The antibody can therefore be a humanized antibody or a human antibody, as described in U.S. Pat. No. 5,585,089 or Riechmann et al. (1988).

[0149] Agents that are assayed in the above method can be randomly selected or rationally selected or designed. As used herein, an agent is said to be randomly selected when the agent is chosen randomly without considering the specific sequences involved in the association of the protein of the invention alone or with its associated substrates, binding partners, etc. An example of randomly selected agents is the use of a chemical library or a peptide combinatorial library, or a growth broth of an organism. As used herein, an agent is said to be rationally selected or designed when the agent is chosen on a non-random basis which takes into account the sequence of the target site or its conformation in connection with the agent's action. Agents can be rationally selected or rationally designed by utilizing the peptide sequences that make up these sites. For example, a rationally selected peptide agent can be a peptide whose amino acid sequence is identical to or a derivative of any functional consensus site. The agents of the present invention can be, as examples, oligonucleotides, antisense polynucleotides, interfering RNA, peptides, peptide mimetics, antibodies, antibody fragments, small molecules, vitamin derivatives, as well as carbohydrates. Peptide agents of the invention can be prepared using standard solid phase (or solution phase) peptide synthesis methods, as is known in the art. In addition, the DNA encoding these peptides may be synthesized using commercially available oligonucleotide synthesis instrumentation and produced recombinantly using standard recombinant production systems. The production using solid phase peptide synthesis is necessitated if non-gene-encoded amino acids are to be included.

[0150] Another class of agents of the present invention includes antibodies or fragments thereof that bind to a protein encoded by a gene in Tables 2-4. Antibody agents can be obtained by immunization of suitable mammalian subjects with peptides, containing as antigenic regions, those portions of the protein intended to be targeted by the antibodies (see section above of antibodies as probes for standard antibody preparation methodologies).

[0151] In yet another class of agents, the present invention includes peptide mimetics that mimic the three-dimensional structure of the protein encoded by a gene from Tables 2-4. Such peptide mimetics may have significant advantages over naturally occurring peptides, including, for example: more economical production, greater chemical stability, enhanced pharmacological properties (half-life, absorption, potency, efficacy, etc.), altered specificity (e.g., a broad-spectrum of biological activities), reduced antigenicity and others. In one form, mimetics are peptide-containing molecules that mimic elements of protein secondary structure. The underlying rationale behind the use of peptide mimetics is that the peptide backbone of proteins exists chiefly to orient amino acid side chains in such a way as to facilitate molecular interactions, such as those of antibody and antigen. A peptide mimetic is expected to permit molecular interactions similar to the natural molecule. In another form, peptide analogs are commonly used in the pharmaceutical industry as non-peptide drugs with properties analogous to those of the template peptide. These types of non-peptide compounds are also referred to as peptide mimetics or peptidomimetics (Fauchere, 1986; Veber & Freidinger, 1985; Evans et al., 1987) which are usually developed with the aid of computerized molecular modeling. Peptide mimetics that are structurally similar to therapeutically useful peptides may be used to produce an equivalent therapeutic or prophylactic effect. Generally, peptide mimetics are structurally similar to a paradigm polypeptide (i.e., a polypeptide that has a biochemical property or pharmacological activity), but have one or more peptide linkages optionally replaced by a linkage using methods known in the art. Labeling of peptide mimetics usually involves covalent attachment of one or more labels, directly or through a spacer (e.g., an amide group), to non-interfering position(s) on the peptide mimetic that are predicted by quantitative structure-activity data and molecular modeling. Such non-interfering positions generally are positions that do not form direct contacts with the macromolecule(s) to which the peptide mimetic binds to produce the therapeutic effect. Derivitization (e.g., labeling) of peptide mimetics should not substantially interfere with the desired biological or pharmacological activity of the peptide mimetic. The use of peptide mimetics can be enhanced through the use of combinatorial chemistry to create drug libraries. The design of peptide mimetics can be aided by identifying amino acid mutations that increase or decrease binding of the protein to its binding partners. Approaches that can be used include the yeast two hybrid method (see Chien et al., 1991) and the phage display method. The two hybrid method detects protein-protein interactions in yeast (Fields et al., 1989). The phage display method detects the interaction between an immobilized protein and a protein that is expressed on the surface of phages such as lambda and M13 (Amberg et al., 1993; Hogrefe et al., 1993). These methods allow positive and negative selection for protein-protein interactions and the identification of the sequences that determine these interactions.

Method to Diagnose 1BD (e.g. Crohn's Disease)

[0152] The present invention also relates to methods for diagnosing CROHN or a related disease, preferably a subtype of IBD (e.g. Crohn's disease), a predisposition to such a disease and/or disease progression. In some methods, the steps comprise contacting a target sample with (a) nucleic acid molecule(s) or fragments thereof and comparing the concentration of individual mRNA(s) with the concentration of the corresponding mRNA(s) from at least one healthy donor. An aberrant (increased or decreased) mRNA level of at least one gene from Tables 2-4, at least 5 or 10 genes from Tables 2-4, at least 50 genes from Tables 2-4, at least 100 genes from Tables 2-4 or at least 200 genes from Tables 2-4 determined in the sample in comparison to the control sample is an indication of IBD (e.g. Crohn's disease) a related subtype or a disposition to such kinds of diseases. For diagnosis, samples are, preferably, obtained from any parts of the body such as the hair, mouth, rectum, scalp, blood, dermis, epidermis, skin cells, cutaneous surfaces, intertrigious areas, genitalia and fluids, vessels and endothelium. Some non-limiting examples of cells that can be used are: cells of the digestive system, muscle cells, nervous cells, blood and vessels cells, T cell, mast cell, lymphocyte, monocyte, macrophage, and epithelial cells.

[0153] For analysis of gene expression, total RNA is obtained from cells according to standard procedures and, preferably, reverse-transcribed. Preferably, a DNAse treatment (in order to get rid of contaminating genomic DNA) is performed.

[0154] The nucleic acid molecule or fragment is typically a nucleic acid probe for hybridization or a primer for PCR. The person skilled in the art is in a position to design suitable nucleic acids probes based on the information provided in the Tables of the present invention (Tables 1-4, 5.1, 5.2, 6.2, 6.3). The target cellular component, i.e. mRNA, e.g., in brain tissue, may be detected directly in situ, e.g. by in situ hybridization or it may be isolated from other cell components by common methods known to those skilled in the art before contacting with a probe. Detection methods include Northern blot analysis, RNase protection, in situ methods, e.g. in situ hybridization, in vitro amplification methods (PCR, LCR, QRNA replicase or RNA-transcription/amplification (TAS, 3SR), reverse dot blot disclosed in EP-B10237362) and other detection assays that are known to those skilled in the art. Products obtained by in vitro amplification can be detected according to established methods, e.g. by separating the products on agarose or polyacrylamide gels and by subsequent staining with ethidium bromide or any other dye or reagent. Alternatively, the amplified products can be detected by using labeled primers for amplification or labeled dNTPs. Preferably, detection is based on a microarray.

[0155] The probes (or primers) (or, alternatively, the reverse-transcribed sample mRNAs) can be detectably labeled, for example, with a radioisotope, a bioluminescent compound, a chemiluminescent compound, a fluorescent compound, a metal chelate, or an enzyme.

[0156] The present invention also relates to the use of the nucleic acid molecules or fragments described above for the preparation of a diagnostic composition for the diagnosis of IBD (e.g. Crohn's disease) or a subtype or predisposition to such a disease.

[0157] The present invention also relates to the use of the nucleic acid molecules of the present invention for the isolation or development of a compound which is useful for therapy of IBD (e.g. Crohn's disease). For example, the nucleic acid molecules of the invention and the data obtained using said nucleic acid molecules for diagnosis of IBD (e.g. Crohn's disease) might allow for the identification of further genes which are specifically dysregulated, and thus may be considered as potential targets for therapeutic interventions. Furthermore, such diagnostic might also be used for selection of patients that might respond positively or negatively to a potential target for therapeutic interventions (as for the pharmacogenomics and personalized medicine concept well know in the art; see prognostic assays text below).

[0158] The invention further provides prognostic assays that can be used to identify subjects having or at risk of developing IBD (e.g. Crohn's disease). In such method, a test sample is obtained from a subject and the amount and/or concentration of the nucleic acid described in Tables 2-4 is determined; wherein the presence of an associated allele, a particular allele of a polymorphic locus, or the likes in the nucleic acids sequences of this invention (see SEQ ID from Tables 5.1, 5.2, 6.2 and 6.3) can be diagnostic for a subject having or at risk of developing IBD (e.g. Crohn's disease). As used herein, a “test sample” refers to a biological sample obtained from a subject of interest. For example, a test sample can be a biological fluid, a cell sample, or tissue. A biological fluid can be, but is not limited to saliva, serum, mucus, urine, stools, spermatozoids, vaginal secretions, lymph, amiotic liquid, pleural liquid and tears. Cells can be, but are not limited to: cells of the digestive system, hair cells, muscle cells, nervous cells, blood and vessels cells, dermis, epidermis and other skin cells, and various brain cells.

[0159] Furthermore, the prognostic assays described herein can be used to determine whether a subject can be administered an agent (e.g., an agonist, antagonist, peptidomimetic, polypeptide, nucleic acid such as antisense DNA or interfering RNA (RNAi), small molecule or other drug candidate) to treat IBD (e.g. Crohn's disease). Specifically, these assays can be used to predict whether an individual will have an efficacious response or will experience adverse events in response to such an agent. For example, such methods can be used to determine whether a subject can be effectively treated with an agent that modulates the expression and/or activity of a gene from Tables 2-4 or the nucleic acids described herein. In another example, an association study may be performed to identify polymorphisms from Tables 5.1, 5.2, 6.2 and 6.3 that are associated with a given response to the agent, e.g., an efficacious response or the likelihood of one or more adverse events. Thus, one embodiment of the present invention provides methods for determining whether a subject can be effectively treated with an agent for a disease associated with aberrant expression or activity of a gene from Tables 2-4 in which a test sample is obtained and nucleic acids or polypeptides from Tables 2-4 are detected (e.g., wherein the presence of a particular level of expression of a gene from Tables 2-4 or a particular allelic variant of such gene, such as polymorphisms from Tables 5.1, 5.2, 6.2 and 6.3 is diagnostic for a subject that can be administered an agent to treat a disorder such as IBD (e.g. Crohn's disease). In one embodiment, the method includes obtaining a sample from a subject suspected of having IBD (e.g. Crohn's disease) or an affected individual and exposing such sample to an agent. The expression and/or activity of the nucleic acids and/or genes of the invention are monitored before and after treatment with such agent to assess the effect of such agent. After analysis of the expression values, one skilled in the art can determine whether such agent can effectively treat such subject. In another embodiment, the method includes obtaining a sample from a subject having or susceptible to developing IBD (e.g. Crohn's disease) and determining the allelic constitution of polymorphisms from Tables 5.1, 5.2, 6.2 and 6.3 that are associated with a particular response to an agent. After analysis of the allelic constitution of the individual at the associated polymorphisms, one skilled in the art can determine whether such agent can effectively treat such subject.

[0160] The methods of the invention can also be used to detect genetic alterations in a gene from Tables 2-4, thereby determining if a subject with the lesioned gene is at risk for a disease associated with IBD (e.g. Crohn's disease). In preferred embodiments, the methods include detecting, in a sample of cells from the subject, the presence or absence of a genetic alteration characterized by at least one alteration linked to or affecting the integrity of a gene from Tables 2-4 encoding a polypeptide or the misexpression of such gene. For example, such genetic alterations can be detected by ascertaining the existence of at least one of: (1) a deletion of one or more nucleotides from a gene from Tables 2-4; (2) an addition of one or more nucleotides to a gene from Tables 2-4; (3) a substitution of one or more nucleotides of a gene from Tables 2-4; (4) a chromosomal rearrangement of a gene from Tables 2-4; (5) an alteration in the level of a messenger RNA transcript of a gene from Tables 2-4; (6) aberrant modification of a gene from Tables 2-4, such as of the methylation pattern of the genomic DNA, (7) the presence of a non-wild type splicing pattern of a messenger RNA transcript of a gene from Tables 2-4; (8) inappropriate post-translational modification of a polypeptide encoded by a gene from Tables 2-4; and (9) alternative promoter use. As described herein, there are a large number of assay techniques known in the art which can be used for detecting alterations in a gene from Tables 2-4. A preferred biological sample is a peripheral blood sample obtained by conventional means from a subject. Another preferred biological sample is a buccal swab. Other biological samples can be, but are not limited to blood, biopsy sample, urine, stools, hair, vaginal secretions, lymph, amiotic liquid, pleural liquid and tears.

[0161] In certain embodiments, detection of the alteration involves the use of a probe/primer in a polymerase chain reaction (PCR) (see, e.g., U.S. Pat. Nos. 4,683,195 and 4,683,202), such as anchor PCR or RACE PCR, or alternatively, in a ligation chain reaction (LCR) (see, e.g., Landegran et al., 1988; and Nakazawa et al., 1994), the latter of which can be particularly useful for detecting point mutations in a gene from Tables 2-4 (see Abavaya et al., 1995). This method can include the steps of collecting a sample of cells from a patient, isolating nucleic acid (e.g., genomic DNA, mRNA, or both) from the cells of the sample, contacting the nucleic acid sample with one or more primers which specifically hybridize to a gene from Tables 2-4 under conditions such that hybridization and amplification of the nucleic acid from Tables 2-4 (if present) occurs, and detecting the presence or absence of an amplification product, or detecting the size of the amplification product and comparing the length to a control sample. PCR and/or LCR may be desirable to use as a preliminary amplification step in conjunction with some of the techniques used for detecting a mutation, an associated allele, a particular allele of a polymorphic locus, or the like described in the above sections. Other mutation detection and mapping methods are described in previous sections of the detailed description of the present invention.

[0162] The present invention also relates to further methods for diagnosing IBD (e.g. Crohn's disease) or a related disorder or subtype, a predisposition to such a disorder and/or disorder progression. In some methods, the steps comprise contacting a target sample with (a) nucleic molecule(s) or fragments thereof and determining the presence or absence of a particular allele of a polymorphism that confers a disorder-related phenotype (e.g., predisposition to such a disorder and/or disorder progression). The presence of at least one allele from Tables 5.1, 5.2, 6.2 and 6.3 that is associated with IBD (e.g. Crohn's disease) (“associated allele”), at least 5 or 10 associated alleles from Tables 5.1, 5.2, 6.2 and 6.3, at least 50 associated alleles from Tables 5.1, 5.2, 6.2 and 6.3 at least 100 associated alleles from Tables 5.1, 5.2, 6.2 and 6.3, or at least 200 associated alleles from Tables 5.1, 5.2, 6.2 and 6.3 determined in the sample is an indication of IBD (e.g. Crohn's disease) or a related disorder, a disposition or predisposition to such kinds of disorders, or a prognosis for such disorder progression. Such samples and cells can be obtained from any parts of the body such as the hair, colon, mouth, rectum, scalp, blood, dermis, epidermis, skin cells, cutaneous surfaces, intertrigious areas, genitalia and fluids, vessels and endothelium. Some non-limiting examples of cells that can be used are: cells of the digestive system, muscle cells, nervous cells, blood and vessels cells, T cell, mast cell, lymphocyte, monocyte, macrophage, and epithelial cells.

[0163] In other embodiments, alterations in a gene from Tables 2-4 can be identified by hybridizing sample and control nucleic acids, e.g., DNA or RNA, to high density arrays or bead arrays containing tens to thousands of oligonucleotide probes (Cronin et al., 1996; Kozal et al., 1996). For example, alterations in a gene from Tables 2-4 can be identified in two dimensional arrays containing light-generated DNA probes as described in Cronin et al., (1996). Briefly, a first hybridization array of probes can be used to scan through long stretches of DNA in a sample and control to identify base changes between the sequences by making linear arrays of sequential overlapping probes. This step allows the identification of point mutations, associated alleles, particular alleles of a polymorphic locus, or the like. This step is followed by a second hybridization array that allows the characterization of specific mutations by using smaller, specialized probe arrays complementary to all variants, mutations, alleles detected. Each mutation array is composed of parallel probe sets, one complementary to the wild-type gene and the other complementary to the mutant gene.

[0164] In yet another embodiment, any of a variety of sequencing reactions known in the art can be used to directly sequence a gene from Tables 2-4 and detect an associated allele, a particular allele of a polymorphic locus, or the like by comparing the sequence of the sample gene from Tables 2-4 with the corresponding wild-type (control) sequence (see text described in previous sections for various sequencing techniques and other methods of detecting an associated allele, a particular allele of a polymorphic locus, or the likes in a gene from Tables 2-4. Such methods include methods in which protection from cleavage agents is used to detect mismatched bases in RNA/RNA, DNA/DNA or RNA/DNA heteroduplexes (Myers et al., 1985) and alterations in electrophoretic mobility. Examples of other techniques for detecting point mutations, an associated allele, a particular allele of a polymorphic locus, or the like include, but are not limited to, selective oligonucleotide hybridization, selective amplification, selective primer extension, selective ligation, single-base extension, selective termination of extension or invasive cleavage assay.

[0165] Other types of markers can also be used for diagnostic purposes. For example, microsatellites can also be useful to detect the genetic predisposition of an individual to a given disorder. Microsatellites consist of short sequence motifs of one or a few nucleotides repeated in tandem. The most common motifs are polynucleotide runs, dinucleotide repeats (particularly the CA repeats) and trinucleotide repeats. However, other types of repeats can also be used. The microsatellites are very useful for genetic mapping because they are highly polymorphic in their length. Microsatellite markers can be typed by various means, including but not limited to DNA fragment sizing, oligonucleotide ligation assay and mass spectrometry. For example, the locus of the microsatellite is amplified by PCR and the size of the PCR fragment will be directly correlated to the length of the microsatellite repeat. The size of the PCR fragment can be detected by regular means of gel electrophoresis. The fragment can be labeled internally during PCR or by using end-labeled oligonucleotides in the PCR reaction (e.g. Mansfield et al., 1996). Alternatively, the size of the PCR fragment is determined by mass spectrometry. In another alternative, an oligonucleotide ligation assay can be performed. The microsatellite locus is first amplified by PCR. Then, different oligonucleotides can be submitted to ligation at the center of the repeat with a set of oligonucleotides covering all the possible lengths of the marker at a given locus (Zirvi et al., 1999). Another example of design of an oligonucleotide assay comprises the ligation of three oligonucleotides; a 5′ oligonucleotide hybridizing to the 5′ flanking sequence, a repeat oligonucleotide of the length of the shortest allele of the marker hybridizing to the repeated region and a set of 3′ oligonucleotides covering all the existing alleles hybridizing to the 3′ flanking sequence and a portion of the repeated region for all the alleles longer than the shortest one. For the shortest allele, the 3′ oligonucleotide exclusively hybridizes to the 3′ flanking sequence (U.S. Pat. No. 6,479,244).

[0166] The methods described herein may be performed, for example, by utilizing pre-packaged diagnostic kits comprising at least one probe nucleic acid selected from the SEQ ID of Tables 5.1, 5.2, 6.2 and 6.3, or antibody reagent described herein, which may be conveniently used, for example, in a clinical setting to diagnose patient exhibiting symptoms or a family history of a disorder or disorder involving abnormal activity of genes from Tables 2-4.

Method to Treat an Animal Suspected of Having IBD (e.g. Crohn's Disease)

[0167] The present invention provides methods of treating a disease associated with IBD (e.g. Crohn's disease) by expressing in vivo the nucleic acids of at least one gene from Tables 2-4. These nucleic acids can be inserted into any of a number of well-known vectors for the transfection of target cells and organisms as described below. The nucleic acids are transfected into cells, ex vivo or in vivo, through the interaction of the vector and the target cell. The nucleic acids encoding a gene from Tables 2-4, under the control of a promoter, then express the encoded protein, thereby mitigating the effects of absent, partial inactivation, or abnormal expression of a gene from Tables 2-4.

[0168] Such gene therapy procedures have been used to correct acquired and inherited genetic defects, cancer, and viral infection in a number of contexts. The ability to express artificial genes in humans facilitates the prevention and/or cure of many important human disorders, including many disorders which are not amenable to treatment by other therapies (for a review of gene therapy procedures, see Anderson, 1992; Nabel & Feigner, 1993; Mitani & Caskey, 1993; Mulligan, 1993; Dillon, 1993; Miller, 1992; Van Brunt, 1998; Vigne, 1995; Kremer & Perricaudet 1995; Doerfler & Bohm 1995; and Yu et al., 1994).

[0169] Delivery of the gene or genetic material into the cell is the first critical step in gene therapy treatment of a disorder. A large number of delivery methods are well known to those of skill in the art. Preferably, the nucleic acids are administered for in vivo or ex vivo gene therapy uses. Non-viral vector delivery systems include DNA plasmids, naked nucleic acid, and nucleic acid complexed with a delivery vehicle such as a liposome. Viral vector delivery systems include DNA and RNA viruses, which have either episomal or integrated genomes after delivery to the cell. For a review of gene therapy procedures, see the references included in the above section.

[0170] The use of RNA or DNA based viral systems for the delivery of nucleic acids take advantage of highly evolved processes for targeting a virus to specific cells in the body and trafficking the viral payload to the nucleus. Viral vectors can be administered directly to patients (in vivo) or they can be used to treat cells in vitro and the modified cells are administered to patients (ex vivo). Conventional viral based systems for the delivery of nucleic acids could include retroviral, lentivirus, adenoviral, adeno-associated and herpes simplex virus vectors for gene transfer. Viral vectors are currently the most efficient and versatile method of gene transfer in target cells and tissues. Integration in the host genome is possible with the retrovirus, lentivirus, and adeno-associated virus gene transfer methods, often resulting in long term expression of the inserted transgene. Additionally, high transduction efficiencies have been observed in many different cell types and target tissues.

[0171] The tropism of a retrovirus can be altered by incorporating foreign envelope proteins, expanding the potential target population of target cells. Lentiviral vectors are retroviral vectors that are able to transduce or infect non-dividing cells and typically produce high viral titers. Selection of a retroviral gene transfer system would therefore depend on the target tissue. Retroviral vectors are comprised of cis-acting long terminal repeats with packaging capacity for up to 6-10 kb of foreign sequence. The minimum cis-acting LTRs are sufficient for replication and packaging of the vectors, which are then used to integrate the therapeutic gene into the target cell to provide permanent transgene expression. Widely used retroviral vectors include those based upon murine leukemia virus (MuLV), gibbon ape leukemia virus (GaLV), Simian Immuno deficiency virus (Sly), human immuno deficiency virus (HIV), and combinations thereof (see, e.g., Buchscher et al., 1992; Johann et al., 1992; Sommerfelt et al., 1990; Wilson et al., 1989; Miller et al., 1999; and PCT/US94/05700).

[0172] In applications where transient expression of the nucleic acid is preferred, adenoviral based systems are typically used. Adenoviral based vectors are capable of very high transduction efficiency in many cell types and do not require cell division. With such vectors, high titer and levels of expression have been obtained. This vector can be produced in large quantities in a relatively simple system. Adeno-associated virus (“AAV”) vectors are also used to transduce cells with target nucleic acids, e.g., in the in vitro production of nucleic acids and peptides, and for in vivo and ex vivo gene therapy procedures (see, e.g., West et al., 1987; U.S. Pat. No. 4,797,368; WO 93/24641; Kotin, 1994; Muzyczka, 1994). Construction of recombinant AAV vectors is described in a number of publications, including U.S. Pat. No. 5,173,414; Tratschin et al., 1985; Tratschin, et al., 1984; Hermonat & Muzyczka, 1984; and Samulski et al., 1989.

[0173] In particular, numerous viral vector approaches are currently available for gene transfer in clinical trials, with retroviral vectors by far the most frequently used system. All of these viral vectors utilize approaches that involve complementation of defective vectors by genes inserted into helper cell lines to generate the transducing agent. pLASN and MFG-S are examples are retroviral vectors that have been used in clinical trials (Dunbar et al., 1995; Kohn et al., 1995; Malech et al., 1997). PA317/pLASN was the first therapeutic vector used in a gene therapy trial (Blaese et al., 1995). Transduction efficiencies of 50% or greater have been observed for MFG-S packaged vectors (Ellem et al., 1997; and Dranoff et al., 1997).

[0174] Recombinant adeno-associated virus vectors (rAAV) are a promising alternative gene delivery systems based on the defective and nonpathogenic parvovirus adeno-associated type 2 virus. All vectors are derived from a plasmid that retains only the AAV 145 by inverted terminal repeats flanking the transgene expression cassette. Efficient gene transfer and stable transgene delivery due to integration into the genomes of the transduced cell are key features for this vector system (Wagner et al., 1998, Kearns et al., 1996).

[0175] Replication-deficient recombinant adenoviral vectors (Ad) are predominantly used in transient expression gene therapy; because they can be produced at high titer and they readily infect a number of different cell types. Most adenovirus vectors are engineered such that a transgene replaces the Ad E1a, E1b, and E3 genes; subsequently the replication defector vector is propagated in human 293 cells that supply the deleted gene function in trans. Ad vectors can transduce multiple types of tissues in vivo, including nondividing, differentiated cells such as those found in the liver, kidney and muscle tissues. Conventional Ad vectors have a large carrying capacity. An example of the use of an Ad vector in a clinical trial involved polynucleotide therapy for antitumor immunization with intramuscular injection (Sterman et al., 1998). Additional examples of the use of adenovirus vectors for gene transfer in clinical trials include Rosenecker et al., 1996; Sterman et al., 1998; Welsh et al., 1995; Alvarez et al., 1997; Topf et al., 1998.

[0176] Packaging cells are used to form virus particles that are capable of infecting a host cell. Such cells include 293 cells, which package adenovirus, and ψ2 cells or PA317 cells, which package retrovirus. Viral vectors used in gene therapy are usually generated by a producer cell line that packages a nucleic acid vector into a viral particle. The vectors typically contain the minimal viral sequences required for packaging and subsequent integration into a host, other viral sequences being replaced by an expression cassette for the protein to be expressed. The missing viral functions are supplied in trans by the packaging cell line. For example, AAV vectors used in gene therapy typically only possess ITR sequences from the AAV genome which are required for packaging and integration into the host genome. Viral DNA is packaged in a cell line, which contains a helper plasmid encoding the other AAV genes, namely rep and cap, but lacking ITR sequences. The cell line is also infected with adenovirus as a helper. The helper virus promotes replication of the AAV vector and expression of AAV genes from the helper plasmid. The helper plasmid is not packaged in significant amounts due to a lack of ITR sequences. Contamination with adenovirus can be reduced by, e.g., heat treatment to which adenovirus is more sensitive than AAV.

[0177] In many gene therapy applications, it is desirable that the gene therapy vector be delivered with a high degree of specificity to a particular tissue type. A viral vector is typically modified to have specificity for a given cell type by expressing a ligand as a fusion protein with a viral coat protein on the viruses outer surface. The ligand is chosen to have affinity for a receptor known to be present on the cell type of interest. For example, Han et al., 1995, reported that Moloney murine leukemia virus can be modified to express human heregulin fused to gp70, and the recombinant virus infects certain human breast cancer cells expressing human epidermal growth factor receptor. This principle can be extended to other pairs of viruses expressing a ligand fusion protein and target cells expressing a receptor. For example, filamentous phage can be engineered to display antibody fragments (e.g., Fab or Fv) having specific binding affinity for virtually any chosen cellular receptor. Although the above description applies primarily to viral vectors, the same principles can be applied to nonviral vectors. Such vectors can be engineered to contain specific uptake sequences thought to favor uptake by specific target cells.

[0178] Gene therapy vectors can be delivered in vivo by administration to an individual patient, typically by systemic administration (e.g., intravenous, intraperitoneal, intramuscular, subdermal, or intracranial infusion) or topical application. Alternatively, vectors can be delivered to cells ex vivo, such as cells explanted from an individual patient (e.g., lymphocytes, bone marrow aspirates, and tissue biopsy) or universal donor hematopoietic stem cells, followed by reimplantation of the cells into a patient, usually after selection for cells which have incorporated the vector.

[0179] Ex vivo cell transfection for diagnostics, research, or for gene therapy (e.g., via re-infusion of the transfected cells into the host organism) is well known to those of skill in the art. In a preferred embodiment, cells are isolated from the subject organism, transfected with a nucleic acid (gene or cDNA), and re-infused back into the subject organism (e.g., patient). Various cell types suitable for ex vivo transfection are well known to those of skill in the art (see, e.g., Freshney et al., 1994; and the references cited therein for a discussion of how to isolate and culture cells from patients).

[0180] In one embodiment, stem cells are used in ex vivo procedures for cell transfection and gene therapy. The advantage to using stem cells is that they can be differentiated into other cell types in vitro, or can be introduced into a mammal (such as the donor of the cells) where they will engraft in the bone marrow. Methods for differentiating CD34+ cells in vitro into clinically important immune cell types using cytokines such a GM-CSF, IFN-γ and TNF-α are known (see Inaba et al., 1992).

[0181] Stem cells are isolated for transduction and differentiation using known methods. For example, stem cells are isolated from bone marrow cells by panning the bone marrow cells with antibodies which bind unwanted cells, such as CD4+ and CD8+ (T cells), CD45+ (panB cells), GR-1 (granulocytes), and lad (differentiated antigen presenting cells).

[0182] Vectors (e.g., retroviruses, adenoviruses, liposomes, etc.) containing therapeutic nucleic acids can be also administered directly to the organism for transduction of cells in vivo. Alternatively, naked DNA can be administered.

[0183] Administration is by any of the routes normally used for introducing a molecule into ultimate contact with blood or tissue cells, as described above. The nucleic acids from Tables 2-4 are administered in any suitable manner, preferably with the pharmaceutically acceptable carriers described above. Suitable methods of administering such nucleic acids are available and well known to those of skill in the art, and, although more than one route can be used to administer a particular composition, a particular route can often provide a more immediate and more effective reaction than another route (see Samulski at al., 1989). The present invention is not limited to any method of administering such nucleic acids, but preferentially uses the methods described herein.

[0184] The present invention further provides other methods of treating IBD (e.g. Crohn's disease) such as administering to an individual having IBD (e.g. Crohn's disease) an effective amount of an agent that regulates the expression, activity or physical state of at least one gene from Tables 2-4. An “effective amount” of an agent is an amount that modulates a level of expression or activity of a gene from Tables 2-4, in a cell in the individual at least about 10%, at least about 20%, at least about 30%, at least about 40%, at least about 50%, at least about 60%, at least about 70%, at least about 80% or more, compared to a level of the respective gene from Tables 2-4 in a cell in the individual in the absence of the compound. The preventive or therapeutic agents of the present invention may be administered, either orally or parenterally, systemically or locally. For example, intravenous injection such as drip infusion, intramuscular injection, intraperitoneal injection, subcutaneous injection, suppositories, intestinal lavage, oral enteric coated tablets, and the like can be selected, and the method of administration may be chosen, as appropriate, depending on the age and the conditions of the patient. The effective dosage is chosen from the range of 0.01 mg to 100 mg per kg of body weight per administration. Alternatively, the dosage in the range of 1 to 1000 mg, preferably 5 to 50 mg per patient may be chosen. The therapeutic efficacy of the treatment may be monitored by observing various parts of the digestive system and other body parts, or any other monitoring methods known in the art. Other ways of monitoring efficacy can be, but are not limited to monitoring prevention or improvement of diarrhea, prevention or improvement of weight loss, inhibition of bowel tissue edema, inhibition of cell infiltration, inhibition of surviving period shortening, and the like, or any other IBD (e.g. Crohn's disease) related symptom.

[0185] The present invention further provides a method of treating an individual clinically diagnosed with IBD (e.g. Crohn's disease). The methods generally comprises analyzing a biological sample that includes a cell, in some cases, a cell, from an individual clinically diagnosed with IBD (e.g. Crohn's disease) for the presence of modified levels of expression of at least 1 gene, at least 10 genes, at least 50 genes, at least 100 genes, or at least 200 genes from Tables 2-4. A treatment plan that is most effective for individuals clinically diagnosed as having a condition associated with IBD (e.g. Crohn's disease) is then selected on the basis of the detected expression of such genes in a cell. Treatment may include administering a composition that includes an agent that modulates the expression or activity of a protein from Tables 2-4 in the cell. Information obtained as described in the methods above can also be used to predict the response of the individual to a particular agent. Thus, the invention further provides a method for predicting a patient's likelihood to respond to a drug treatment for a condition associated with IBD (e.g. Crohn's disease), comprising determining whether modified levels of a gene from Tables 2-4 is present in a cell, wherein the presence of protein is predictive of the patient's likelihood to respond to a drug treatment for the condition. Examples of the prevention or improvement of symptoms accompanied by IBD (e.g. Crohn's disease) that can monitored for effectiveness include prevention or improvement of diarrhea, prevention or improvement of weight loss, inhibition of bowel tissue edema, inhibition of cell infiltration, inhibition of surviving period shortening, and the like, and as a result, or any other IBD (e.g. Crohn's disease) related symptom.

[0186] The invention also provides a method of predicting a response to therapy in a subject having IBD (e.g. Crohn's disease) by determining the presence or absence in the subject of one or more markers associated with IBD (e.g. Crohn's disease) described in Tables 5.1, 5.2, 6.2 and 6.3, diagnosing the subject in which the one or more markers are present as having IBD (e.g. Crohn's disease), and predicting a response to a therapy based on the diagnosis e.g., response to therapy may include an efficacious response and/or one or more adverse events. The invention also provides a method of optimizing therapy in a subject having IBD (e.g. Crohn's disease) by determining the presence or absence in the subject of one or more markers associated with a clinical subtype of IBD (e.g. Crohn's disease), diagnosing the subject in which the one or more markers are present as having a particular clinical subtype of IBD (e.g. Crohn's disease), and treating the subject having a particular clinical subtype of IBD (e.g. Crohn's disease) based on the diagnosis. As an example, treatment for the fibrostenotic subtype of Crohn's disease currently includes surgical removal of the affected, structured part of the bowel.

[0187] Thus, while there are a number of treatments for Crohn's disease currently available, they all are accompanied by various side effects, high costs, and long complicated treatment protocols, which are often not available and effective in a large number of individuals. Accordingly, there remains a need in the art for more effective and otherwise improved methods for treating and preventing Crohn's disease. Thus, there is a continuing need in the medical arts for genetic markers of IBD (e.g. Crohn's disease) and guidance for the use of such markers. The present invention fulfills this need and provides further related advantages.

### EXAMPLES

### Example 1

### Identification of Cases and Controls

[0188] Samples from two human populations were used for this study: Quebec Founder and German populations. The text below describes the details for the recruitment of the individuals from those two populations and used for the study's genetic analysis.

[0189] All Quebec Founder individuals were sampled from the Quebec founder population (QFP). Membership in the founder population was defined as having four grandparents with French Canadian family names who were born in the Province of Quebec, Canada or in adjacent areas of the Provinces of New Brunswick and Ontario or in New England or New York State. The Quebec population is characterized both by extended LD and by decreased genetic heterogeneity. The increased extent of LD allows the detection of disease associated genes using a reasonable marker density, while still allowing the increased meiotic resolution of population-based mapping. The specific combination of age in generations, optimal number of founders and large present population size makes the QFP optimal for LD-based gene mapping.

[0190] Patient inclusion criteria for the QFP study include diagnosis for Crohn's disease by any one of the following: a colonoscopy, a radiological examination with barium, an abdominal surgical operation or a biopsy or a surgical specimen. The colonoscopy diagnosis consists of observing linear, deep or serpentigenous ulcers, pseudopolyps, or skip areas. The barium radiological examination consists of the detection of strictures, ulcerations and string signs by observing the barium enema and the small bowel followed through an NMRI series.

[0191] Patients that were diagnosed with ulcerative colitis, infectious colitis or other intestinal diseases were excluded from the study. All human sampling was subject to ethical review procedures.

[0192] All enrolled QFP subjects (patients and controls) provided a 30 ml blood sample (3 barcoded tubes of 10 ml). Samples were processed immediately upon arrival at Genizon's laboratory. All samples were scanned and logged into a LabVantage Laboratory Information Management System (LIMS), which served as a hub between the clinical data management system and the genetic analysis system. Following centrifugation, the buffy coat containing the white blood cells was isolated from each tube. Genomic DNA was extracted from the buffy coat from one of the tubes, and stored at 4° C. until required for genotyping. DNA extraction was performed with a commercial kit using a guanidine hydrochloride based method (FlexiGene, Qiagen) according to the manufacturer's instructions. The extraction method yielded high molecular weight DNA, and the quality of every DNA sample was verified by agarose gel electrophoresis. Genomic DNA appeared on the gel as a large band of very high molecular weight. The remaining two buffy coats were stored at −80° C. as backups.

[0193] The QFP samples were collected as family trios consisting of Crohn's disease subjects and two first degree relatives. Of the 500 trios, 477 were Parent, Parent, Child (PPC) trios; the remainders were Parent, Child, Child (PCC) trios. Only the PPC trios were used for the analysis reported here because they produced equal numbers of more accurately estimated case and control haplotypes than the PCC trios. 382 trios were used in the genome wide scan. One member of each trio was affected with Crohn's disease. For the 382 trios used in the genome wide scan, these included 189 daughters, 90 sons, 54 mothers and 49 fathers. When a child was the affected member of the trio, the two non-transmitted parental chromosomes (one from each parent) were used as controls, when one of the parents was affected, that person's spouse provided the control chromosomes. The recruitment of trios allowed a more precise determination of long extended haplotypes.

[0194] The German patients (cases) were recruited at the Charité University Hospital (Berlin, Germany) and the Department of General Internal Medicine of the Christian-Albrechts-University (Kiel, Germany), with the support of the German Crohn and Colitis Foundation. Clinical, radiological and endoscopic (i.e. type and distribution of lesions) examinations were required to unequivocally confirm the diagnosis of Crohn disease, and histological findings also had to be confirmative of, or compatible with, the diagnosis. In case of uncertainty, patients were excluded from the study. The patient sample has been used in several studies before and the respective publications provide a more detailed account of the phenotyping techniques employed. German control individuals were obtained from the POPGEN biobank. All recruitment protocols were approved by ethics committees at the participating centres prior to commencement of the study and participants were obliged to give written, informed consent. The German samples were collected as cases and controls consisting of Crohn disease subjects and controls. A total of 493 cases and 493 controls were collected for this study.

### Example 2

### Genotyping

### QFP Samples Genotyping

[0195] Genotyping was performed using Perlegen's ultra-high-throughput platform. Marker loci were amplified by PCR and hybridized to wafers containing arrays of oligonucleotides. Allele discrimination was performed through allele-specific hybridization. In total, 248,535 SNPs, distributed as evenly as possible throughout the genome, were genotyped on the 382 QFP trios for a total of 372,802,500 genotypes. These markers were mostly selected from various databases including the ˜1.6 million SNP database of Perlegen Life Sciences (Patil, 2001); several thousand were obtained from the HapMap consortium database and/or dbSNP at NCBI. The SNPs were chosen to maximize uniformity of genetic coverage and to cover a distribution of allele frequencies. All SNPs that did not pass the quality controls for the assay, that is, that had a minor allele frequency of less than 1%, a Mendelian error rate within trios greater than 1%, that deviated significantly from the Hardy-Weinberg equilibrium, or that had excessive missing data (cut-off at 1% missing values or higher) were removed from the analysis. Genetic analysis was performed on a total of 165,803 SNPs (158,811 autosomal, 6851 X chromosome and 141 Y chromosome). The average gap size was approximately 17 kb. Of the 165,803 markers, ˜140,000 had a minor allele frequency (MAF) greater than 10% for the QFP.

### German Samples Genotyping

[0196] Genotyping was performed by Illumina, using Illumina's HumanHap 550 Genotyping Beadchip and standard technologies. The HumanHap-550 chip includes over 550,000 tag SNPs derived from the International HapMap project. The Illumina BeadStudio software was used to perform clustering for genotype assessment. The genotyping information was entered into a Unified Genotype Database from which it was accessed using custom-built programs for export to the genetic analysis pipeline. Analyses of these genotypes were performed with the statistical tools described in Example 3.

### Example 3

### Genetic Analysis

[0197] 1. Dataset Quality Assessment

### 1.1 Related Individuals

[0198] The application PLINK was run to identify and remove identical or closely related individuals (i.e. proportion of alleles identical-by-state given as pi-hat≧0.4581) within the dataset.

### 1.2 Stratification

[0199] Prior to performing genetic analyses, the complete set of cases and controls was assessed for population substructure. Population substructure, or stratification, refers to a difference in allele frequencies between cases and controls that is not due to true disease association but due to other factors, e.g. ethnic differences in genetic background.

[0200] The program StratFinder was used to test for stratification.

### 1.3 Cleaning

[0201] The data were then subjected to QC by performing a cleaning step Using the program DataStets, which calculates the following statistics per marker or per <individual>:
[0202] Minor allele frequency (MAF) for each marker
[0203] Number of markers with MAF <5%, <4%, <3%, <2%, <1%
[0204] Number of missing values for each marker and individual
[0205] Monomorphic markers
[0206] Departure from Hardy-Weinberg equilibrium within control individuals for each marker

[0207] The following acceptance criteria were required for further analysis:
[0208] Missing values per marker or individual <1%
[0209] Minor allele frequency per marker ≧4%,
[0210] Allele frequencies for controls in Hardy-Weinberg equilibrium (cut-off=Log₁₀(0.05/# of markers tested per chromosome)

[0211] Markers and individuals not meeting these criteria were removed from the dataset using DataPullPC.

[0212] 2. Phase Determination

[0213] Haplotypes were estimated from the case/control genotype data using ggplem, a modified version of the PL-EM algorithm. The programs geno2patctr and tagger determined case and control genotypes and prepared the data in the input format for PL-EM. An EM algorithm module consisting of several applications was used to resolve phase ambiguities. PLEMPre first recoded the genotypes for input into the PL-EM algorithm which used an 11-marker sliding block for haplotype estimation and deposited the constructed haplotypes into a file, happatctr which was the input file for haplotype association analysis performed by the program, LDSTATS.

[0214] The program GeneWriter was used to create a case-control genotype file, genopatctr, which was the input for the program, SINGLETYPE, which was used to perform single marker case-control association analysis.

[0215] 3. Haplotype Association Analysis

[0216] Haplotype association analysis was performed using the program LDSTATS. LDSTATS tests for association of haplotypes with the disease phenotype. The algorithm LDSTATS (v2.0) defines haplotypes using multi-marker windows that advance across the marker map in one-marker increments. Windows of size 1, 3, 5, 7, and 9 were analyzed. At each position the frequency of haplotypes in cases and controls was determined and a chi-square statistic was calculated from case control frequency tables. For LDSTATS v2.0, the significance of the chi-square for single marker and 3-marker windows was calculated as Pearson's chi-square with degrees of freedom. Larger windows of multi-allelic haplotype association were tested using Smith's normalization of the square root of Pearson's Chi-square. LDSTATS v4.0 calculates significance of chi-square values using a permutation test in which case-control status is randomly permuted until 350 permuted chi-square values are observed that are greater than or equal to chi-square value of the actual data. The P value is then calculated as 350/the number of permutations required.

[0217] Table 5.1 lists the results for association analysis using LDSTATs (v2.0 and v4.0) for the 371 regions described above based on the genome wide scan genotype data for 382 QFP trios. For each region that was associated with Crohn disease in the genome wide scan, we report in Table 5.2 the allele frequencies and the relative risk (RR) for the haplotypes contributing to the best signal at each SNP in the region. The best signal at a given location was determined by comparing the significance (p-value) of the association with Crohn disease for window sizes of 1, 3, 5, 7, and 9 SNPs, and selecting the most significant window. For a given window size at a given location, the association with Crohn disease was evaluated by comparing the overall distribution of haplotypes in the cases with the overall distribution of haplotypes in the controls. Haplotypes with a relative risk greater than one increase the risk of developing Crohn disease while haplotypes with a relative risk less than one are protective and decrease the risk.

[0218] Tables 6.1 and 6.2 list the results for association analysis using LDSTATs (v2.0) for the candidate regions described in Table 1 based on the genome wide scan genotype data for the German cases and controls. For each one of these regions, we report in Tables 6.3 the allele frequencies and the relative risk (RR) for the haplotypes contributing to the best signal at each SNP in the region. For clarity purposes, Table 6.1 contains genetic markers that are not part of the invention, but are necessary for understanding the invention. The invention tables are Tables 5.1, 5.2, 6.2 and 6.3.

### Example 4

### Gene Identification and Characterization

[0219] A series of gene characterization was performed for each candidate region described in Table 1. Any gene or EST mapping to the interval based on public map data or proprietary map data was considered as a candidate CROHN disease gene. The approach used to identify all genes located in the critical regions is described below.

[0220] Public Gene Mining

[0221] Once regions were identified using the analyses described above, a series of public data mining efforts were undertaken, with the aim of identifying all genes located within the critical intervals as well as their respective structural elements (i.e., promoters and other regulatory elements, UTRs, exons and splice sites). The initial analysis relied on annotation information stored in public databases (e.g. NCBI, UCSC Genome Bioinformatics, Entrez Human Genome Browser, OMIM—see below for database URL information). Table 2 lists the genes that have been mapped to the candidate regions.

[0222] For some genes the available public annotation was extensive, whereas for others very little was known about a gene's function. Customized analysis was therefore performed to characterize genes that corresponded to this latter class. Importantly, the presence of rare splice variants and artifactual ESTs was carefully evaluated. Subsequent cluster analysis of novel ESTs provided an indication of additional gene content in some cases. The resulting clusters were graphically displayed against the genomic sequence, providing indications of separate clusters that may contribute to the same gene, thereby facilitating development of confirmatory experiments in the laboratory. While much of this information was available in the public domain, the customized analysis performed revealed additional information not immediately apparent from the public genome browsers.

[0223] A unique consensus sequence was constructed for each splice variant and a trained reviewer assessed each alignment. This assessment included examination of all putative splice junctions for consensus splice donor/acceptor sequences, putative start codons, consensus Kozak sequences and upstream in-frame stops, and the location of polyadenylation signals. In addition, conserved noncoding sequences (CNSs) that could potentially be involved in regulatory functions were included as important information for each gene. The genomic reference and exon sequences were then archived for future reference. A master assembly that included all splice variants, exons and the genomic structure was used in subsequent analyses (i.e., analysis of polymorphisms). Table 3 lists gene clusters based on the publicly available EST and cDNA clustering algorithm, ECGene.

[0224] An important component of these efforts was the ability to visualize and store the results of the data mining efforts. A customized version of the highly versatile genome browser GBrowse (http://www.gmod.org/) was implemented in order to permit the visualization of several types of information against the corresponding genomic sequence. In addition, the results of the statistical analyses were plotted against the genomic interval, thereby greatly facilitating focused analysis of gene content.

[0225] Computational Analysis of Genes and GeneMaps

[0226] In order to assist in the prioritization of candidate genes for which minimal annotation existed, a series of computational analyses were performed that included basic BLAST searches and alignments to identify related genes. In some cases this provided an indication of potential function. In addition, protein domains and motifs were identified that further assisted in the understanding of potential function, as well as predicted cellular localization.

[0227] A comprehensive review of the public literature was also performed in order to facilitate identification of information regarding the potential role of candidate genes in the pathophysiology of CROHN disease. In addition to the standard review of the literature, public resources (Medline and other online databases) were also mined for information regarding the involvement of candidate genes in specific signaling pathways. A variety of pathway and yeast two hybrid databases were mined for information regarding protein-protein interactions. These included BIND, MINT, DIP, Interdom, and Reactome, among others. By identifying homologues of genes in the CROHN candidate regions and exploring whether interacting proteins had been identified already, knowledge regarding the GeneMaps for CROHN disease was advanced. The pathway information gained from the use of these resources was also integrated with the literature review efforts, as described above.

[0228] All references cited herein are hereby incorporated by references in their entireties.

The application's sequence listing, which the Patent Office published only in electronic form, follows.

SEQUENCE LISTING (14083 sequences)

SEQ ID NO: 1 - DNA, 2262 bp, Homo sapiens
acataatgaagtgtccgatgctaaggtcaaggctgggccaggaaagcgtccactgtgggcccatgttcatccaggtctcccggcccctgcccctgtggagggacaatagacagactccatggctgctgtcccttcgaggggagctggtggcttctcttgaagacgccagcctgatgggactgtatgtggacatgaatgccaccactgtcaccgtccaaagcccgagacaaggccttcttcagaggtgggaggtcagtggtgggcagcaggctctgccaggagtgtcattccagccagagtcggaggtcttagttcacatccccaagcagagactgggtctagtcaaaagaggttcctacattgaggaaaccctgagcctcagactcctccgagtccaccagtccaacatctttatggtgactgagaacaaggactttgtggtggtcagcattccggcggccggggtgctccaggtccagcgatgccaagaagtcggaggaaccccgggaacacaagctttctatagggtagacctgagcctggaatttgccgagatggctgccccggtcctctggacagtggagagcttcttccagtgtgtgggttcaggaacagagccgcctgcctcaactgctgcactgaggaccactccctccccaccatccccaggaccagagacccctccagcgggagtgccacctgctgcttcctcccaggtgtgggctgcagggccagctgcccaggaatggctttctcgggacctcctgcaccggccttccgacgcactggccaaaaaggggcttggaccattcctgcaaacagccaaaccggcgagaagaggccagacatctgcctccattctccccagagtggtgcaagctcagcgaggtccccagcctcccccaggggaagcagggatccctggacaccccacacctccagccacgctcccctcggagcctgtagagggtgtccaggctagtccctggcggccacgtccagtcttgccaacgcacccggctctgaccctgcccgtgtcctcagatgcctcctctccttcaccgccagccccgaggcctgaacgacctgaatcacttctggtctcaggaccatctgtcaccctgactgaaggtctaggaactgtgaggcctgaacaggaccccgccaagtctccaggaagtcccctcctgctgagaggcttgtcaagcggggatgtggctgcacctgagcccatcatgggggagcccggccaagccagtgaggagttccagccattggcgaggccctggcgggccacactggctgcagaggagctggtttctcaccgttctcccggagagccccaggaaacgtgctctggaacggaggtggagaggccacgccagacagggcctggtctccccagggagggggccagggggcacatggacctttcatcctcagaaccaagccaggacatagaggggccgggactctccatcctgccagcgagggatgccacattctccaccccaagtgtgaggcagccagaccccagtgcctggctgagttcaggacctgaactcaccgggatgcccagggtgaggctggcagcgcccctggcagttcttcctatggaacctctgccaccagaacctgttcgcccagcagctcttctgacacccgaagcctcatctgtgggagggccagaccaggcccgatacctggagtcagcccctggctggcctgtgggccaggaggagtggggggttgcacacacgtccagccctccatccacgcaaaccctgagcctgtgggctcccacaggagtgttgctacccagcctggtggagcttgaataccccttccaggctggccggggggcctcactccagcaggagctgacagagcccaccttggccctcagtgctgaaagccacaggcctcctgagcttcaagacagtgtggaggggctttctgagaggccctcacgctgagcctccatggagactccaggcagccggtaccccgctggcttggacggccccagtgaccctcagtgacccagctgtccccaggctccctggcttagatgcccagctgtggctgggtacagtgttctgggccggaagagcactcactcagtgcttccctggaaaggtggacccccagacgcccacctccaggcagacccatcactggaagtgggatttgaaatgcagccaagaagaggagaccgtcggcaacgcccgcccggaacaagaaataaataaataaataatc

SEQ ID NO: 2 - protein, 656 aa, Homo sapiens
MKCPMLRSRLGQESVHCGPMFIQVSRPLPLWRDNRQTPWLLSLRGELVASLEDASLMGLYVDMNATTVTVQSPRQGLLQRWEVSGGQQALPGVSFQPESEVLVHIPKQRLGLVKRGSYIEETLSLRLLRVHQSNIFMVTENKDFVVVSIPAAGVLQVQRCQEVGGTPGTQAFYRVDLSLEFAEMAAPVLWTVESFFQCVGSGTEPPASTAALRTTPSPPSPGPETPPAGVPPAASSQVWAAGPAAQEWLSRDLLHRPSDALAKKGLGPFLQTAKPARRGQTSASILPRVVQAQRGPQPPPGEAGIPGHPTPPATLPSEPVEGVQASPWRPRPVLPTHPALTLPVSSDASSPSPPAPRPERPESLLVSGPSVTLTEGLGTVRPEQDPAKSPGSPLLLRGLSSGDVAAPEPIMGEPGQASEEFQPLARPWRATLAAEELVSHRSPGEPQETCSGTEVERPRQTGPGLPREGARGHMDLSSSEPSQDIEGPGLSILPARDATFSTPSVRQPDPSAWLSSGPELTGMPRVRLAAPLAVLPMEPLPPEPVRPAALLTPEASSVGGPDQARYLESAPGWPVGQEEWGVAHTSSPPSTQTLSLWAPTGVLLPSLVELEYPFQAGRGASLQQELTEPTLALSAESHRPPELQDSVEGLSERPSR

SEQ ID NO: 3 - DNA, 595 bp, Homo sapiens
atggcctctggtgtggctatctctgatggtgtcatcaaggtgttcactgacatgacagtgggcaaatcttcgacgccagaggaggtgaagaagcgcaagaaaatggtgctgctcttctgcctgagtgagggtgagaagaacatcgccctggaggagggcgaggagaccctggtggatgacatgggctggaccgttgacaacccctacaccacctttgccaagatgctgccagacaaagactgctgctgtgtcctctgaggtgacgcaacctatgggtccaaggagagcaaggaggacctggtatttatcttctgggcccctgagtctgtaccccttaagggcaaaatgatctatgccagctctaaggatgccatcaagaagctgacagggaagctgacagggatcaagcatgaacaagcaaactgctacaagaggtcaaggaccatggcagaccgggcgagaagctgggagcggcgctgtcatctccctggagggcacgccttatttaaacaacagctccagggtggtccttgcaggttctctgagtgagctgtgtaccagtgatgtttgccctggctttggcgtttctgtttga

SEQ ID NO: 4 - DNA, 4236 bp, Homo sapiens
ggtgggcggggggaggaggcggccctagcgccattttgtgggagcgaagcggtggctgggctgcgcttgggtccgtcgctgcttcggtgtccctgtcgggcttcccagcagcggcctagcgggaaaagtaaaagatgtctgaatatattcgggtaaccgaagatgagaacgatgagcccattgaaataccatcggaagacgatgggacggtgctgctctccacggttacagcccagtttccaggggcgtgtgggcttcgctacaggaatccagtgtctcagtgtatgagaggtgtccggctggtagaaggaattctgcatgccccagatgctggctggggaaatctggtgtatgttgtcaactatccaaaagataacaaaagaaaaatggatgagacagatgcttcatcagcagtgaaagtgaaaagagcagtccagaaaacatccgatttaatagtgttgggtctcccatggaaaacaaccgaacaggacctgaaagagtattttagtacctttggagaagttcttatggtgcaggtcaagaaagatcttaagactggtcattcaaaggggtttggctttgttcgttttacggaatatgaaacacaagtgaaagtaatgtcacagcgacatatgatagatggacgatggtgtgactgcaaacttcctaattctaagcaaagccaagatgagcctttgagaagcagaaaagtgtttgtggggcgctgtacagaggacatgactgaggatgagctgcgggagttcttctctcagtacggggatgtgatggatgtcttcatccccaagccattcagggcctttgcctttgttacatttgcagatgatcagattgcgcagtctctttgtggagaggacttgatcattaaaggaatcagcgttcatatatccaatgccgaacctaagcacaatagcaatagacagttagaaagaagtggaagatttggtggtaatccaggtggctttgggaatcagggtggatttggtaatagcagagggggtggagctggtttgggaaacaatcaaggtagtaatatgggtggtgggatgaactttggtgcgttcagcattaatccagccatgatggctgccgcccaggcagcactacagagcagttggggtatgatgggcatgttagccagccagcagaaccagtcaggcccatcgggtaataaccaaaaccaaggcaacatgcagagggagccaaaccaggccttcggttctggaaataactcttatagtggctctaattctggtgcagcaattggttggggatcagcatccaatgcagggtcgggcagtggttttaatggaggctttggctcaagcatggattctaagtcttctggctggggaatgtagacagtggggttgtggttggttggtatagaatggtgggaattcaaatttttctaaactcatggtaagtatattgtaaaatacatatgtactaagaattttcaaaattggtttgttcagtgtggagtatattcagcagtatttttgacatttttctttagaaaaaggaagagctaaaggaattttataagttttgttacatgaaaggttgaaatattgagtggttgaaagtgaactgctgtttgcctgattggtaaaccaacacactacaattgatatcaaaaggtttctcctgtaatattttatccctggacttgtcaagtgaattctttgcatgttcaaaacggaaaccattgattagaactacattctttaccccttgttttaatttgaaccccaccatatggatttttttccttaagaaaatctccttttaggagatcatggtgtcacagtgtttggttcttttgttttgttttttaacacttgtctcccctcatacacaaaagtacaatatgaagccttcatttaatctctgcagttcatctcatttcaaatgtttatggaagaagcacttcattgaaagtagtgctgtaaatattctgccataggaatactgtctacatgctttctcattcaagaattcgtcatcacgcatcacaggccgcgtctttgacggtgggtgtcccatttttatccgctactctttatttcatggagtcgtatcaacgctatgaacgcaaggctgtgatatggaaccagaaggctgtctgaacttttgaaaccttgtgtgggattgatggtggtgccgaggcatgaaaggctagtatgagcgagaaaaggagagagcgcgtgcagagacttggtggtgcataatggatattttttaacttggcgagatgtgtctctcaatcctgtggctttggtgagagagtgtgcagagagcaatgatagcaaataatgtacgaatgttttttgcattcaaaggacatccacatctgttggaagacttttaagtgagtttttgttcttagataacccacattagatgaatgtgttaagtgaaatgatacttgtactccccctacccctttgtcaactgctgtgaatgctgtatggtgtgtgttctcttctgttactgatatgtaagtgtggcaatgtgaactgaagctgatgggctgagaacatggactgagcttgtggtgtgctttgcaggaggacttgaagcagagttcaccagtgagctcaggtgtctcaaagaagggtggaagttctaatgtctgttagctacccataagaatgctgtttgctgcagttctgtgtcctgtgcttggatgctttttataagagttgtcattgttggaaattcttaaataaaactgatttaaataatatgtgtctttgttttgcagccctgaatgcaaagaattcatagcagttaattccccttttttgacccttttgagatggaactttcataaagtttcttggcagtagtttattttgcttcaaataaacttatttgaaaagttgtctcaagtcaaatggattcatcacctgtcatgcattgacacctgatacccagacttaattggtatttgttcttgcattggccaaagtgaaaatttttttttttcttttgaaatctagttttgaataagtctgggtgaccgcacctaaaatggtaagcagtaccctccggctttttcttagtgcctctgtgcatttgggtgatgttctatttacatggcctgtgtaaatctccattgggaagtcatgccttctaaaaagattcttatttgggggagtgggcaaaatgttgattattttctaatgctttgtagcaaagcatatcaattgaaaagggaatatcagcaccttcctagtttgggatttgaaaagtggaattaattgcagtagggataaagtagaagaaaccacaaattatcttgtgcctgaaatccattaagaggcctgatagctttaagaattagggtgggttgtctgtctggaagtgttaagtggaatgggctttgtcctccaggaggtgggggaatgtggtaacattgaatacagttgaataaaatcgcttacaaaactcacactctcacaatgcattgttaagtatgtaaaagcaataacattgattctctgttgtacttttttgtaactaattctgtgagagttgagctcattttctagttggaagaatgtgatatttgttgtgttggtagtttacctaatgcccttacctaattagattatgataaataggtttgtcattttgcaagttacataaacatttatcaatgaagtcatcctttagacttgtaatcgccacattgtttcattattcagtttcctctgtaaagggatcttgagttgttttaattttttttttctgcatctgaatctgcatgatttccaaaccctgtaccatctgaattttgcattttagcacttgcactattactcagcagcagtaacatggtaacacttaaaatggtactcggggacctccaaagactaaactgacaagccttcaaggagcccaggggtaagttaacttgtcaacggcatggtttaatcccttctttacacttgtgtaaatttcagttactggtcatagaaggctttcaatgttgagtggccttttattaacatgtttatggtactgcatagatacgggtatttattttaccctaagaagattttgaagtttaaaagtacttaaactatttggcaaagatttgtttttaaaaatctatttggtcaatctaaatgcattcattctaaaaaattttttgaaccagataaataaaatttttttttgacaccacaaaaaaaaaaaaaaaaaaaa

SEQ ID NO: 5 - protein, 414 aa, Homo sapiens
MSEYIRVTEDENDEPIEIPSEDDGTVLLSTVTAQFPGACGLRYRNPVSQCMRGVRLVEGILHAPDAGWGNLVYVVNYPKDNKRKMDETDASSAVKVKRAVQKTSDLIVLGLPWKTTEQDLKEYFSTFGEVLMVQVKKDLKTGHSKGFGFVRFTEYETQVKVMSQRHMIDGRWCDCKLPNSKQSQDEPLRSRKVFVGRCTEDMTEDELREFFSQYGDVMDVFIPKPFRAFAFVTFADDQIAQSLCGEDLIIKGISVHISNAEPKHNSNRQLERSGRFGGNPGGFGNQGGFGNSRGGGAGLGNNQGSNMGGGMNFGAFSINPAMMAAAQAALQSSWGMMGMLASQQNQSGPSGNNQNQGNMQREPNQAFGSGNNSYSGSNSGAAIGWGSASNAGSGSGFNGGFGSSMDSKSSGWGM

SEQ ID NO: 6 - DNA, 2460 bp, Homo sapiens
ggccagctggacgggcacaccatgaggctgctgaccctcctgggccttctgtgtggctcggtggccacccccttgggcccgaagtggcctgaacctgtgttcgggcgcctggcatcccccggctttccaggggagtatgccaatgaccaggagcggcgctggaccctgactgcaccccccggctaccgcctgcgcctctacttcacccacttcgacctggagctctcccacctctgcgagtacgacttcgtcaagctgagctcgggggccaaggtgctggccacgctgtgcgggcaggagagcacagacacggagcgggcccctggcaaggacactttctactcgctgggctccagcctggacattaccttccgctccgactactccaacgagaagccgttcacggggttcgaggccttctatgcagccgaggacattgacgagtgccaggtggccccgggagaggcgcccacctgcgaccaccactgccacaaccacctgggcggtttctactgctcctgccgcgcaggctacgtcctgcaccgtaacaagcgcacctgctcagccctgtgctccggccaggtcttcacccagaggtctggggagctcagcagccctgaatacccacggccgtatcccaaactctccagttgcacttacagcatcagcctggaggaggggttcagtgtcattctggactttgtggagtccttcgatgtggagacacaccctgaaaccctgtgtccctacgactttctcaagattcaaacagacagagaagaacatggcccattctgtgggaagacattgccccacaggattgaaacaaaaagcaacacggtgaccatcacctttgtcacagatgaatcaggagaccacacaggctggaagatccactacacgagcacagcgcagccttgcccttatccgatggcgccacctaatggccacgtttcacctgtgcaagccaaatacatcctgaaagacagcttctccatcttttgcgagactggctatgagcttctgcaaggtcacttgcccctgaaatcctttactgcagtttgtcagaaagatggatcttgggaccggccaatgcccgcgtgcagcattgttgactgtggccctcctgatgatctacccagtggccgagtggagtacatcacaggtcctggagtgaccacctacaaagctgtgattcagtacagctgtgaagagaccttctacacaatgaaagtgaatgatggtaaatatgtgtgtgaggctgatggattctggacgagctccaaaggagaaaaatcactcccagtctgtgagcctgtttgtggactatcagcccgcacaacaggagggcgtatatatggagggcaaaaggcaaaacctggtgattttccttggcaagtcctgatattaggtggaaccacagcagcaggtgcacttttatatgacaactgggtcctaacagctgctcatgccgtctatgagcaaaaacatgatgcatccgccctggacattcgaatgggcaccctgaaaagactatcacctcattatacacaagcctggtctgaagctgtttttatacatgaaggttatactcatgatgctggctttgacaatgacatagcactgattaaattgaataacaaagttgtaatcaatagcaacatcacgcctatttgtctgccaagaaaagaagctgaatcctttatgaggacagatgacattggaactgcatctggatggggattaacccaaaggggttttcttgctagaaatctaatgtatgtcgacataccgattgttgaccatcaaaaatgtactgctgcatatgaaaagccaccctatccaaggggaagtgtaactgctaacatgctttgtgctggcttagaaagtgggggcaaggacagctgcagaggtgacagcggaggggcactggtgtttctagatagtgaaacagagaggtggtttgtgggaggaatagtgtcctggggttccatgaattgtggggaagcaggtcagtatggagtctacacaaaagttattaactatattccctggatcgagaacataattagtgatttttaacttgcgtgtctgcagtcaaggattcttcatttttagaaatgcctgtgaagaccttggcagcgacgtggctcgagaagcattcatcattactgtggacatggcagttgttgctccacccaaaaaaacagactccaggtgaggctgctgtcatttctccacttgccagtttaattccagccttacccattgactcaaggggacataaaccacgagagtgacagtcatctttgcccacccagtgtaatgtcactgctcaaattacatttcattaccttaaaaagccagtctcttttcatactggctgttggcatttctgtaaactgcctgtccatgctctttgtttttaaacttgttcttattgaaaaaaaaaaaaaaaaa

SEQ ID NO: 7 - protein, 686 aa, Homo sapiens
MRLLTLLGLLCGSVATPLGPKWPEPVFGRLASPGFPGEYANDQERRWTLTAPPGYRLRLYFTHFDLELSHLCEYDFVKLSSGAKVLATLCGQESTDTERAPGKDTFYSLGSSLDITFRSDYSNEKPFTGFEAFYAAEDIDECQVAPGEAPTCDHHCHNHLGGFYCSCRAGYVLHRNKRTCSALCSGQVFTQRSGELSSPEYPRPYPKLSSCTYSISLEEGFSVILDFVESFDVETHPETLCPYDFLKIQTDREEHGPFCGKTLPHRIETKSNTVTITFVTDESGDHTGWKIHYTSTAQPCPYPMAPPNGHVSPVQAKYILKDSFSIFCETGYELLQGHLPLKSFTAVCQKDGSWDRPMPACSIVDCGPPDDLPSGRVEYITGPGVTTYKAVIQYSCEETFYTMKVNDGKYVCEADGFWTSSKGEKSLPVCEPVCGLSARTTGGRIYGGQKAKPGDFPWQVLILGGTTAAGALLYDNWVLTAAHAVYEQKHDASALDIRMGTLKRLSPHYTQAWSEAVFIHEGYTHDAGFDNDIALIKLNNKVVINSNITPICLPRKEAESFMRTDDIGTASGWGLTQRGFLARNLMYVDIPIVDHQKCTAAYEKPPYPRGSVTANMLCAGLESGGKDSCRGDSGGALVFLDSETERWFVGGIVSWGSMNCGEAGQYGVYTKVINYIPWIENIISDF

SEQ ID NO: 8 - DNA, 738 bp, Homo sapiens
ggccagctggacgggcacaccatgaggctgctgaccctcctgggccttctgtgtggctcggtggccacccccttgggcccgaagtggcctgaacctgtgttcgggcgcctggcatcccccggctttccaggggagtatgccaatgaccaggagcggcgctggaccctgactgcaccccccggctaccgcctgcgcctctacttcacccacttcgacctggagctctcccacctctgcgagtacgacttcgtcaagctgagctcgggggccaaggtgctggccacgctgtgcgggcaggagagcacagacacggagcgggcccctggcaaggacactttctactcgctgggctccagcctggacattaccttccgctccgactactccaacgagaagccgttcacggggttcgaggccttctatgcagccgaggacattgacgagtgccaggtggccccgggagaggcgcccacctgcgaccaccactgccacaaccacctgggcggtttctactgctcctgccgcgcaggctacgtcctgcaccgtaacaagcgcacctgctcagagcagagcctctagcctcccctggagctccggcctgcccagcaggtcagaagccagagccagcctgctggcctcagctccgggttgggctgagatggctgtgccccaactcccattcacccaccatggacccaataataaacctggccccaccccaaaaaaaaaaaaaaaaaa

SEQ ID NO: 9 - protein, 185 aa, Homo sapiens
MRLLTLLGLLCGSVATPLGPKWPEPVFGRLASPGFPGEYANDQERRWTLTAPPGYRLRLYFTHFDLELSHLCEYDFVKLSSGAKVLATLCGQESTDTERAPGKDTFYSLGSSLDITFRSDYSNEKPFTGFEAFYAAEDIDECQVAPGEAPTCDHHCHNHLGGFYCSCRAGYVLHRNKRTCSEQSL

SEQ ID NO: 10 - DNA, 1273 bp, Homo sapiens
gcgggcggcgggcggagctggtcccgttgtgctgcggcgccgcgcggcctgcagtcccgggcccgcgccccgcgccgcccgcccgcccgccatggagcccggccccgacggccccgccgcctccggccccgccgccatccgcgagggctggttccgcgagacctgcagcctgtggcccggccaggccctgtcactgcaggtggagcagctgctccaccaccggcgctcgcgctaccaggacatcctcgtcttccgcagtaagacctatggcaacgtgctggtgttggacggtgtcatccagtgcacggagagagacgagttctcctaccaggagatgatcgccaacctgcctctctgcagccaccccaacccgcgaaaggtgctgatcatcgggggcggagatggaggtgtcctgcgggaggtggtgaagcacccctccgtggagtccgtggtccagtgtgagatcgacgaggatgtcatccaagtctccaagaagttcctgccaggcatggccattggctactctagctcgaagctgaccctacatgtgggtgacggttttgagttcatgaaacagaatcaggatgccttcgacgtgatcatcactgactcctcagaccccatgggccccgccgaaagtctcttcaaggagtcctattaccagctcatgaagacagccctcaaggaagatggtgtcctctgctgccagggcgagtgccagtggctgcacctggacctcatcaaggagatgcggcagttctgccagtccctgttccccgtggtggcctatgcctactgcaccatccccacctaccccagcggccagatcggcttcatgctgtgcagcaagaacccgagcacgaacttccaggagccggtgcagccgctgacacagcagcaggtggcgcagatgcagctgaagtactacaactccgacgtgcaccgcgccgcctttgtgctgcccgagtttgcccgcaaggccctgaatgatgtgagctgagcccaggcgccaccactgatgccacccaggacctcggaccttggagcctgcggggtgcctcggcccctccagccccgggccggacctcctgctggctctcgcccaccaaccaagtgttacaagccccagaatgctgcccggcctgccctgctgggcggactgtctgtgtgtctgtctctctggcgttccacctccaagcctataccagctgtgtacagcgccatctctctgccttctgttgcccctcactcaccaaacacgtgtatttatagc

SEQ ID NO: 11 - protein, 302 aa, Homo sapiens
MEPGPDGPAASGPAAIREGWFRETCSLWPGQALSLQVEQLLHHRRSRYQDILVFRSKTYGNVLVLDGVIQCTERDEFSYQEMIANLPLCSHPNPRKVLIIGGGDGGVLREVVKHPSVESVVQCEIDEDVIQVSKKFLPGMAIGYSSSKLTLHVGDGFEFMKQNQDAFDVIITDSSDPMGPAESLFKESYYQLMKTALKEDGVLCCQGECQWLHLDLIKEMRQFCQSLFPVVAYAYCTIPTYPSGQIGFMLCSKNPSTNFQEPVQPLTQQQVAQMQLKYYNSDVHRAAFVLPEFARKALNDVS

SEQ ID NO: 12 - DNA, 1077 bp, Homo sapiens
atccaagatagatcaactctccctaaaggctgacagtgaactcttggggccgttttattctctgaggttagcaaggagtcatctactagccattcaggaggccagctgggaagacaaaataggcaccccaaactcagcaacttcataacaccttcctctccccgcctgaagccttaaactgcatcaagtcaaagaaacctggggcaaatccttaacatgtttttgactgcagtaaatccacagccactctctactccgagctggcagattgagaccaagtattcaacgaaagtgctcactggaaattggatggaagagaggagaaagttcaccagagacactgacaagacaccccaatccatttacagaaaagaatacatccccttcccagaccacagaccagaccagatctccaggtggtatgggaagaggaaagttgaggggctaccttacaaacacctgatcacccaccaccaggagcccccacatcgctacctgatcagcacctatgacgaccattacaaccggcatggttacaacccggggctgcctccactccgcacttggaatggacagaagttgctgtggctgccagagaagtctgactttccccttcttgctccccctacaaactatggactctatgagcagctcaagcagagacagctcacacccaaggctggcctgaagcagagcacttatacttcatcctaccccagaccaccgttgtgcgctatgtcctggagggagcatgcggtcccggtccctccccatcgcctgcatcctctcccacacttctgagagctgccaccccaggagcagctcagatagaatcagctggagaccacagcatcactggacttgccagacaacaagtggcgcagataaactcagagtacgagatctggcccgtcaaaggtgctctcagaatcatcatctgcatttggcggtacctgtcccccctcaaaacccacaggttcctttcttttccatccaacaattaaagatctttgacactaaaaaaaaaaaaaaaaaaaaaaaaaaaaaaaaaaaaaaaaaaaaaaaaaaaaaaaaaaa

SEQ ID NO: 13 - protein, 194 aa, Homo sapiens
MFLTAVNPQPLSTPSWQIETKYSTKVLTGNWMEERRKFTRDTDKTPQSIYRKEYIPFPDHRPDQISRWYGKRKVEGLPYKHLITHHQEPPHRYLISTYDDHYNRHGYNPGLPPLRTWNGQKLLWLPEKSDFPLLAPPTNYGLYEQLKQRQLTPKAGLKQSTYTSSYPRPPLCAMSWREHAVPVPPHRLHPLPHF

SEQ ID NO: 14 - DNA, 1606 bp, Homo sapiens
acccacagcactcattcctgaagctactggttggttccctgagaggtcccagaactctgcgaagtgagtccagcgctgagattttccttgcagatctatcaggatgagcatccaggccccacccagactactggagctggcagggcagagcctgctgagagaccaggccttgtccatctctgccatggaggagctgcccagggtgctctatctcccactcttcatggaggccttcagcaggagacacttccagactctgacggtgatggttcaggcctggcccttcacctgcctccctctgggatcactgatgaagacgcttcatttggagaccttaaaagcattgctggaagggcttcatatgctgcttacacagaaggatcgccccaggaggtggaaacttcaagtgctggatttgcgggatgttgacgagaatttctgggccagatggcctggagcctgggccctgtcctgcttcccagagaccacgagtaagaggcagacagcagaggactgtccaaggatgggagagcaccagcccttaaaggtgttcatagacatctgcctcaaggaaataccccaggatgaatgcctgagatacctcttccagtgggtttaccaaaggagaggtttagtacacctgtgctgtagtaagctggtcaattatctaacgccgattaaatatctcagaaagtcattgaaaataatatacctgaatagtattcaagagctggaaattcgcaacatgtcctggccacgtctgataagaaagcttcgttgttacctgaaggagatgaagaatcttcgcaaactcgttttctccaggtgccatcattacacgtcagataatgaactccaaggacggttagttgccaaattcagctctgtgttcctcaggctggaacaccttcagttgcttaaaataaaattgatcaccttcttcagtgggcacctggaacagctgatcaggtgcctccagaaccccttggagaacttggaattaacttatggctacctattggaagaagacatgaagtgtctctcccagtacccaagcctcggttacctaaagcatctgaatctcagctacgtgctgctgttccgcatcagtcttgaacccctcggagctctgctggagaaaattgctgcctctctcaaaaccctcatcttggagggctgtcagatccactactcccaactcagtgccatcctgcctgccctgagccggtgctcccagctcaccaccttctactttggcagaaattgcatgtctattgacgccctgaaggacctgctgcgccacaccagtgggctgagcaagttaagcctggagacgtatcctgcccctgaggagagtttgaattccttggttcgtgtcaattgggagatcttcaccccacttcgggctgagctgatgtgtacactgagggaagtcaggcagcccaagaggatcttcattggccccaccccctgcccttcctgtggctcatcaccgtctgaggaactggagctccatctttgctgctagggaaggcgtgcccagtggggtagagaaatccaaagttctcttccaggcacttggacactaaaatctactatgtgggtg

SEQ ID NO: 15 - protein, 474 aa, Homo sapiens
MSIQAPPRLLELAGQSLLRDQALSISAMEELPRVLYLPLFMEAFSRRHFQTLTVMVQAWPFTCLPLGSLMKTLHLETLKALLEGLHMLLTQKDRPRRWKLQVLDLRDVDENFWARWPGAWALSCFPETTSKRQTAEDCPRMGEHQPLKVFIDICLKEIPQDECLRYLFQWVYQRRGLVHLCCSKLVNYLTPIKYLRKSLKIIYLNSIQELEIRNMSWPRLIRKLRCYLKEMKNLRKLVFSRCHHYTSDNELQGRLVAKFSSVFLRLEHLQLLKIKLITFFSGHLEQLIRCLQNPLENLELTYGYLLEEDMKCLSQYPSLGYLKHLNLSYVLLFRISLEPLGALLEKIAASLKTLILEGCQIHYSQLSAILPALSRCSQLTTFYFGRNCMSIDALKDLLRHTSGLSKLSLETYPAPEESLNSLVRVNWEIFTPLRAELMCTLREVRQPKRIFIGPTPCPSCGSSPSEELELHLCC

SEQ ID NO: 16 - DNA, 1873 bp, Homo sapiens
atgcaggagagacccaaagtcttcaagcctggagttcctgcttggttcttcctgaggtctgagcaccttctagactacatccagatctgttttccctgcagattcatgaagatgagcatccggattccacccagactcctggagcttgcgggcggagcctgctgagggaccaagccttggccgtctccaccctggaggagctgcccacggaacttttccccccactgttcatggaggccttcagcaggagacgctgtgaggccctgaagctgatggtgcaggcctggcccttccgccgcctccctctgaggcctctgataaagatgccttgtctggaggccttccaagctgtgctcgatgggcttgatgcactgcttacccaaggggttcgtcccaggagatggaaacttcaagtgctggatttacaggatgtctgtgagaacttctggatggtttggtctgaagctatggcccatgggtgcttcctcaatgccaagaggaacaaaacaccagtgcaggactgtccaaggatgagagaacggcagcccttgactgtgtttgtagaactttggctcaagaacaggactctggatgaatacctcacctgcctccttctatgggtcaagcagaggagagatttactacacctgtgctgtaagaagctgaaaattttgggaatgcccttccgcaatatcagaagcatcctgaaaatggtgaacctagactgtatccaggaggtggaagtgaattgcaagtggatactgcccatcctgacacagtttaccccatacctgggccacttgaggaatcttcagaagctcgttctctcccacatggatgtctctcgctacgtttccccagagcagaagaaggagattgttacccagttcaccactcagttcctcaagctgcgctgcctccaaaagctttatatgaactctgtttctttcctcgaaggccacctggaccagctgctcagctgtctgaagacctcgttaaaggtcctcacaataactaactgtgtgcttttggaatcagacttgaagcatctctcccagtgcccgagtatcagtcaactaaagaccctggacctgagtggcatcagactgaccaattacagtcttgtgcctctccaaattctcctagaaaaagttgcagccacccttgagtacctggatttagatgactgtggcatcatagactcccaagtcaacgccatcctgcctgccctgagccgctgctttgagctcaacaccttcagcttctgtggaaatcccatctgcatggccaccctggagaacctgctgagccacacaatcatactcaaaaacttatgcctggagctgtatcctgccccgcaggaaagttatggtgctgatggtactctctgctggagcagatttgctcaaattagggctgagctgatgaagaaagtgaggcacttaaggcaccccaagaggatcttgttctgtactgacaactgccctgaccatggcgacaggtcattttatgacctggaggcagatcaatactgctgttgaatgcctgcctatttggatgggtatgtcaaacgctttcttctggacacttggaaactaaaacctaggtcttaggtacatcctaaagggagcacagaacccatcgtttcacacatgggctctgaaagtgggaaaggaaagctgatcaagcaggggcaggacttgggggaaatgttgccatggattcgatgggactttgggaacctgtatcctgtagagtcgaaaatgggaatctgaatgtctagagtggaattcaggcttgagaatacatgagggagttactcttgcatggatggttgtaaagaaacaatcagaaataaaggaaaactgagcag

SEQ ID NO: 17 - DNA, 1108 bp, Homo sapiens
ctgagctacaactacaaccagaggtctaaactacaaccagatctgaattcttgttgggagccattttgtgaagagacgaagactgagctggtttggctgcatttctggcctcgagccgcagtcagtttctccccgtagaacccggcagtaggagacttagaatcgaatctcttctccctcccgcctcctgtttttggctttttgagaaaccttatcatccaacacaatggccagcaacgttaccaacaagatggatcctcactccatgaactcccgtgtgttcattgggaatctcaacactcttgttgtcaagaaatcggatgtggaggcgatcttttccaagtatggcaaaattgcgggctgctctgttcataagggctttgccttcgttcaatatgataaggagaaaaatgcccgggctgctgtagcaggagaggatggcagaatgattgctagccaggttgtagatattaacctggctgcagagccaaaagtgaaccgaggaaacgcaggtgtgaaacgatcagcagcggagatgtacggctcctcttttgacttggactatggctttcaacgggattattatgatggaatgtacagtttcccagcacgtgtacctcctcctcctcccattgctctggctgtagtgccctcgaaacgtcaacgtctatcaggaaacacctcacgaaggggcaaaagtggcttcaattctaagagtggaaagcggggatcttccaagtctggaaagttgaaaggtgatgaccttcaggccattaagcaggagttgacccagataaaacagaaagtggattctctcctggaaaacctggaaaaaattgaaaaggaacagagcaaacaagaggtagaggtgaaaaatgctaagtcagaagaggagcagagcagtagctccatgaagaaagatgagactcatgtgaagatggagtctgaggggggtgcagaagactctgctgaggagggggacccactggatgatgatgttaatgaagatcagggggatgaccagctggagttgatcaaggatgatgaaaaagaggctgaggaaggagaggatgacagagacagcaccaatggccaggatgactcttaa

SEQ ID NO: 18 - protein, 293 aa, Homo sapiens
MASNVTNKMDPHSMNSRVFIGNLNTLVVKKSDVEAIFSKYGKIAGCSVHKGFAFVQYDKEKNARAAVAGEDGRMIASQVVDINLAAEPKVNRGNAGVKRSAAEMYGSSFDLDYGFQRDYYDGMYSFPARVPPPPPIALAVVPSKRQRLSGNTSRRGKSGFNSKSGKRGSSKSGKLKGDDLQAIKQELTQIKQKVDSLLENLEKIEKEQSKQEVEVKNAKSEEEQSSSSMKKDETHVKMESEGGAEDSAEEGDPLDDDVNEDQGDDQLELIKDDEKEAEEGEDDRDSTNGQDDS

SEQ ID NO: 19 - DNA, 1642 bp, Homo sapiens
cctgaagctactggttggttccctgagaggtcccagaactctgcaaagtgagtccagcgctgagatttttcttgcagatccatcaggatgagcatccaggccccaccgagactactggagctggcggggcagagcctgctgagagaccaggccttgtccatctctgccatggaggagctgcccagggtgctctatctcccactcttcagggaggccttcagcaggagacacttccagactctgacggtgatggtgcaggcctggcctttcacctgcctccctctggtatcgctgatgaagacgcttcatctggagccattgaaagcattgctggaagggcttcatatgctgcttacacagaaggatcgccccaggaggtggaaacttcaagtgctggatttgcgggatgttgatgagaatttctgggccagatggcctggagcctgggccctgtcctgcttcccagaggccatgagtaagaggcagacagcagaggactgtccaaggacgggagagcaccagcccttaaaggtgttcatagacatctgcctcaaggaaataccccaggatgaatgcctgagatacctcttccagtgggtttaccaaaggagaggtttagtacacctgtgctgtagtaagctggtcaattatctaacgccaattaaatatctcagaaagtcattgaaaataatatacattaatagtattggggagctggaaattcacaacacgtgctggccacatctgataagaaagctttattgttacctgaaggagatgaagactctttgcaaactcgttttctccaggtgccatcattacacgtcagataatgaactcgagggatggttagtcaccagattcacctctgtgttcctcaggctggaacacctccagttgcttaaaataaaattgatcaccttcttcagtgggcacctggaacagctgatcaggtgcctccagaaccccttggagaacttggaattaacttgtggcaacctattagaagaggacttgaagtgtctctcccagttcccaagcctcggttacctaaagcatctgaatctcagctacgtgctgctgttccgcatcagtcttgaacccctaggagctctgctagagaaaattgctgcctctctcgagaccctcgtgttagagggctgtcagatccactactcccaactcagtgccatcctgcctggcctgagctgctgctcccagctcaccaccttctactttggcagcaattgcatgtctattgacgccctgaaggacctgctgcgccacaccagtgggctgagcaagttaagcctggagacgtatcctgcccctgaggagagtttgaattccttggttcgtgtcaattgggagatcttcaccccacttcgggctgagctgatgtgtacactgagggaattcaggcagcccaagaggatcttcattggccccaccccctgcccttcctgtggctcatcaccgtctgaggaactggagctccatctttgctgctagggaaggcgtgcccagtggggtagagaaatccaaagttctcttccaggcacttggacactaaaatctactatgtaggtgcaaactatttttctcttttcttatttatttcattttttaataattccaaaat

SEQ ID NO: 20 - protein, 474 aa, Homo sapiens
MSIQAPPRLLELAGQSLLRDQALSISAMEELPRVLYLPLFREAFSRRHFQTLTVMVQAWPFTCLPLVSLMKTLHLEPLKALLEGLHMLLTQKDRPRRWKLQVLDLRDVDENFWARWPGAWALSCFPEAMSKRQTAEDCPRTGEHQPLKVFIDICLKEIPQDECLRYLFQWVYQRRGLVHLCCSKLVNYLTPIKYLRKSLKIIYINSIGELEIHNTCWPHLIRKLYCYLKEMKTLCKLVFSRCHHYTSDNELEGWLVTRFTSVFLRLEHLQLLKIKLITFFSGHLEQLIRCLQNPLENLELTCGNLLEEDLKCLSQFPSLGYLKHLNLSYVLLFRISLEPLGALLEKIAASLETLVLEGCQIHYSQLSAILPGLSCCSQLTTFYFGSNCMSIDALKDLLRHTSGLSKLSLETYPAPEESLNSLVRVNWEIFTPLRAELMCTLREFRQPKRIFIGPTPCPSCGSSPSEELELHLCC

SEQ ID NO: 21 - DNA, 1828 bp, Homo sapiens
ttcctgcttggttcttcctgagatctgagcaccttctagactacatccagatctgttttccctgcagattcatgaagatgagcatctggactccacccagactcctggagcttgcagggcggagcctgctaagggaccaagctttggccatgtccaccctggaggagctgcccacagaacttttccccccactgttcatggaggccttcagcaggagacgctgtgaggccctgaagctgatggtgcagtcctggcccttccgccgcctccctctgaggcctctgataaagatgccttgtctggaggccttccaagctgtgctcgatgggctggatgcactgcttaacctaggggttcgtcccaggaggtggaaacttcaagtgctggatttacaggatgtctgtgagaacttctggatggtttggtctgaagctatggcccatgggtgcttcctcaatgccaagaggaacaaaaaaccagtggaggactgtccaaggatgagaggacggcagcccttgactgtgttcgtagaactttggctcaagaacaggactctggatgaatacctcacctgcctccttctatgggtcaagcagaggaaagatttactacacctgtgctgtaagaagctgaaaattttgggaatgcccttccgcaatatcagaagcatcctgaaaatggtgaacctagactgtatccaggaggtggaagtgaattgcaagtgggtactgcccatcctgacacagtttaccccatacctgggccacatgaggaatcttcagaaactcattctctcccacatggatgtctctcgctacgtttccccagagcagaagaaggagattgttacccagttcaccactcagttcctcaagctgcgctgcctccaaaagctttatatgaactctgtttctttcctcgaaggccacctggaccagctgctcagctgtctgaagacctcgttaaagttcctcacaataactaactgtgtgcttttggaatcagacttgaagcatctatcccagtgcccgagtatcagtcaactaaagaccctggacctgagtggcatcagactgaccaattacagtcttgtgcctctccaaattctcctagaaaaagttgcagccacccttgagtacctggatttagatgactgtggcatcatagactcccaagtcaacgccatcttgcctgccctgagccgctgctttgagctcaacaccttcagcttctgtggaaatcccatctgcatggccaccctggagaacctgctgagccacacaatcatactcaaaaacttatgcgtggagctgtatcctgccccccgggagagttatggtgctgatggtactctctgctggagcagatttgctcaaattagggctgagctgatgaacagagtgagggacttaaggcaccccaagaggatcttgttctgtactgactactgccctgactgtggcaacaggtcattttatgacctggaggcagatcaatactgctgttgaatgcctgcctatttggatgggtatgtcaaacgctttcttctggacacttggaaactaaaacctaggtcttaggtacatcctaaagggagcacagaacccatcatttcacacataggctctgaaagtgggaaaggaaagctgatcaagcaggggccggacttgggggaaatgttgccatggattcgatgggactttggggacctgtgtcctgtagagtcgaaaatgggaatctgaatgtctagagtggaattcaggcttgagaatacatgagggagttactcttgcatggatggttgtaaagaaacaatcagaaataaagg

SEQ ID NO: 22 - protein, 478 aa, Homo sapiens
MKMSIWTPPRLLELAGRSLLRDQALAMSTLEELPTELFPPLFMEAFSRRRCEALKLMVQSWPFRRLPLRPLIKMPCLEAFQAVLDGLDALLNLGVRPRRWKLQVLDLQDVCENFWMVWSEAMAHGCFLNAKRNKKPVEDCPRMRGRQPLTVFVELWLKNRTLDEYLTCLLLWVKQRKDLLHLCCKKLKILGMPFRNIRSILKMVNLDCIQEVEVNCKWVLPILTQFTPYLGHMRNLQKLILSHMDVSRYVSPEQKKEIVTQFTTQFLKLRCLQKLYMNSVSFLEGHLDQLLSCLKTSLKFLTITNCVLLESDLKHLSQCPSISQLKTLDLSGIRLTNYSLVPLQILLEKVAATLEYLDLDDCGIIDSQVNAILPALSRCFELNTFSFCGNPICMATLENLLSHTIILKNLCVELYPAPRESYGADGTLCWSRFAQIRAELMNRVRDLRHPKRILFCTDYCPDCGNRSFYDLEADQYCC

SEQ ID NO: 23 - DNA, 1518 bp, Homo sapiens
ttcgcccttcctgaggtctgagcaccctccaaactgagtccagatctgagtttttcctcggagatttgtcagaatgagcctccaggccccatccagactgctggagctggcagggcagagcctgctgaggaaccagttcttgaccatcttcaccctggatgagctgcccagggaggtcttccctctgatgttcatggaggccttcagcatgagacgttttgaggccctgaagctgatggtgcaggcctggcccttcctcagcctccctctgggatccctgatgaagacacttcatctggagaccttgcaagctgtcctgaggggacttgatacactggtggcccagaaggttcgccccaggaggtggaaacttcaagtgctggatttgcgggatgttgatgagaatttctggaccatatggtctggagccagggtcctctcctgctccccagaggccatgagtaagaggcagacagtggaggactgtccaaggatgggagagcaccagcccttgaaggtgttcatagacctctgcctaaaggaaagtacactggatgaatgcctgagctacctttttgggtggatccactacagaagaggcctagtgcacctgtgttgtagtaaggtgcagaattactcaatgcccacttcaagtttcagaaatctattggaaaggatatacccagacagtatccaggagttggaagtctggaaaaagtgctctctcaataaaacgggaaagtttgccccttacctgagccagatgagcaatcttcgtgaactctttttagccttcggttatgagcgtgagttgtacgtgagcgtccagtggccgtgcattcctgacttggactctccattcctctgcctgtactacccccagatgctttatataaaaaagatcagtaatatcaaagagcacctggagcacctgctcaggtacctcaagaaccccttgggggcctttatattcagtgatgcttacctagctgatcgggacatggagtgtctgtctcagtacccaagcctcagtcagctaaaggagctgcgtctgattcatatcctaatgtggaccacccatcttgagccccttggagttctgctggagaaagttgctgctactctcaagaccctcgtcttaaaggactgtcggatccaggacccccaactcagggtcctcctgcctgccctgagccactgttcccagctcaccaccttcaactttcatggaaatgagacctccatgaatgctctgaaagacctgctgcgtcacacacgtgggctgagcaagttaggcctggagttgtatcctgcccctctggagagtcttgactacaagggtcatgtcaattgggagatcctcaccccaattcgggctgagctgatgcgtacactcagggaagtcaggcagcccaagaggatcttctttggtcccgtcccttgccctaactgtggctcatggccatctgagaaagtggacttccatctttgctcctagggaaggcctggttcgtggga

SEQ ID NO: 24 - protein, 474 aa, Homo sapiens
MSLQAPSRLLELAGQSLLRNQFLTIFTLDELPREVFPLMFMEAFSMRRFEALKLMVQAWPFLSLPLGSLMKTLHLETLQAVLRGLDTLVAQKVRPRRWKLQVLDLRDVDENFWTIWSGARVLSCSPEAMSKRQTVEDCPRMGEHQPLKVFIDLCLKESTLDECLSYLFGWIHYRRGLVHLCCSKVQNYSMPTSSFRNLLERIYPDSIQELEVWKKCSLNKTGKFAPYLSQMSNLRELFLAFGYERELYVSVQWPCIPDLDSPFLCLYYPQMLYIKKISNIKEHLEHLLRYLKNPLGAFIFSDAYLADRDMECLSQYPSLSQLKELRLIHILMWTTHLEPLGVLLEKVAATLKTLVLKDCRIQDPQLRVLLPALSHCSQLTTFNFHGNETSMNALKDLLRHTRGLSKLGLELYPAPLESLDYKGHVNWEILTPIRAELMRTLREVRQPKRIFFGPVPCPNCGSWPSEKVDFHLCS

SEQ ID NO: 25 - DNA, 1425 bp, Homo sapiens
atgagcatcagggccccacccagactcctggagctggcaaggcagaggctgctgagggaccaggccttggccatctccaccatggaggagctgcccagggagctcttccccacactgttcatggaggccttcagcaggagacgctgtgaaaccctgaaaacaatggtgcaggcctggcctttcacccgcctccctctagggtccctgatgaagtcgcctcatctggagtcattaaaatctgtgctggaaggggttgatgtgctgttgacccaagaggttcgccccaggcagtcaaaacttcaagtgctggacttgaggaatgtggatgagaacttctgcgacatattttctggagctactgcatccttcccggaggctctgagtcagaagcaaacagcagataactgtccagggacaggcaggcagcagccattcatggtgttcatagacctttgtctcaagaacaggacactagatgaatgcctcacccacctcttagagtggggcaagcagagaaaaggcttactgcatgtgtgttgcaaggagctgcaggtttttggaatgcccatccacagtatcatagaggtcctgaacatggtggagcttgactgtatccaggaggtggaagtgtgctgcccctgggagctgtccactcttgtgaagtttgccccttacctgggccagatgaggaatctccgcaaacttgttctcttcaacatccgtgcatctgcctgcattcccccagacaacaaggggcagttcattgcccgattcacctctcagttcctcaagctggactatttccagaatctgtctatgcactccgtctctttcctcgaaggccacctggaccagctgctcaggtgtctccaggcctccttggagatggtcgttatgaccgactgcctgctgtcagagtcggacttgaagcatctctcttggtgcccgagcatccgtcaattaaaggagctggacctgaggggtgtcacgctgacccatttcagccctgagcccctcacaggtctgctggagcaagttgtggccaccctgcagaccctggacttagaggactgtgggatcatggattcccaactcagcgccatcctgcctgtcctgagccgctgctcccagctcagcaccttcagcttctgtgggaacctcatctccatggctgcccttgagaacctgctgcgccacaccgtcgggctgagcaagctaagcctggagctgtatcctgcccctctggagagttatgacacccagggtgctctctgctgggggagatttgctgaacttggggctgagctgatgaagacaccgagggacttaaggcagcccaagatcattgtgttctgcaccgtcccctgccctcgctgtggcatcagggcctcctatgacctggagcccagtcactgcctctgttga

SEQ ID NO: 26 - protein, 474 aa, Homo sapiens
MSIRAPPRLLELARQRLLRDQALAISTMEELPRELFPTLFMEAFSRRRCETLKTMVQAWPFTRLPLGSLMKSPHLESLKSVLEGVDVLLTQEVRPRQSKLQVLDLRNVDENFCDIFSGATASFPEALSQKQTADNCPGTGRQQPFMVFIDLCLKNRTLDECLTHLLEWGKQRKGLLHVCCKELQVFGMPIHSIIEVLNMVELDCIQEVEVCCPWELSTLVKFAPYLGQMRNLRKLVLFNIRASACIPPDNKGQFIARFTSQFLKLDYFQNLSMHSVSFLEGHLDQLLRCLQASLEMVVMTDCLLSESDLKHLSWCPSIRQLKELDLRGVTLTHFSPEPLTGLLEQVVATLQTLDLEDCGIMDSQLSAILPVLSRCSQLSTFSFCGNLISMAALENLLRHTVGLSKLSLELYPAPLESYDTQGALCWGRFAELGAELMKTPRDLRQPKIIVFCTVPCPRCGIRASYDLEPSHCLC

SEQ ID NO: 27 - DNA, 1298 bp, Homo sapiens
atgggactcaacttctacacaccaccaccaccacttaatcgtgattcccccaaacagcagagcctcagcagccagcagaggaggtggaaacttcaagtgctggacttgctggatgttgatgagaatgtctgggctggatggcctggaggctaggccctgtcctcctccccagaggccatgagtaagaggcagacagcagaggactatccaaggatgggagagcaccagcccttaaaggtgttcatagacgtctgcctcaaggaaacaccccaagatgaatgcctgagatacctcttccagtgggtttaccaaaggagagttttagtacacctgtgctgtagtaagttggtgaattatctaacacccattaaatatcttagaaagtcattgaaaatagtccacctgaatagtattcaggagttggaaattcacaacatgtcctggctgcatctgataagaaagcttcattgttacctgaaggagatgaagaatcttcgcaaactcgttttctccaggtgccatcattactcgtcggacaatgacctcgaggaatggttactcaccaaattcagcctgtgttcctcaggctggaacacctccaattgcttaaagtaaaattgatcaccttcttcagtgggcacctggaacagctgatcaggtgcctccagaaccccttggagaacttggagttaacttgtggctacctattggaagaggacatgaagtgtctgtctcagtacccaagcctcagctacctaaagcatctgaatctcagctacgtgctgctgttccgcatcagtcttgaacccctcggagctctgctagagaaaattgctgccactctcaagaccctcatcttcgagggctgtcagatccactactgccaactcagcgccatcctgcctggcctgagccgctgctcccagctcaccaccttctactttggcagaaattgcatgtctacggacaccctgaaggacctgctgcgccacaccagtgggctgagcaagttaagcctggagacgtatcctgcccctgaggagagtttgaattccttggttcgtgtcgattgggagatcttcgccccacttcgggctgagctgatgtgtacactgagggaagtcaggcagcccaagaggatcttcactggtcccactccctgcccttcctgtggctcatcaccgtctgaggaactggagctccatctttgctgctagggaaggcgtgcctagtggggttgataaatccaaagttctcttccaggcacttggacactaaaatctagtatgtaagtgcaa

SEQ ID NO: 28 - DNA, 1720 bp, Homo sapiens
agcctggagttcctgcttggttcttcctgaggactgagcaccttctagactacatccagatctgttttccctgcagattcgtgaagatgagcatccggactccacccagactcctggagcttgcagggcggagcctgctgagggaccaagccttggccatgtccaccctggaggagctgcccacagaacttttccccccactgttcatggaggccttcagcaggagacgctgtgaggccctgaagctgatggtgcaggcctggcccttccgccgcctccctctgaggcctctgataaagatgccttgtctggaggccttccaagctgtgctcgatgggctggatgcactgcttacccaaggggttcatcccaggaggtggaaacttcaagtgctggatttacaggatgtctgtgagaacttctggatggtttggtctgaagctatggcccgtgggtgcttcctcaatgccaagaggaacaaaacaccagtgcaggactgtccaaggatgagaggacagcagcccttgactgtgttcgtagaactttggctcaagaacaggactctggatgaatacctcacctgcctccttctatgggtcaagcagaggaaagatttactacacctgtgctgtaagaagctgaaaattttgggaatgcccttccgcaatatcagaagcatcctgaaaatggtgaacctagactgtatccaggaggtggaagtgaattgcaagtgggtactgcccatcctgacacagtttaccccatacctgggccacatgaggaatcttcagaagctcgttctctcccacatggatgtctctcgctacgtttccccagagcagaagaaggagattgttacccagttcaccactcagttcctcaagctgtgctgcctccaaaagctttctatgaactctgtttctttcctcgaaggccacctggaccagctgctcagctgtctgaagacctcgttaaaggtcctcacaataactaactgtgtgcttttggaatcagacttgaagcatctatcccagtgcccgagtatcagtcaactaaagaccctggacctgagtggcatcagactgaccaattacagtcttgtgcctctccaaattctcctagaaaaagttgcagccacccttgagtacctggatttagatgactgtggcatcatagactcccaagtcaacgccatcctgcctgccctgagccgctgctttgagctcaacaccttcagcttctgtggaaatcccatctccatggccaccctggagaacctgctgagccacacaatcatactcaaaaacttatgcgtggagctgtatcctgccccccgggagagttatgatgctgatggtactctctgctggagcagatttgctcaaattagggctgagctgatgaagagagtgagggacttaaggcaccccaagaggatcttgttctgtactgactgctgccctgactgtggcaacaggtcattttatgacctggaggcagatcaatgctgctgttgaatgcctgcctatttgggtggatatgtcaaacgctttcttctggacacttggaaactaaaacctaggtcttaggtacatcctatagggagcacagaacccatcatttcacacatgggctctgaaagtgggaaagggaaggtgatcaagcaggggcaggacttgggggaagtgttgccatggattcgatgggactttggggacct

SEQ ID NO: 29 - protein, 476 aa, Homo sapiens
MSIRTPPRLLELAGRSLLRDQALAMSTLEELPTELFPPLFMEAFSRRRCEALKLMVQAWPFRRLPLRPLIKMPCLEAFQAVLDGLDALLTQGVHPRRWKLQVLDLQDVCENFWMVWSEAMARGCFLNAKRNKTPVQDCPRMRGQQPLTVFVELWLKNRTLDEYLTCLLLWVKQRKDLLHLCCKKLKILGMPFRNIRSILKMVNLDCIQEVEVNCKWVLPILTQFTPYLGHMRNLQKLVLSHMDVSRYVSPEQKKEIVTQFTTQFLKLCCLQKLSMNSVSFLEGHLDQLLSCLKTSLKVLTITNCVLLESDLKHLSQCPSISQLKTLDLSGIRLTNYSLVPLQILLEKVAATLEYLDLDDCGIIDSQVNAILPALSRCFELNTFSFCGNPISMATLENLLSHTIILKNLCVELYPAPRESYDADGTLCWSRFAQIRAELMKRVRDLRHPKRILFCTDCCPDCGNRSFYDLEADQCCC

SEQ ID NO: 30 - DNA, 1884 bp, Homo sapiens
atgtgtttcaggcacgtgctgactgagagacccaaagtcttcaagcctagagttcctgcttggttcttcctgaggactgagcaccttctagactacatccagatctgttttccctgcagattcgtgaagatgagcatccggactccacccagactcctggagcttgcagggcggagcctgctgagggaccaagccttggccatgtccaccctggaggagctgcccacagaacttttccccccactgttcatggaggccttcagcaggagacgctgtgaggccctgaagctgatggtgcaggcctggcccttccgccgcctccctctgaggcctctgataaagatgccttgtctggaggccttccaagctgtgctcgatgggctggatgcactgcttacccaaggggttcatcccaggaggtggaaacttcaagtgctggatttacaggatgtctgtgagaacttctggatggtttggtctgaagctatggcccatgggtgcttcctcaatgccaagaggaacaaaaaaccagtgcaggactgtccaaggatgagaggacagcagcccttgactgtgttcgtagaactttggctcaagaacaggactctggatgaatacctcacctgcctccttctatgggtcaagcagaggaaagatttactacacctgtgctgtaagaagctgaaaattttgggaatgcccttccgcaatatcagaagcatcctgaaaatggtgaacctagactgtatccaggaggtggaagtgaattgcaagtgggtactgcccatcctgacacagtttaccccatacctgggccacatgaggaatcttcagaagctcgttctctcccacatggatgtctctcgctacgtttccccagagcagaagaaggagattgttacccagttcaccactcagttcctcaagctgtgctgcctccaaaagctttctatgaactctgtttctttcctcgaaggccacctggaccagctgctcagctgtctgaagacctcgttaaaggtcctcacaataactaactgtgtgcttttggaatcagacttgaagcatctatcccagtgcccgagtatcagtcaactaaagaccctggacctgagtggcatcagactgaccaattacagtcttgtgcctctccaaattctcctagaaaaagttgcagccacccttgagtacctggatttagatgactgtggcatcatagactcccaagtcaacgccatcctgcctgccctgagctgctgctttgagctcaacaccttcagcttctgtggaaatcccatctccatggccaccctggagaacctgctgagccacacaatcatactcaaaaacttatgcgtggagctgtatcctgccccccgggagagttatgatgctgatggtactctctgctggagcagatttcctcaaattagggctgagctgatgaagagagtgagggacttaaggcaccccaagaggatcttgttctgtactgactgctgccctgactgtggcaacaggtcattttatgacctggaggcagatcaatgctgctgttgaatgcctgcctatttgggtggatatgtcaaacgctttcttctggacacttggaaactaaaacctaggtcttaggtacatcctatagggagcacagaacccatcatttcacacatgggctctgaaagtgggaaaggaaaggtgatcaagcaggggcaggacttgggggaagtgttgccatggattcgatgggactttggggacctgtgtcctgtagagtggaaaatgggaatttgaatgtctagagtggaggcttgagaatacttgagggagttactcttggatgcatggttgtaaagaaacaatcagaaataaaggaaaactgag

SEQ ID NO: 31 - protein, 519 aa, Homo sapiens
MCFRHVLTERPKVFKPRVPAWFFLRTEHLLDYIQICFPCRFVKMSIRTPPRLLELAGRSLLRDQALAMSTLEELPTELFPPLFMEAFSRRRCEALKLMVQAWPFRRLPLRPLIKMPCLEAFQAVLDGLDALLTQGVHPRRWKLQVLDLQDVCENFWMVWSEAMAHGCFLNAKRNKKPVQDCPRMRGQQPLTVFVELWLKNRTLDEYLTCLLLWVKQRKDLLHLCCKKLKILGMPFRNIRSILKMVNLDCIQEVEVNCKWVLPILTQFTPYLGHMRNLQKLVLSHMDVSRYVSPEQKKEIVTQFTTQFLKLCCLQKLSMNSVSFLEGHLDQLLSCLKTSLKVLTITNCVLLESDLKHLSQCPSISQLKTLDLSGIRLTNYSLVPLQILLEKVAATLEYLDLDDCGIIDSQVNAILPALSCCFELNTFSFCGNPISMATLENLLSHTIILKNLCVELYPAPRESYDADGTLCWSRFPQIRAELMKRVRDLRHPKRILFCTDCCPDCGNRSFYDLEADQCCC

SEQ ID NO: 32 - DNA, 1751 bp, Homo sapiens
atgagcctacaggccccacgcagactcctggagctggcagggcagagcctgctgggggaccaggccttggccatctccatcttggatgagctgcccagggagctcttccccccactgttcgtggaggccttcactagcagacgctgcgaggttctgaaggtgatggtgcaggcctggcccttcccctgcctccctctggggtccctgatgaagacgcctgatctggagatcttacattatgtagtggatgggattgattgcctgcttgcccaaaaggttcgccccaggaggcggaaacttcaagtgctggaattgcgggatgttgatgagaatttttggaccatatggtctggagccaggcccctgtcctgctccccagaggccatgagtaagaggcagacagtggaggactgtccaaggacaggagagaagcagcccttgaaggtgttcatggatgtttgcctcaaggaaaaattcatggatgaagatctgagcttcttctctgggtgggtccagcacagaagaggttcagtacacctgtgctgtactaaggtggtgaattattcaatgagcattctaaatttcagaaacatattggaaacagtatacccagacagtatccaagtgttggaaatttggaacatgtgctggccgtgtatgatagtagagtttagcccttacctgagccagatgaggaatcttcgcaaactcttcatctccgatggctgtctttccccagagcagaagaaggagattgttacccagttcaccactcagttcctcaagctgcactgcctccaaaagctttatatgaactctgtttctttcctcgaaggccacctggaccagctgctcagctgtctgaagacctcgttaaaggtcctcacaataactaactgtgtgcttttggaatcagacttgaagcatctatcccagtgcccgagtatcagtcaactaaagaccctggacctgagtggcatcagactgaccaattacagtcttgtgcctctccaaattctcctagaaaaagttgcagccacccttgagtacctggatttagatgactgtggcatcatagactcccaagtcaacgccatcctgcctgccctgagccgctgctttgagctcaacaccttcagcttctgtggaaatcccatctccatggccaccctggagaacctgctgagccacacaatcatactcaaaaacttatgcctggagctgtatcctgccccacgggagagttatggtgctgatggtactctctgctggagcagatttactcagattagggctgagctgatgaagagagttagggacttaaggcaccccaagaggatcttgttcggtactgactactgccctgactgtggcaacaggtcattttatgacctggaggcagatcaatactgctgttgaatgcctgcctatttggatgggtatgtcaaacgctttcttctggacacttggaaactaaaacctaggtcttaggtacatcctaaagggagcacagaacccatcgtttcacacatgggctctgaaagtgggaaaggaatgctgatcaagcaggggcaggacttgggggaaatgttgccatggattcgatgggactttgggaacgtgtatcctgtagagtcgaaaatgggaatctgaatgtctagagtggaattcaggcttgagaatacatgagggagttactcttgcatggatggttgtaaataaacaatcagaaataaaggaaaactgagcag

SEQ ID NO: 33 - protein, 472 aa, Homo sapiens
MSLQAPRRLLELAGQSLLGDQALAISILDELPRELFPPLFVEAFTSRRCEVLKVMVQAWPFPCLPLGSLMKTPDLEILHYVVDGIDCLLAQKVRPRRRKLQVLELRDVDENFWTIWSGARPLSCSPEAMSKRQTVEDCPRTGEKQPLKVFMDVCLKEKFMDEDLSFFSGWVQHRRGSVHLCCTKVVNYSMSILNFRNILETVYPDSIQVLEIWNMCWPCMIVEFSPYLSQMRNLRKLFISDGCLSPEQKKEIVTQFTTQFLKLHCLQKLYMNSVSFLEGHLDQLLSCLKTSLKVLTITNCVLLESDLKHLSQCPSISQLKTLDLSGIRLTNYSLVPLQILLEKVAATLEYLDLDDCGIIDSQVNAILPALSRCFELNTFSFCGNPISMATLENLLSHTIILKNLCLELYPAPRESYGADGTLCWSRFTQIRAELMKRVRDLRHPKRILFGTDYCPDCGNRSFYDLEADQYCC

SEQ ID NO: 34 - DNA, 753 bp, Homo sapiens
atggccagcaacgttaccaacaagatggatcctcactccgtgaactcccgtgtgttcattgggaatctcaacactcttgttgtcaagaaatctgatgtggaggcgatcttttccaagtatggcaaaattgcgggctgctctgttcataagggctttgccttcgttcaatatgataaggagaaaaatgcccgggctgctgtagcaggagaggatggcagaatgattgctagccaggttgcagttattaacctggctgcagagccaaaagtgaaccgaggaaacgcaggtgtgaaacgatccgcagcggagatgtacggctcctcttttgacttggactatggctttcaacgggattattatgatgggatgtacagtttcccagcacgtgtacctcctcctcctcccattgctctggccattaagcaggagttgacccagataaaacagaaagtggattctctcctggaaaacctggaaaaaattgaaaaggaacagagcaaacaagaggtagaggtgaaaaatgctaagtcagaagaggagcagagcagtagctccatgaagaaagatgagactcatgtaaagatggagtctgaggggggtgcagaagactctgctgaggagggggacccactggatgatgatgataatgaagatcagggggacaaccagcttcatttgatcaagaataatgaaaaagatgctgaggaaggagaggataacagagacagcaccaatggccaggatgactcttaa

SEQ ID NO: 35 - protein, 250 aa, Homo sapiens
MASNVTNKMDPHSVNSRVFIGNLNTLVVKKSDVEAIFSKYGKIAGCSVHKGFAFVQYDKEKNARAAVAGEDGRMIASQVAVINLAAEPKVNRGNAGVKRSAAEMYGSSFDLDYGFQRDYYDGMYSFPARVPPPPPIALAIKQELTQIKQKVDSLLENLEKIEKEQSKQEVEVKNAKSEEEQSSSSMKKDETHVKMESEGGAEDSAEEGDPLDDDDNEDQGDNQLHLIKNNEKDAEEGEDNRDSTNGQDDS

SEQ ID NO: 36 - DNA, 1520 bp, Homo sapiens
atgtcagagacagggacaagaatctcacctctattttcccacaggaggtggaaacttcaagtgctggatttacaggatgtctgtgagaacttctggatggtttggtctgaagctatggcccgtgggtgcttcctcaatgccaagaggaacaaaaaaccagtgcaggactgtccaaggatgagaggacggcagcccttgactgtgttcgtagaactttggctcaagaacaggactctggatgaacacctcacctgcctccttctatgggtcaagcagaggaaagatttactacacctgtgctgtaagaagctgaaaattttgggaatgcccttccgcaatatcagaagcatcctgaaaatggtgaacctagactgtatccaggaggtggaagtgaattgcaagtgggtactgcccatcctgacacagtttaccccatacctgggccacatgaggaatcttcagaagctcgttctctcccacatggatgtctctcgctacgtttccccagagcagaagaaggagattgttacccagttcaccactcagttcctcaagctgcactgcctccaaaagctttatatgaactctgtttctttcctcgaaggccacctggaccagctgctcagctgtctgaagacctcgttaaaggtcctcacaataactaactgtgtgcttttggaatcagacttgaagcatctatcccagtgcccgagtatcagtcaactaaagaccctggacctgagtggcatcagactgaccaattacagtcttgtgcctctccaaattctcctagaaaaagttgcagccacccttgagtacctggatttagatgactgtggcatcatagactcccaagtcaacgccatcctgcctgccctgagccgctgctttgagctcaacaccttcagcttctgtggaaatcccatctccatggccaccctggagaacctgctgagccacacaatcatactcaaaaacttatgcctggagctgtatcctgccccacgggagagttatggtgctgatggtactctctgctggagcagatttactcagattagggctgagctgatgaagagagttagggacttaaggcaccccaagaggatcttgttcggtactgactactgccctgactgtggcaacaggtcattttatgacctggaggcagatcaatactgctgttgaatgcctgcctatttggatgggtatgtcaaacgctttcttctggacacttggaaactaaaacctaggtcttaggtacatcctaaagggagcacagaacccatcgtttcacacatgggctctgaaagtgggaaaggaatgctgatcaagcaggggcaggacttgggggaaatgttgccatggattcgatgggactttggggacctgtatcctgtagagtcgaaaatgggaatctgaatgtctagagtggaattcaggcttgagaatacatgagggagttactcttgcatggatggttgtaaagaaacaatcagaaataaaggaaaactgagcag

SEQ ID NO: 37 - protein, 395 aa, Homo sapiens
MSETGTRISPLFSHRRWKLQVLDLQDVCENFWMVWSEAMARGCFLNAKRNKKPVQDCPRMRGRQPLTVFVELWLKNRTLDEHLTCLLLWVKQRKDLLHLCCKKLKILGMPFRNIRSILKMVNLDCIQEVEVNCKWVLPILTQFTPYLGHMRNLQKLVLSHMDVSRYVSPEQKKEIVTQFTTQFLKLHCLQKLYMNSVSFLEGHLDQLLSCLKTSLKVLTITNCVLLESDLKHLSQCPSISQLKTLDLSGIRLTNYSLVPLQILLEKVAATLEYLDLDDCGIIDSQVNAILPALSRCFELNTFSFCGNPISMATLENLLSHTIILKNLCLELYPAPRESYGADGTLCWSRFTQIRAELMKRVRDLRHPKRILFGTDYCPDCGNRSFYDLEADQYCC

SEQ ID NO: 38 - DNA, 2104 bp, Homo sapiens
gatttgttttcttgcagatttatgaggatgagcctacaggccccacgcagactcctggagctggcagggcagagcctgctgggggaccaggccttggccatctccatcttggatgagctgcccagggagctcttccccccactgttcgtggaggccttcactagcagacgctgcgaggttctgaaggtgatggtgcaggcctggcccttcccctgcctccctctggggtccctgatgaagacgcctgatctggagatcttacattatgtagtggatgggattgattgcctgcttgcccaaaaggttcgccccaggaggcggaaacttcaagtgctggaattgcgggatgttgatgagaatttttggaccatatggtctggagccaggcccctgtcctgctccccagaggccatgagtaagaggcagacagtggaggactgtccaaggacaggagagaagcagcccttgaaggtgttcatggatgtttgcctcaaggaaaaattcatggatgaagatctgagcttcttctctgggtgggtccagcacagaagaggttcagtacacctgtgctgtactaaggtggtgaattattcaatgagcattctaaatttcagaaacatattggaaacagtatacccagacagtatccaagtgttggaaatttggaacatgtgctggccgtgtatgatagtagagtttatccgttacctgagccagatgaggaatcttcgcaaactcttcatctccgatggctgtcgttacctgctaagctctgacagccaagaacagttagttgctgaattcagctctgtgctcctcaggctggagtacctccagatgctttatgtaagaagggtctgcttcttcagaggccacctggaccagctgatcaggtgcctcaggagcccattggagacattggcattaacttatggcttcctagaaaaagtggacttgaaatgtctgccccggtacccaagtctcagtcaactgaagcagctgaatctgagtcatggtgcactgcgcttcatccgtcttgagcccctccgagctctgctagagaaagttgctgccactcttcagaccctcttcttagtggactgtgggattcgggactccaaactcagggtcatcctgcctgccctgagctgctgctccaacctcaccactttctgttttcacggcaatgacacgtccatggatggtctgaaggacctgctgcgccacacaggcaggctgagcaatttgagcctggaaacatatcctgcccctcgggagagtcttgatgacaggggtcgtgtcatttcggagctcctcaccccacttcaggctgagctgatgcgtatactgagggaagtaagggagcccaaaaggatcttctttggtccggtgtcctgcccttgctgtggcacgtcgcccactgagcaactggagttcaatttttgcttgtggggaaggcctgcctagtggggtggaggtataaaaagctttttctccaggcacttggaaactaaaatctgggacatagatgtcttttatttttctttttccttattttacaattttacagtttttatttaaaaatttgagacagggtttccctatgttgtccaggctggtctcaaactcttacgcttaagggagccacctgcttggcctcccaagattctgggattacaggcataagcagctgtgccgggtctataggtgtattataaagggagcagagaaacctctgtttcaggcatgtgctttctgtgagtgggaaaaaaaacacaaaaaaacccagcagggggcagcactggggaaaaggttgaatggagtcactgagactcagggatctgtgtcctagacagtcagaaatagaaagctgaagttctagagtgaaggagttatctcagcaaggatggatacaaagaaacgtcggaagtagagggaacctaaatggaaactctctgctgtccttcatgattgattagcctgtttcagcaatttatacatcagaaatctttagttcctgatgaattaaaaaaagaggtactagttcatctgtgatttaggttcatctgcaggaaataaaggaatcaaaataaacttcattttg

SEQ ID NO: 39 - protein, 479 aa, Homo sapiens
MSLQAPRRLLELAGQSLLGDQALAISILDELPRELFPPLFVEAFTSRRCEVLKVMVQAWPFPCLPLGSLMKTPDLEILHYVVDGIDCLLAQKVRPRRRKLQVLELRDVDENFWTIWSGARPLSCSPEAMSKRQTVEDCPRTGEKQPLKVFMDVCLKEKFMDEDLSFFSGWVQHRRGSVHLCCTKVVNYSMSILNFRNILETVYPDSIQVLEIWNMCWPCMIVEFIRYLSQMRNLRKLFISDGCRYLLSSDSQEQLVAEFSSVLLRLEYLQMLYVRRVCFFRGHLDQLIRCLRSPLETLALTYGFLEKVDLKCLPRYPSLSQLKQLNLSHGALRFIRLEPLRALLEKVAATLQTLFLVDCGIRDSKLRVILPALSCCSNLTTFCFHGNDTSMDGLKDLLRHTGRLSNLSLETYPAPRESLDDRGRVISELLTPLQAELMRILREVREPKRIFFGPVSCPCCGTSPTEQLEFNFCLWGRPA

SEQ ID NO: 40 - DNA, 1855 bp, Homo sapiens
acccaaagtcttcaagcctggagttcctgcttggttcttcctgaggactgagcaccttctagactacatccagatctgttttccctgcagattcgtgaagatgagcatccggactccacccagactcctggagcttgcagggcggagcctgctgagggaccaagccttggccatgtccaccctggaggagctgcccacagaacttttccccccactgttcatggaggccttcagcaggagacgctgtgaggccctgaagctgatggtgcaggcctggcccttccgccgcctccctctgaggcctctgataaagatgccttgtctggaggccttccaagctgtgctcgatgggctggatgcactgcttacccaaggggttcatcccaggaggtggaaacttcaagtgctggatttacaggatgtctgtgagaacttctggatggtttggtctgaagctatggcccatgggtgcttcctcaatgccaagaggaacaaaaaaccagtgcaggactgtccaaggatgagaggacagcagcccttgactgtgttcgtagaactttggctcaagaacaggactctggatgaatacctcacctgcctccttctatgggtcaagcagaggaaagatttactacacctgtgctgtaagaagctgaaaattttgggaatgcccttccgcaatatcagaagcatcctgaaaatggtgaacctagactgtatccaggaggtggaagtgaattgcaagtgggtactgcccatcctgacacagtttaccccatacctgggccacatgaggaatcttcagaagctcgttctctcccacatggatgtctctcgctacgtttccccagagcagaagaaggagattgttacccagttcaccactcagttcctcaagctgtgctgcctccaaaagctttctatgaactctgtttctttcctcgaaggccacctggaccagctgctcagctgtctgaagacctcgttaaaggtcctcacaataactaactgtgtgcttttggaatcagacttgaagcatctatcccagtgcccgagtatcagtcaactaaagaccctggacctgagtggcatcagactgaccaattacagtcttgtgcctctccaaattctcctagaaaaagttgcagccacccttgagtacctggatttagatgactgtggcatcatagactcccaagtcaacgccatcctgcctgccctgagccgctgctttgagctcaacaccttcagcttctgtggaaatcccatctccatggccaccctggagaacctgctgagccacacaatcatactcaaaaacttatgcgtggagctgtatcctgccccccgggagagttatgatgctgatggtactctctgctggagcagatttgctcaaattagggctgagctgatgaagagagtgagggacttaaggcaccccaagaggatcttgttctgtactgactgctgccctgactgtggcaacaggtcattttatgacctggaggcagatcaatgctgctgttgaatgcctgcctatttgggtggatatgtcaaacgctttcttctggacacttggaaactaaaacctaggtcttaggtacatcctatagggagcacagaacccatcatttcacacatgggctctgaaagtgggaaaggaaaggtgatcaagcaggggcaggacttgggggaagtgttgccatggattcgatgggactttggggacctgtgtcctgtagagtggaaaatgggaatttgaatgtctagagtggaggcttgagaatacttgagggagttactcttggatgcatggttgtaaagaaacaatcagaaataaaggaaaactgag

SEQ ID NO: 41 - protein, 476 aa, Homo sapiens
MSIRTPPRLLELAGRSLLRDQALAMSTLEELPTELFPPLFMEAFSRRRCEALKLMVQAWPFRRLPLRPLIKMPCLEAFQAVLDGLDALLTQGVHPRRWKLQVLDLQDVCENFWMVWSEAMAHGCFLNAKRNKKPVQDCPRMRGQQPLTVFVELWLKNRTLDEYLTCLLLWVKQRKDLLHLCCKKLKILGMPFRNIRSILKMVNLDCIQEVEVNCKWVLPILTQFTPYLGHMRNLQKLVLSHMDVSRYVSPEQKKEIVTQFTTQFLKLCCLQKLSMNSVSFLEGHLDQLLSCLKTSLKVLTITNCVLLESDLKHLSQCPSISQLKTLDLSGIRLTNYSLVPLQILLEKVAATLEYLDLDDCGIIDSQVNAILPALSRCFELNTFSFCGNPISMATLENLLSHTIILKNLCVELYPAPRESYDADGTLCWSRFAQIRAELMKRVRDLRHPKRILFCTDCCPDCGNRSFYDLEADQCCC

SEQ ID NO: 42 - DNA, 1295 bp, Homo sapiens
atgggactcaacttctacacaccaccaccacttaatcgtgattcccccaaacagcagagcctcagcagccagcagaggaggtggaaacttcaagtgctggacttgctggatgttgatgagaatgtctgggctggatggcctggaggctaggccctgtcctcctccccagaggccatgagtaagaggcagacagcagaggactatccaaggatgggagagcaccagcccttaaaggtgttcatagacgtctgcctcaaggaaacaccccaagatgaatgcctgagatacctcttccagtgggtttaccaaaggagagttttagtacacctgtgctgtagtaagttggtgaattatctaacacccattaaatatcttagaaagtcattgaaaatagtccacctgaatagtattcaggagttggaaattcacaacatgtcctggctgcatctgataagaaagcttcattgttacctgaaggagatgaagaatcttcgcaaactcgttttctccaggtgccatcattactcttcggacaatgacctcgaggaatggttactcaccaaattcagcctgtgttcctcaggctggaacacctccaattgcttaaagtaaaattgatcaccttcttcagtgggcacctggaacagctgatcaggtgcctccagaaccccttggagaacttggagttaacttgtggctacctattggaagaagacatgaagtgtctgtctcagtacccaagcctcagctacctaaagcatctgaatctcagctacgtgctgctgttccgcatcagtcttgaacccctcggagctctgctagagaaaattgctgccactctcaagaccctcatcttcgagggctgtcagatccactactgccaactcagcgccatcctgcctggcctgagccgctgctcccagctcaccaccttctactttggcagaaattgcatgtctacggacaccctgaaggacctgctgcgccacaccagtgggctgagcaagttaagcctggagacgtatcctgcccctgaggagagtttgaattccttggttcgtgtcgattgggagatcttcgccccactttgggctgagctgatgtgtacactgagggaagtcaggcagcccaagaggatcttcactggtcccactccctgcccttcctgtggctcatcaccgtctgaggaactggagctccatctttgctgctagggaaggcgtgcctagtggggttgataaatccaaagttctcttccaggcacttggacactaaaatctagtatgtaagtgcaa

SEQ ID NO: 43 - DNA, 1844 bp, Homo sapiens
gaactactgcttgattctctgagagatcccagcaccctacaaactgagtccagatctgagttttcccttgcagattcatcaagatgagcatcagggccccacccagactcctggagctggcaaggcagaggctgctgagggaccaggccttggccatctccaccatggaggagctgcccagggagctcttccccacactgttcatggaggccttcagcaggagacgctgtgaaaccctgaaaacaatggtgcaggcctggcctttcacccgcctccctctagggtccctgatgaagtcgcctcatctggagtcattaaaatctgtgctggaaggggttgatgtgctgttgacccaagaggttcgccccaggcagtcaaaacttcaagtgctggacttgaggaatgtggatgagaacttctgcgacatattttctggagctactgcatccttcccggaggctctgagtcagaagcaaacagcagataactgtccagggacaggcaggcagcagccattcatggtgttcatagacctttgtctcaagaacaggacactagatgaatgcctcacccacctcttagagtggggcaagcagagaaaaggcttactgcatgtgtgttgccaggagctgcaggtttttggaatgcccatccacagtatcatagaggtcctgaacatggtggagcttgactgtatccaggaggtggaagtgtgctgcccctgggagctgtccactcttgtgaagtttgccccttacctgggccagatgaggaatctccgcaaacttgttctcttcaacatccgtgcatctgcctgcattcccccagacaacaaggggcagttcattgcccgattcacctctcagttcctcaagctggactatttccagaatctgtctatgcactccgtctctttcctcgaaggccacctggaccagctgctcaggtgtctccaggcctccttggagatggtcgttatgaccgactgcctgctgtcagagtcggacttgaagcatctctcttggtgcccgagcatccgtcaattaaaggagctggacctgaggggtgtcacactgacccatttcagccctgagcccctcacaggtctgctggagcaagttgtggccaccctgcagaccctggacttagaggactgtgggatcatggattcccaactcagcgccatcctgcctgtcctgagccgctgctcccagctcagcaccttcagcttctgtgggaacctcatctccatggctgcccttgagaacctgctgcgccacaccgtcgggctgagcaagctaagcctggagctgtatcctgcccctctggagagttatgacacccagggtgctctctgctgggggagatttgctgaacttggggctgagctgatgaagacactgagggacttaaggcagcccaagatcattgtgttctgcaccgtcccctgccctcgctgtggcatcagggcctcctatgacctggagcccagtcactgcctctgttgaatgcctgccatcagggtggatatatttcaagctttcttctggtcatttcggagctgaaacctaggccatgagtgcatgttaaagggagcacagacccatcgtttcaaatgcctcctcagtgtgaatgggaaaggaatgaggatgcaggaggggcaggactgggggaaaagttgacttggagtggatgggctctttagagacctgtgtcccagagaatcagaaatgggaatctgaattgctagagtgagaatcagggaggagagacacatgagagggttacccctgcacagatggttgtaaagtaacagtcagaaataaagggaaactgagtggaaa

SEQ ID NO: 44 - protein, 474 aa, Homo sapiens
MSIRAPPRLLELARQRLLRDQALAISTMEELPRELFPTLFMEAFSRRRCETLKTMVQAWPFTRLPLGSLMKSPHLESLKSVLEGVDVLLTQEVRPRQSKLQVLDLRNVDENFCDIFSGATASFPEALSQKQTADNCPGTGRQQPFMVFIDLCLKNRTLDECLTHLLEWGKQRKGLLHVCCQELQVFGMPIHSIIEVLNMVELDCIQEVEVCCPWELSTLVKFAPYLGQMRNLRKLVLFNIRASACIPPDNKGQFIARFTSQFLKLDYFQNLSMHSVSFLEGHLDQLLRCLQASLEMVVMTDCLLSESDLKHLSWCPSIRQLKELDLRGVTLTHFSPEPLTGLLEQVVATLQTLDLEDCGIMDSQLSAILPVLSRCSQLSTFSFCGNLISMAALENLLRHTVGLSKLSLELYPAPLESYDTQGALCWGRFAELGAELMKTLRDLRQPKIIVFCTVPCPRCGIRASYDLEPSHCLC

SEQ ID NO: 45 - DNA, 1473 bp, Homo sapiens
atgcaacctggtgtcagtggaagagtttttcctcggagatttgtcagaatgagcctccaggccccatccagactgctggagctggcagggcagagcctgctgaggaaccagttcttgaccatcttcaccctggatgagctgcccagggaggtcttccctctgatgttcatggaggccttcagcatgagacgttttgaggccctgaagctgatggtgcaggcctggcccttcctccgcctccctctgggatccctgatgaagacacctcatctggagaccttgcaagctgtcctgaggggacttgatacactggtggcccagaaggttcgccccaggaggtggaaacttcaagtgctggatttgcgggatgttgatgagaatttctggaccatatggtctggagccagggtcctctcctgctccccagaggccatgagtaagaggcagacagtggaggactgtccaaggatgggagagcgccagcccttgaaggtgttcatagacctctgcctaaaggaaagtacactggatgaatgcctgagctacctttttgggtggatccactacagaagaggcctagtgcacctgtgttgtagtaaggtgcagaattactcaatgcccacttcaagtttcagaaatctattggaaaggatatacccagacagtatccaggagttggaagtctggaaaaagtgctctctcaataaaacgggaaagtttgccccttacctgagccagatgagcaatcttcgtgaactctttttagccttcggttatgagcgtgagttgtacgtgagcgtccagtagccgtgcattcctgacttggactctccattcctctgcctgtactacccccagatgctttatataaaaaagatcagtaatatcaaagagcacctggagcacctgctcaggtacctcaagaaccccttgggggcctttatattcagtgatgcttacctaactgatcgggacatggagtgtctgtctcagtacccaagcctcagtcagctaaaggagctgcgtctgattcatatcctaatgtggaccaccaatcttgagccccttggagttctgctggagaaagttgctgctactctcaagaccctcgtcttaaaggactgtcggatccaggacccccaactcagggtcctcctgcctgccctgagccactgttcccagctcaccaccttcaactttcatggaaatgagacctccatgaatgctctgaaagacctgctgcgtcacacacgtgggctgagcaagttaggcctggagttgtatcctgcccctctggagagtcttgactacaagggtcatgtcaattgggagatcctcaccccaattcgggctgagctgatgcgtacactcagggaagtcaggcagcccaagaggatcttctttggtcccgtcccttgccctacctgtggctcatggccatctgagaaagtggacttccatctttgctcctag

SEQ ID NO: 46 - DNA, 1863 bp, Homo sapiens
acccaaagtcttcaagcctggagttcctgcttggttcttcctgaggtctgagcaccttctagactacatccagatctgttttccctgcagattcatgaagatgagcatccggactccacccagactcctggagcttgcagggcggagcctgctgagggaccaagctttggccatgtccaccctggaggagctgcccacagaacttttccccccactgttcatggaggccttcagcaggagacgctgtgaggccctgaagctgatggtgcaggcctggcccttccgccgcctccctctgaggcctctgataaagatgccttgtctggaggccttccaagctgtgctcgatgggcttgatgcactgcttacccaaggggttcgtcccaggaggtggaaactccaagtgctggatttacaggatgtctgtgagaacttctggatggtttggtctgaagctatggcccatgggtgcttcctcaatgccaagaggaacaaaaaaccagtgcaggactgtccaaggatgagaggacggcagcccttgactgtgttcgtagaactttggctcaagaacaggactctggatgaatacctcacctacctccttctatgggtcaagcagaggaaagatttactacacctgtgctgtaagaagctgaaaattttgggaatgcccttccgcaatatcagaagcatcctgaaaatggtgaacctagactgtatccaggaggtggaagtgaattgcaagtgggtactgcccatcctgacacagtttaccccatacctgggccacatgaggaatcttcagaagctcgttctctcccacatggatgtctctcgctacgtttccccagagcagaagaaggagattgttacccagttcaccactcagttcctcaagctgcgctgcctccaaaagctttatatgaactctgtttctttcctcgaaggccacctggaccagctgctcagctgtctgaagacctcgttaaaagtcctcacaataactaactgtgtgcttttggaatcagacttgaagcatctatcccagtgcccgagtatcagtcaactaaagaccctggacctgagtggcatcagactgaccaattatagtcttgtgcctctccaaattctcctagaaaaagttgcagccacccttgagtacctggatttagatgactgtggcatcatagactcccaagtcaacgccatcctgcctgccctgagccgctgctttgagctcaacaccttcagcttctgtggaaatcccatctgcatggccaccctggagaacctgctgagccacacaatcatactcaaaaacttatgtgtggagctgtatcctgccccccgagagagttatggtgctgatggtactctctgctggagcagatttgctcaaattagggctgagctgatgaacagagtgagggacttaaggcaccccaagaggatcttgttctgtactgactactgccctgactgtggcaacaggtcattttatgacctggaggcagatcaatactgctgttgaatgcctgcctatttggatgggtatgtcaaacgctttcttctggacacttggaaactaaaacctaggtcttaggtacatcctaaagggagcacagaacccatcatttcacacataggctctgaaagtgggaaaggaaagctgatcaagcaggggccggacttgggggaaatgttgccatggattcgatgggactttggggacctgtgtcctgtagattcgaaaatgggaatctgaatgtctagagtggaattcaggcttgagaatacatgagggagttactcttgcatggatggttgtaaagaaacaatcagaaataaaggaaaactgagcag

SEQ ID NO: 47 - protein, 478 aa, Homo sapiens
MKMSIRTPPRLLELAGRSLLRDQALAMSTLEELPTELFPPLFMEAFSRRRCEALKLMVQAWPFRRLPLRPLIKMPCLEAFQAVLDGLDALLTQGVRPRRWKLQVLDLQDVCENFWMVWSEAMAHGCFLNAKRNKKPVQDCPRMRGRQPLTVFVELWLKNRTLDEYLTYLLLWVKQRKDLLHLCCKKLKILGMPFRNIRSILKMVNLDCIQEVEVNCKWVLPILTQFTPYLGHMRNLQKLVLSHMDVSRYVSPEQKKEIVTQFTTQFLKLRCLQKLYMNSVSFLEGHLDQLLSCLKTSLKVLTITNCVLLESDLKHLSQCPSISQLKTLDLSGIRLTNYSLVPLQILLEKVAATLEYLDLDDCGIIDSQVNAILPALSRCFELNTFSFCGNPICMATLENLLSHTIILKNLCVELYPAPRESYGADGTLCWSRFAQIRAELMNRVRDLRHPKRILFCTDYCPDCGNRSFYDLEADQYCC

SEQ ID NO: 48 - DNA, 1844 bp, Homo sapiens
gaactactgcttgattctctgagagatcccagcaccctacaaactgagtccagatctgagttttcccttgcagattcatcaagatgagcatcagggccccacccagactcctggagctggcaaggcagaggctgctgagggaccaggccttggccatctccaccatggaggagctgcccagggagctcttccccacactgttcatggaggccttcagcaggagacgctgtgaaaccctgaaaacaatggtgcaggcctggcctttcacccgcctccctctagggtccctgatgaagtcgcctcatctggagtcattaaaatctgtgctggaaggggttgatgtgctgttgacccaagaggttcgccccaggcagtcaaaacttcaagtgctggacttgaggaatgtggatgagaacttctgcgacatattttctggagctactgcatccttcccggaggctctgagtcagaagcaaacagcagataactgtccagggacaggcaggcagcagccattcatggtgttcatagacctttgtctcaagaacaggacactagatgaatgcctcacccacctcttagagtggggcaagcagagaaaaggcttactgcatgtgtgttgcaaggagctgcaggtttttggaatgcccatccacagtatcatagaggtcctgaacatggtggagcttgactgtatccaggaggtggaagtgtgctgcccctgggagctgtccactcttgtgaagtttgccccttacctgggccagatgaggaatctccgcaaacttgttctcttcaacatccgtgcatctgcctgcattcccccagacaacaaggggcagttcattgcccgattcacctctcagttcctcaagctggactatttccagaatctgtctatgcactccgtctctttcctcgaaggccacctggaccagctgctcaggtgtctccaggcctccttggagatggtcgttatgaccgactgcctgctgtcagagtcggacttgaagcatctctcttggtgcccgagcatccgtcaattaaaggagctggacctgaggggtgtcacactgacccatttcagccctgagcccctcacaggtctgctggagcaagttgtggccaccctgcagaccctggacttagaggactgtgggatcatggattcccaactcagcgccatcctgcctgtcctgagccgctgctcccagctcagcaccttcagcttctgtgggaacctcatctccatggctgcccttgagaacctgctgcgccacaccgtcgggctgagcaagctaagcctggagctgtatcctgcccctctggagagttatgacacccagggtgctctctgctgggggagatttgctgaacttggggctgagctgatgaagacactgagggacttaaggcagcccaagatcattgtgttctgcaccgtcccctgccctcgctgtggcatcagggcctcctatgacctggagcccagtcactgcctctgttgaatgcctgccatcagggtggatatatttcaagctttcttctggtcatttcggagctgaaacctaggccatgagtgcatgttaaagggagcacagacccatcgtttcaaatgcctcctcagtgtgaatgggaaaggaatgaggatgcaggaggggcaggactgggggaaaagttgacttggagtggatgggctctttagagacctgtgtcccagagaatcagaaatgggaatctgaattgctagagtgagaatcagggaggagagacacatgagagggttacccctgcacagatggttgtaaagtaacagtcagaaataaagggaaactgagtggaaa

SEQ ID NO: 49 - protein, 474 aa, Homo sapiens
MSIRAPPRLLELARQRLLRDQALAISTMEELPRELFPTLFMEAFSRRRCETLKTMVQAWPFTRLPLGSLMKSPHLESLKSVLEGVDVLLTQEVRPRQSKLQVLDLRNVDENFCDIFSGATASFPEALSQKQTADNCPGTGRQQPFMVFIDLCLKNRTLDECLTHLLEWGKQRKGLLHVCCKELQVFGMPIHSIIEVLNMVELDCIQEVEVCCPWELSTLVKFAPYLGQMRNLRKLVLFNIRASACIPPDNKGQFIARFTSQFLKLDYFQNLSMHSVSFLEGHLDQLLRCLQASLEMVVMTDCLLSESDLKHLSWCPSIRQLKELDLRGVTLTHFSPEPLTGLLEQVVATLQTLDLEDCGIMDSQLSAILPVLSRCSQLSTFSFCGNLISMAALENLLRHTVGLSKLSLELYPAPLESYDTQGALCWGRFAELGAELMKTLRDLRQPKIIVFCTVPCPRCGIRASYDLEPSHCLC

SEQ ID NO: 50 - DNA, 1473 bp, Homo sapiens
atgcaacctggtgtcagtggaagagtttttcctcggagatttgtcagaatgagcctccaggccccatccagactgctggagctggcagggcagagcctgctgaggaaccagttcttgaccatcttcaccctggatgagctgcccagggaggtcttccctctgatgttcatggaggccttcagcatgagacgttttgaggccctgaagctgatggtgcaggcctggcccttcctccgcctccctctgggatccctgatgaagacacctcatctggagaccttgcaagctgtcctgaggggacttgatacactggtggcccagaaggttcgccccaggaggtggaaacttcaagtgctggatttgcgggatgttgatgagaatttctggaccatatggtctggagccagggtcctctcctgctccccagaggccatgagtaagaggcagacagtggaggactgtccaaggatgggagagcgccagcccttgaaggtgttcatagacctctgcctaaaggaaagtacactggatgaatgcctgagctacctttttgggtggatccactacagaagaggcctagtgcacctgtgttgtagtaaggtgcagaattactcaatgcccacttcaagtttcagaaatctattggaaaggatatacccagacagtatccaggagttggaagtctggaaaaagtgctctctcaataaaacgggaaagtttgccccttacctgagccagatgagcaatcttcgtgaactctttttagccttcggttatgagcgtgagttgtacgtgagcgtccagtagccgtgcattcctgacttggactctccattcctctgcctgtactacccccagatgctttatataaaaaagatcagtaatatcaaagagcacctggagcacctgctcaggtacctcaagaaccccttgggggcctttatattcagtgatgcttacctagctgatcgggacatggagtgtctgtctcagtacccaagcctcagtcagctaaaggagctgcgtctgattcatatcctaatgtggaccacccatcttgagccccttggagttctgctggagaaagttgctgctactctcaagaccctcgtcttaaaggactgtcggatccaggacccccaactcagggtcctcctgcctgccctgagccactgttcccagctcaccaccttcaactttcatggaaatgagacctccatgaatgctctgaaagacctgctgcgtcacacacgtgggctgagcaagttaggcctggagttgtatcctgcccctctggagagtcttgactacaagggtcatgtcaattgggagatcctcaccccaattcgggctgagctgatgcgtacactcagggaagtcaggcagcccaagaggatcttctttggtcccgtcccttgccctacctgtggctcatggccatctgagaaagtggacttccatctttgctcctag

SEQ ID NO: 51 - DNA, 2280 bp, Homo sapiens
atggagctgctgttgcagccagttaacgggctggtgacaaagtcgcaattgtgtctgtggagcagggagcctgttccatcgaggcaggctgccccaatccgtccgcgccgcgctccatcgcccccgcacgcccgggcgcacgccctccccgcccgggccgccctctggctccccgcgcccggcagccagtgcctcaccgcgccgtcccgcgccagggctcgctccgagagccgcttccttctcgccgcggccggcgcgggccccccggccatgcgcccccgagccccagcctgcgccgccgcggcgctcgggctctgcagccttctgctgctgctcgcgcccgggcacgcgtgccccgcgggctgcgcctgcaccgacccgcacaccgtggactgccgcgaccgcgggctgcccagcgtgccagaccctttccccctggacgtgcgcaagctgctggtggccggcaaccgcatccagcggatccccgaggacttcttcatcttctacggcgacctggtctacctggacttcaggaacaactcgctgcgctcgctggaggagggcacgttcagcggctcggccaagctcgtgttcctcgacctcagctacaacaacttgacccagctgggcgccggcgccttccgctcggccgggaggctggtgaagcttagcctggctaacaacaacctggtgggcgtgcacgaggacgccttcgagaccctggagtcgctgcaggtgctggagctcaacgacaacaacctgcgcagcctcagcgtggccgccctggccgcgctgcccgcgctgcgctccctgcgtctggacgggaacccctggctgtgcgactgtgacttcgcccacctcttctcctggatccaggagaacgcatccaaactgcccaaaggccttgatgaaatccagtgctccctgcccatggagagcaggaggatatccctgcgtgagctgtcggaggccagcttcagcgagtgtaggttcagcctgtcactcacagacctctgcatcatcattttctccggtgtggccgtgtccattgcggccatcatctccagcttcttcctggccactgtggtgcagtgcctccagaggtgcgcacccaacaaagatgcggaggatgaagacgaggacaaggatgactgagccacctcctccctcctgcctcttactctccagcaccgaaccagaagctctctccaagacgagagggaaatgctgaaaatggaaaagcactggccaccatctgtgaactgaacagagcctgttccgtgtcttggcccctgggtacacctgctgggaccactgatctcagagtttagaatcagcagagcacagaagcccaggaaggatggagggaattattcctggagcataacctgcctctcagatcgaggtgtgtgttgggggagaagatgaccgagtcaggcttcatagctgatgactaaaagcctcccccaggaaatgtgaagactggcagctttcaatggcaaagatgattttacgccattctttttctgacctgtactgggagatcatgaaacatctgccttcctcccaagaaacagcagctcaaacagtggagattcaaattcggatcattcaccacaagaacgagaactttgatccttatataataggcctcagcaaccttgggatgttatactgggaactaataaactcgtgtgcaatagactcaatgtttatgttcccccagattttatatgttgaaacctaatccccaatgtgatggtatttggaggtggggcttttgggaggtgattaggtttagatcatatcatgaggatggggcccaaatgatgggattagtgccctcatgaaaggtggccccagagagctccttcaccccttcaatgcttgaggatgcagcaagaaatcagctgcccatgaaccgagaagcaggccctcaccagaacccagccatgctggcacccagatctcagacttccagcctccagaactgggagaaataaataaatgtctgttgtttgtaagccactcaatctctggtattctgttatagtggtcgaaatggacccatgaagaagctaacaactggtcagagggtgtctgttgttaattttggtaagctggttgggaaaactttgacttgacataactcaaaccctgatctttatcctaagcggtagcgacttgtagaggaaggattagttgctttgtacagttgtgatggtctctctgctcagcatcatttttccttctgaaggacagacaggttgttcccctcca

SEQ ID NO: 52 - protein, 384 aa, Homo sapiens
MELLLQPVNGLVTKSQLCLWSREPVPSRQAAPIRPRRAPSPPHARAHALPARAALWLPAPGSQCLTAPSRARARSESRFLLAAAGAGPPAMRPRAPACAAAALGLCSLLLLLAPGHACPAGCACTDPHTVDCRDRGLPSVPDPFPLDVRKLLVAGNRIQRIPEDFFIFYGDLVYLDFRNNSLRSLEEGTFSGSAKLVFLDLSYNNLTQLGAGAFRSAGRLVKLSLANNNLVGVHEDAFETLESLQVLELNDNNLRSLSVAALAALPALRSLRLDGNPWLCDCDFAHLFSWIQENASKLPKGLDEIQCSLPMESRRISLRELSEASFSECRFSLSLTDLCIIIFSGVAVSIAAIISSFFLATVVQCLQRCAPNKDAEDEDEDKDD

SEQ ID NO: 53 - DNA, 1911 bp, Homo sapiens
cagggttctacccggctgggtccaggcagaagtttttcctccccacctccgggtttgtcctcatcatcggtcactcccattcacagctttaagattctggaggccaagaatttgactccccccggatccatggtctgtggataccaatgttccgactggagacggggagcccgcgagacccgggtctccagggtctgcccaaggaagttgctcatgggagcagacctctagagcaggatttgaggccaggccaaagagaaccccagagatgaaaggcctcctcccactggcttggttcctggcttgtagtgtgcctgctgtgcaaggaggcttgctggacctaaaatcaatgatcgagaaggtgacagggaagaacgccctgacaaactacggcttctacggctgttactgcggctggggcggccgaggaacccccaaggatggcaccgattggtgctgttgggcgcatgaccactgctatgggcggctggaggagaagggctgcaacattcgcacacagtcctacaaatacagattcgcgtggggcgtggtcacctgcgagcccgggcccttctgccatgtgaacctctgtgcctgtgaccggaagctcgtctactgcctcaagagaaacctacggagctacaacccacagtaccaatactttcccaacatcctctgctcctaggcctccccagcgagctcctcccagaccaagacttttgttctgtttttctacaacacagagtactgactctgcctggttcctgagagaggctcctaagtcacagacctcagtctttctcgaagcttggcggacccccagggccacactgtaccctccagcgagtcccaggagagtgactctggtcataggacttggtagggtcccagggtccctaggcctccacttctgagggcagcccctctggtgccaagagctctcctccaactcagggttggctgtgtctcttttcttctctgaagacagcgtcctggctccagttggaacactttcctgagatgcacttacttctcagcttctgcgatcagattatcatcaccaccaccctccagagaatttttacgcaagaagagccaaattgactctctaaatctggtgtatgggtattaaataaaattcattctcaaggctaataaaaaccacattggcattttcctctgctgtgggggatcgctggtgcctctttctctgccactggggcaataaacccaaagatgtctacattatctccgaaacagaagggaagattagtaaatgcagggttttctgggatgagcttcaggctttctcttgggctaattttcttacaccttggggtcctctccagtattgggtctcattcttcctcgatggggtcagggaaagataactggtgattatgccagcttcagcttccaggccagagagggtggcattcaaatcccagtgctggcttcttcagctgtgtggtcttggacccgttactgaacctctttgactttcagtctctttgagaaataaactgtcttgttccttgcaatgtaaaatgagacttctaaagcccaccttgatgctgatatggagaatgctgaggttctaggatttcacacagcaggaatttttttttaataggtgtcagctgtggggtttattttttacaaagtaaggacattaaaaaaaccaacccgtctatcaattcataaaagaaaggatgttctgataccaagactgaaagaagaaaggatgtattccaaaacaaaggaacatccttccaagaaaggacctatggcttctttattccgacataccccaaaataactgcatgataaataggtctatatttaaaaagctctagtgtcgaatgttttcaaaataaaatttaattttatgagaaaaaaaaaaaaaaaaaa

SEQ ID NO: 54 - protein, 138 aa, Homo sapiens
MKGLLPLAWFLACSVPAVQGGLLDLKSMIEKVTGKNALTNYGFYGCYCGWGGRGTPKDGTDWCCWAHDHCYGRLEEKGCNIRTQSYKYRFAWGVVTCEPGPFCHVNLCACDRKLVYCLKRNLRSYNPQYQYFPNILCS

SEQ ID NO: 55 - DNA, 2747 bp, Homo sapiens
tgctctgtgctgggatcatggaacttgcactgctgtgtgggctggtggtgatggctggtgtgattccaatccagggcgggatcctgaacctgaacaagatggtcaagcaagtgactgggaaaatgcccatcctctcctactggccctacggctgtcactgcggactaggtggcagaggccaacccaaagatgccacggactggtgctgccagacccatgactgctgctatgaccacctgaagacccaggggtgcagcatctacaaggactattacagatacaacttttcccaggggaacatccactgctctgacaagggaagctggtgtgagcagcagctgtgtgcctgtgacaaggaggtggccttctgcctgaagcgcaacctggacacctaccagaagcgactgcgtttctactggcggccccactgccgggggcagacccctgggtgctagaagcccacaccctctaccctgttcctcagcatggagctctggcatccccacctcagtatctaacctgaaccagcctggcttttcaaacactccggggggaggtagtcccagcctcccccggaaccctctaccaatgccttctgaccttctgaagctttccgaatcctcccagttgaggcagtagctgtgtcctctgagggtggatgggaatcttgggagaagcccaagcaagggagccctcagaggtggtgtttggaccaaagcatcggggtgggggaggggtctgccgctgtcccccacctgctggcccccttgtccttcctcaccccctccaatatagtctcggagctacaaccgcagcagccactataaagggcaatattgatctttctgtccatgtggctctatcttttaaaacctcaaggccctccactgtcctaagataaagcctctcataggcactggggaccctgcacagtctggccatgtgaccctctccccaggcaagctctgaagtccctgcaggtggaggccatgcctgtcttaaactcagttgcatccctggtgcccaaagcaacaccagaaccaagaaggagctccataaatccttcttgggtgaagcctagacaaagccgccaggtcttgtggctccaggcaccagagccttgagtactttctcctgcctccaggcattggctcagggtgaattacaaggggctactgaatggctattactttcatcacgactgatccccacctcctcagggtcaaagggctactttctggaagtctccccaggctgactccttctccctgactgcaagggctcactccctcctccaagctcccacaatgcttcatggctctgccgcttacctagcttggcctagagtggcaaatggaacttctctgatctcccccaactagactggagcccccgaaggatggagaccatgtctgtgccatctctgtttcccctgttttcccacatactaggtgctcaattcatgcctgtgaatggcgtgagcccataatggatacacagaggttgcagcagatggtgtgggtacctcacccagatatcatccaggcccaaggcccctctccctgagtgaggccaggtgttggcagccaactgctccaatctgcctccttcccctaaatactgccctggtctagtgggagctgccttccccctgccccacctctcccaccaagaggccacctgtcactcatggccaggagagtgacaccatggagggtacaattgccagctcccccgtgtctgtgcaggattgtctgggttgaatgacactctcaaattgttcctgggatcgggctgaggccaggcctctcctggaaccacctctctgcttggtctgaccccttggcctatccagttttcctggttccctcacaggtttctccagaaagtactccctcagtaaagcatttgcacaagaatccttgtctcaggctctgcttctaaggaaagagactgaagagggacaactttttcctatgaggactcccaatctgccatttgtgtgtggctagctgtttccagccagggggctgaggcacctgcagtcacccacactctgggcctgtggcaccatctgtgcctcagctgactgagcagttctgagatgtggtgactcatgtgaagtggtgtcataggaatgaaggactgtgggcgctgggttcaaattccagttctatgcaccactccaggtagggatacccatgggggcagctgtgcctgtgtgggggaacagggtagggaaatctccataccttctcaattttgctgtgaacctaaaactgccatataaagataaagtctaggccaggcatggtggctcatgcctgtaatcccaacacttagggtggctgaggcaggcagatcacctggggtcaggagttcaagaccagcctgcccaacatggcaaaacctcgtctctactaaaaatacaaaaattagccaggcatcgtggtgggtgcctgtaatcccagctattcaggaggctgaggcaggagaatcacttggacctgggaggcagaggtttcagtgagcccagatcgcgacactgcactccagcctgggcaacagagtgacactctgtctcaaaaaataaaataaaataaaataaaataaaataaaataaaataaaaaaaaaaaaaaaaaaaaaaaaaaaaaaaaaaaaaaaaaaaaaaaaaaaaaaaaaaaaaaaaaaaaaaaaaaaaaaaaaaaaaaaaaaaaaaaaaaaaaaaaaaaaaaaaaaaaaaaaa

SEQ ID NO: 56 - protein, 145 aa, Homo sapiens
MELALLCGLVVMAGVIPIQGGILNLNKMVKQVTGKMPILSYWPYGCHCGLGGRGQPKDATDWCCQTHDCCYDHLKTQGCSIYKDYYRYNFSQGNIHCSDKGSWCEQQLCACDKEVAFCLKRNLDTYQKRLRFYWRPHCRGQTPGC

SEQ ID NO: 57 - DNA, 2737 bp, Homo sapiens
tgcgaggcagcgtgaagctggggcctgctccccgcagcctctggagcgcatctcagaccttctgagacctatgttgctggccccccagaacccgcaacatggcagatggggcaaaggccaaccccaaagggttcaaaaagaaggtgctggatagatgcttctctgggtggaggggcccacgcttcggggcctcctgtccttcaagaacctccaggtctagcctgggtatgaagaagttcttcaccgtggccatccttgctggcagcgttctgtccacagctcacggcagcctgctcaacctgaaggccatggtggaggccgtcacagggaggagcgccatcctgtccttcgtgggctacggttgctactgtgggctggggggccgtggccagcccaaggatgaggtggactggtgctgccacgcccacgactgctgctaccaggaactctttgaccaaggctgtcacccctatgtggaccactatgatcacaccatcgagaacaacactgagatagtctgcagtgacctcaacaagacagagtgtgacaagcagacatgcatgtgtgacaagaacatggttctgtgcctcatgaaccagacgtaccgagaggagtaccgtggcttcctcaatgtctactgccagggccccacgcccaactgcagcatctatgaaccgccccctgaggaggtcacctgcagtcaccaatccccagcgccccccgcccctccctagagcctctgaggtttgagagagagagcgggaggagggtctggcttggggaccagacgaggtgcagggagggtaggagccaggccaggagcctgagggttgctggttgcctcctccctggagctctccagtgagggctcagctctcagaggactcaggaaggcctgggtcctgactcccccagcccagccccaggcatgggtgcctcctgctgctggttctggactgggtgggaggcacggagcttataggggtctctcctgagggtggccggggagacctgagagagaggaggaggggcctctgagtggggcctctgttgctggcgccagtttaactccccggagccttagaaagtctgagccttagaaagtctgggcctgagcatccaggcccagagctggatgcatcctcggcccaagatcacaggaaggcagattgctggtcacaaagcatgggttccgggagcccctcagctgatcccacaggatggcctggggtggtggctactttgggcttgaagctctctagagccccattcacagagcaggtgccccaccccagccctcactgaggtggccatgagtccaggttcagaccctaggggatgtgcagtgctgagtgtcccagccctgaagtctagcctcagagcaggctcctgggcactgacagagccacacacccaggtacaccccccaggctaatatggggacacacaaaaatatggccttcaacacctacaagtcttctctgtgtcccccatcgacccatgcacatcaccccaaccctgctctgccacaccacgtgggtctgaggagcactcctaccccccggctccgggtccctgacagacactgccctcctggcctgcacctggaatggcagccagaacactggagggggacccacaccctctctccctgggctgtggatgggtgttgcaagtcccatccctcctggcctgcacctggaacagcagccagaacaccggagggggacccacaccctctctccctgggctgtgggcaggcgtcacaagtcccattggtggggaagaggctgagggctgagacccacctcagtgaagagggaaacgtaagcagggagagcatcaaggcgggaggcagcctggaaacttctagaagagggtcaaggtaggaggctacatggaagcttctagaaggcagtaaggaacagggtggtgaaggagaggggagaagatgggagcatggagagacgaggtgagtgacagccaccagcagggacgggcctccaggcaacacagaggagctgggggccagggccttacggggctgggttcctgtgtggggcgtggagctggggctgaagtggaggggacggccctgcggcccccagcactgttgtttctccaggtgcaccttaccttcctccttacctgcccgagcctcaactcagggtcagcagcctccacggagccagccccacctgcccgaaaaccactgaagccaccctccgcccggactcaacagccgccagcaagctcgcctggcagtgcccctggagcaccattgtcgctggggagggagagccgggaagggtggagaaggaggcagaagggacatgtatgaaaaaaggacaggaaacctgaccagaggcggtttccagagccccagccttggagacaaggacactgccacccagcgccacagtcagtctgggaggggcccacgccccccaccccccatgccacactgccgcctcttgctggccatggttctccggcttgggggaacgcaggttcccagctgcgcccctcccccgcgcacacacaccctcccctgtccctcggaaagactaggccagggtctggggatgggattctgctgccaggggtcctgcctgcccccactcaccccagacgcttcggatgctgcagctcctggataatctccacaggactcggcttcctctcctcaaatgaataaaggcctcctacctcaactcccaaaaaaaaaaaaaaaaaa

SEQ ID NO: 58 - protein, 211 aa, Homo sapiens
MADGAKANPKGFKKKVLDRCFSGWRGPRFGASCPSRTSRSSLGMKKFFTVAILAGSVLSTAHGSLLNLKAMVEAVTGRSAILSFVGYGCYCGLGGRGQPKDEVDWCCHAHDCCYQELFDQGCHPYVDHYDHTIENNTEIVCSDLNKTECDKQTCMCDKNMVLCLMNQTYREEYRGFLNVYCQGPTPNCSIYEPPPEEVTCSHQSPAPPAPP

SEQ ID NO: 59 - DNA, 1623 bp, Homo sapiens
gtgcgcggtgctccgtggctgcgctgctggaacccgctggaagagatacaggtttgctctggagcagcagcagctggcggagcaatggagatgcaatcctattatgccaagcttttgggggagctgaatgaacagagaaagagggactttttctgtgactgcagcatcattgtggaagggcggatcttcaaggcccacaggaacattttgtttgctaacagcggctacttccgagccctgctcattcactatatccaggacagcgggcggcatagcaccgcctccttggacattgtcacctctgatgccttctccatcatcttagatttcctctattctgggaagttggatttgtgtggggagaatgtgattgaagtgatgtcggctgccagctacctgcagatgaatgacgtggtgaacttctgcaagacatacattaggtcatccctcgacatttgccgaaagatggagaaggaggctgctgtggctgcagcagtggcggcggcagcggcggcggctgcagcggcggcagcagcggcggctcatcaggttgacagtgaaagccccagttcaggccgggaggggacctcctgtggtaccaagagcttggtctcctctccagccgagggagaaaagagcgtggagtgcctgagagagtccccttgcggtgactgcggagactgccaccccttggaactggtggtgagagacagccttggcggtggctcggctgacagcaacctctctactccacccaaacggatagagcccaaggtggaatttgatgctgatgaagtggaggtggacgttggtgaacagctgcagcagtatgctgccccgctgaacctggcccacgtggaggaggccttgccaagcggccaggcggttgacttggcttacagcaactaccacgtgaagcagttcctggaggcgctcttgcgcaacagcgctgccccgagcaaggatgatgcagaccatcacttttctaggagtttggaaggaagaccagaaggtgcaggagtagccatgagttccatgatggatgtccaggctgactggtatggagaggactcaggtgatgtgctggtggtccccatcaagctccacaagtgtcctttctgcccttacactgccaaacagaagggcatcctcaagcggcacatccgttcacacacaggcgagcggccctacccctgtgagacctgcggcaagaggttcactcgacaagagcacctgcggagccacgcactgagtgtccacagatccaaccgtccaatcatctgcaagggctgcaggagaacattcacgagtcacctgtcccaggggctgcggcgcttcgggctgtgtgacagctgcacctgcgttacagacacacccgatgatgatgatgatttgatgcccatcaaccttagcttggtggaggcttcatctgaaagccaagaaaagagcgacacagacaatgactggccaatctatgtggagtcggagatcgggtctcattatgttgcccaggctagtctggaactcctggccttaagccaacctcctgcctcagcctcccaaagtgctggcattacagacggagtctcactctgttgcccaggccggagtacagtggcatga

SEQ ID NO: 60 - protein, 512 aa, Homo sapiens
MEMQSYYAKLLGELNEQRKRDFFCDCSIIVEGRIFKAHRNILFANSGYFRALLIHYIQDSGRHSTASLDIVTSDAFSIILDFLYSGKLDLCGENVIEVMSAASYLQMNDVVNFCKTYIRSSLDICRKMEKEAAVAAAVAAAAAAAAAAAAAAAHQVDSESPSSGREGTSCGTKSLVSSPAEGEKSVECLRESPCGDCGDCHPLELVVRDSLGGGSADSNLSTPPKRIEPKVEFDADEVEVDVGEQLQQYAAPLNLAHVEEALPSGQAVDLAYSNYHVKQFLEALLRNSAAPSKDDADHHFSRSLEGRPEGAGVAMSSMMDVQADWYGEDSGDVLVVPIKLHKCPFCPYTAKQKGILKRHIRSHTGERPYPCETCGKRFTRQEHLRSHALSVHRSNRPIICKGCRRTFTSHLSQGLRRFGLCDSCTCVTDTPDDDDDLMPINLSLVEASSESQEKSDTDNDWPIYVESEIGSHYVAQASLELLALSQPPASASQSAGITDGVSLCCPGRSTVA

SEQ ID NO: 61 - DNA, 7333 bp, Homo sapiens
agaaatccagcccttctgccctccggaggcgcctttcccaacgtaaagtacaattttaaatttcagctcctgactaaaatcatgatccgcagtcaactgctagagaatctgggcaccccggtgtctctggagcgtgcagcgagtgtgggcaagggcagggggagtgggcgaagctgctggttggtgcctgaaatctgtgcgttgcccctttaattgtgtccccagccctcgggcgtttctgtccaacgcccacgtcagcaaataccttttgtttctctcacgttggggctacttgttttagggcgcaaaggaacggcctcgaaagggggtccttccccagccgagaaccaggaatcttccctcggcccgcgcgcgcgaccggccggtgcgccgcggcccgcggacaatcctccaaacacagactgtttgacttagaatcttcccttttttactccattcaagagcagcattcataaatttccagaatggagatctcctctcatcagtctcacctcctgcagcaactgaacgagcagcgcaggcaagatgtattttgtgactgcagtattctagttgaagggaaggtcttcaaagcacatcgaaatgtattattcgctagtagcggctactttaaaatgcttctttctcagaattcaaaggagacgagtcagccaaccacagctacatttcaggctttctcccctgacacttttacagttatcttggacttcgtatattctggcaaactgtctcttactggtcagaatgtcatagaagtgatgtcggctgctagcttccttcagatgactgatgtcataagtgtatgtaagacttttattaaatcttccttagacattagtgagaaagaaaaagatcgctatttcagtctctcagataaagatgccaattctaatggtgtagaacgttcctctttttatagtggtggctggcaagaaggaagcagttctccacgttctcacctaagcccagagcaaggaacaggtataataagtggaaaatcttggaataagtataattatcatccagcctcccagaagaatactcaacaacccttggccaagcatgaaccaaggaaagagtccattaaaaagaccaaacatttgagattgtcacagccttctgaagttactcattataagtcaagcaaacgagaagtacgaacatctgattcttccagccatgtttcccagtctgaagaacaagcacagattgatgctgaaatggactctactcctgttggctatcagtacggtcaaggatctgatgtcacatccaaaagctttccagatgatctgcctcggatgcgattcaagtgcccgtactgcacacatgtggtgaagcggaaggcagacctaaagcgccaccttcgttgtcatacaggagaaaggccctatccatgtcaagcttgtggaaaaagatttagcaggctagaccatctaagtagccattttcgaacaattcaccaggcatgtaaactcatctgcagaaaatgtaaacgtcatgtgacagatctaacagggcaagtggtacaggagggaaccaggcgctacagactgtgtaatgagtgtcttgcagaatttggcatagacagcctccccattgacttggaagctgaacaacatcttatgtccccatcagatggagataaggattccagatggcacttgagtgaagatgagaatagatcctatgtggagattgtagaagatgggtctggtgatctggtcatccaacaggttgatgatagtgaagaagaagaagaaaaagaaattaagcccaacattaggtagctgtaatgtgaaccaacagagctggcatgtctgcaatttacattgacttcctgtatctctctctttctatggtcggagtctagttaacaaatttatcacactgactttaaagaaatgatctgatataacttgcatgctttctgaacaggccattgtatccattctgaactttgttgccctaaaatgtgttgctgcactggaaagaaagaactagcttgagttggcttgatggatgaacaattatcctcttactttcattacaatcctcttactttattccagagatacctttttcttttaatattggaggatctacttagcaaacttttttcaaagaaaatactttaaataaattcaccacaaccaaactttatgtaagacaatttcaaggtgtttcaaaaacacataactaccaatgtttaatttcacagggaaccagttaagagcacatttaaggatctggcaacccaccttactaaacaaattagtctttctattaatttgagatctgaaacaacctgtcattactctgatatcctgaacgtttaaggattatggaagaagactaaagtgtttgaaatcattcatatttgaaatttttatcattagcttaaaaattactctcagtattgttaaaaaaaaaaaaaagtagaggctggccaaagattatatacagatattttcttaaagcaggaaactaatgttgcctaaaagtcaaggtagtttgtgaagacaatctgtcaatatggttgtccatctctctaaagaaaagcaggctgggcgctgtggctcatgcctataatcccaatactttgggaggccgaggcaggcggatcacaaggtcaggagtttgaaaccagcctggccaacatggtgaaacctcgtctctactaaaaaatacaaaattagccgggcatggtggcgggtgcctataatcccagctactcgggaggctgaggcaggagaatcgattgaacctggaaggcagaagttgcagtgagccgagatcacaccattgcactccagcctgggcaacaagagcgaaactccgtctcaaaaaaaaaaggaaaacaaactaggaggttcttaccatatgtgagtgatttctaacgtttatgtagtgctatattatttataaagtactctctcatgtattttctcagtgaggtggatactatctccgatttacaaatgaggaaattaaggtcagaaagtctgagagagaaaactgatgattggacaggatctgattttaaacaatcctctttcagccttctctccctgtatgtctcctgaaatggcaaagaatagaagtcaaacctcaccagttggcagtcattataaaaataagccaatcagaattagaaagtatgaaaggaggaattgaatcattttcaacaacatacaatatcttgatctagagattttcaaataatgctaagtaatgtccctacagtacctattggtatgtttttatgtcacgttatttatatgtaaatttaaagtataaaactatttgaacaaattattcacttaaatatgttgaacatttttgcttctcttgtttatataatattttcaaaacaaacttttctcctagtatacaaagtttaaacttctcccctttgggctgggcccagtggctcacgcctgtaatcccagcactttgggaggctgaggcaggtggatcaccgaggtcgggagtttgagaccagcctgaccaacatggagaaaccccgtctctactaaaaatacaaaattagccgggcgtggtggtgcatgcctgtaatcccagctactcagaaggctgaggcaggaggatagcttgaacccaggaggcagaggctgcggtgggctgaggttgcgccattgcactccagcctgggcaacaagagcgaaactccgtctcaaaaaaaaaaaaaaaaaaaacttctcccctgcataaattatgaaacattccaaaattacagctaaattagagaagcattgtttcagttctaaaggtaaaatctaaatatccgaagtaaagaactgagcttcataaaggtctcttctgcaagttatcacagtgaagcttgatagaatttcactgtatatggagaggctccatctattttactgttttcttttttgtttttgtttttttttcgagacggagtctcgctctgtcgcccaggctggagtgcagtggtgcaatctcagctcactgcaagctccacctcccgggttctcgccattctcctgcctcagcctcccgagtagctgggacttacaggcgcccaccaccactcccagctaattttttgtatttttaatagagatggggtttcaccgtgttagccaggatggtctcaatctcctgatctcgtgatccgcccccctcggcctcccaaagtgctgggattacaggcgtgagccactgcgcccagccaattttactgtatttttaaatgccatgacatacctcaaaattatcctttttatgttactattttctcttgttctttcattaattattgtccttgataccaatttctaggctaaattggttactttcttttaaaaaatttaaaaatagatgaataaccacttgtttcatggtacttaattgagactttttcaagattcccctgatggcacatttgcagttgcttcaagactggatgatgtgcattgagttctctgttctcccaacatggctgttcctaaatcaggattctggtttttttgagatggactctcgctctgttgtccaagctggagtgcagtggcgtgatctcgctcaccacaacctctgcctcccgggttcaagcgattctcctgcctcagcctcctgagtagccgggactacaggcatgtgccaccatgcctggctaatttttgtatttttagtagagacagggtttcgctatgttggccaggctggtctcgaactcctgacctcgtgatctgcccgcctcagcctcccaaagtgctgggattacaggcgtgagccagcacgcccggcctaaatcaggattcttaacaattaaagtgtatctgaatgaggaaggaaacgcttgtcattctctagtcttacccaattaatactgacaccttttgaaattaaaacctgattttttagttgttggagccagtaggaaaaatggctgatttgaacttttttcctataaatgaagtagtgcttgcatgtgtgtactctaatgcactttagtctatgatctaaatgtccttttatgctattatcttctgcatgcaaactttacatacatcagcatgaatatccaacattcactgaacacagtgccaccagcacttgtaattgccttttcagaaataatgctttctcataattgtttataacgagcatcaaactatccccacaaaatgatcaagttcaccaaactagacaaagaatctgttgtatcattttaacatcatagaagaacatttaagacatgtttgtaagttgtaaataatgactccagttatagcatatatatctaagacgttagagaccagttattttctagagtgaaactgtctattgatgattgagaaaattgaattctttggtttttacatgtgggcaaatgttacataggggtataatctgtttaaataagctttatttatgccaaggattttttttttaatatcaagacttggttagaccaaagtttgctcttgcaggaatgccatttatcagcttctgaatgcccttctaactccattaccctcaagagtgtctgggtataggatgaagcattacaaaaagaaagcaccactgcagtcatgcctagtgtctgggagaaacaaaatggactagacctgcagtttaaaataatttaacccgagaaactcttcaaatgaattgtttcctaaagatgctcaaatttaagggataaactctaaaatcagagctgctgtggttaaagtcccccacaaacctttccccagacacctctgcagaactcaggtgcacaatgttgaaaaccatggaattagacaacttcctgaattccctttgagccttgcagcctcatttcgttactcctgttactcacggtgcttataagcaggtaaccatatggtctcttagtgaagcaaatcacatccttagcacatgatgttccttctatgggtatcagatcttaagactttttaaaatttaggaacaaatgtttcaatattatattttcagtaatgcaatcaaaataagcatagttactgttttctgtacggctaagtactgcctaatggatgaaagaagtttggtgcttcaattatttatgagctcagaactcaattcattaaagttattttgccaagtcatgccaagatatattgaaatttccactcatattggtttttaaaattttttttagtcctaaaattaataagtatggaaaatcactaaaagcagtgtaggataaggtgtgtttaactggccgggcacggtggctcatgcctgtaatcctagcactttgggaggccgaggcgggcggatcacttaaggccaggtgttcgagaccatcctggccaacatggtgaaaccccgtctctagtaaaaatacaaaaaatagctgggcatgatggtgggtgcctgtaatcccaggtactcgggaggctgaggcaggagaatcgcttgaacccgggaggtggaggttgcagtggccgagatcgcaccactgcactccagcctgggtgacagagcgagactccatcaaaaaaaaaaaaaaaaaaaaaaaagatgtgtttaactgggaagggtgataataatagaataataggtacaggaggaccaaactttagattataaaccagaaagttttgttattttatataagtgtatcagtattactatttatcatttatatagcattttatatttgcaaagtgtttaataatttttgttattctttacatatatatgaaataggacagttatcccacatgaacggtaaataaattgaggcacagaacagtaaaaaaacctcagggtcaggcgtggtggctcacacctgtaatcccagcactttgggaggccaaggcgggtggatcactttaggtcaagagttggagaccagcctggggcaatatagtgaaaccccttctctactaaaaatacaaaaattagccaggcatggtggtgggcacctgtaatcccagctactctgggggctgagacaggagaattgcttgaactcaggaggcggaggttgcagtgagccaagatcacgctactgcactccaggctgggtgacagagcgagactccacctcaaaaaaaaaaaaaaaaaaaaaaaaaagaacctaagacaacccagtgaaatggtagcaaaaaataggaaatataatgatcacattttctgaatcctagaccatcagcctaattcactgaggtgtgttgtgtatcactctattttatagatgattttatataagtaacagtggattgttttaaagctgacgtcattgtatgtggatacattctatatggaataaatgttatgtaaagga

SEQ ID NO: 62 - protein, 441 aa, Homo sapiens
MEISSHQSHLLQQLNEQRRQDVFCDCSILVEGKVFKAHRNVLFASSGYFKMLLSQNSKETSQPTTATFQAFSPDTFTVILDFVYSGKLSLTGQNVIEVMSAASFLQMTDVISVCKTFIKSSLDISEKEKDRYFSLSDKDANSNGVERSSFYSGGWQEGSSSPRSHLSPEQGTGIISGKSWNKYNYHPASQKNTQQPLAKHEPRKESIKKTKHLRLSQPSEVTHYKSSKREVRTSDSSSHVSQSEEQAQIDAEMDSTPVGYQYGQGSDVTSKSFPDDLPRMRFKCPYCTHVVKRKADLKRHLRCHTGERPYPCQACGKRFSRLDHLSSHFRTIHQACKLICRKCKRHVTDLTGQVVQEGTRRYRLCNECLAEFGIDSLPIDLEAEQHLMSPSDGDKDSRWHLSEDENRSYVEIVEDGSGDLVIQQVDDSEEEEEKEIKPNIR

SEQ ID NO: 63 - DNA, 717 bp, Homo sapiens
ccgggccgaagtccggtggatgaagggcggaagtagagtgtctaatcctgcagtcatggcgcaggaagaggaagatgttagagattacaatttgactgaagaacagaaggcgatcaaggccaagtatccgccagtcaataggaagtacgagtatttggatcatacagcagatgtccagttacacgcatggggagatactctggaggaagcatttgagcaatgtgcaatggccatgtttggttacatgacagatactgggacagtggagcccctccaaacagtagaagtagaaacccaaggagatgacttacagtctcttctgtttcactttttggatgaatggctttataagttcagtgctgatgaattcttcataccccgggaagtgaaagtacttagcattgatcaaagaaatttcaaattacgatcaattgggtggggagaagaattttcattgtccaagcaccctcagggaacagaagtcaaagcaataacatattcagcaatgcaggtctataatgaagagaacccggaagtttttgtgatcattgacatttaagacaccaaaaaataaaagactcctacgaagaactgtttttgttttcctcttccttttgagaagacactatgaattaaattctacagcttttttttgatatatggaaatttgtagaacagaaatattttagttaaagtgtgactttcagaaagggaaaa

SEQ ID NO: 64 - protein, 179 aa, Homo sapiens
MKGGSRVSNPAVMAQEEEDVRDYNLTEEQKAIKAKYPPVNRKYEYLDHTADVQLHAWGDTLEEAFEQCAMAMFGYMTDTGTVEPLQTVEVETQGDDLQSLLFHFLDEWLYKFSADEFFIPREVKVLSIDQRNFKLRSIGWGEEFSLSKHPQGTEVKAITYSAMQVYNEENPEVFVIIDI

SEQ ID NO: 65 - DNA, 2314 bp, Homo sapiens
cgcgcgcacagagcgagctcttgcagcctccccgcccctcccgcaacgctcgaccccaggattcccccggctcgcctgcccgccatggccgacaaggaagcagccttcgacgacgcagtggaagaacgagtgatcaacgaggaatacaaaatatggaaaaagaacaccccttttctttatgatttggtgatgacccatgctctggagtggcccagcctaactgcccagtggcttccagatgtaaccagaccagaagggaaagatttcagcattcatcgacttgtcctggggacacacacatcggatgaacaaaaccatcttgttatagccagtgtgcagctccctaatgatgatgctcagtttgatgcgtcacactacgacagtgagaaaggagaatttggaggttttggttcagttagtggaaaaattgaaatagaaatcaagatcaaccatgaaggagaagtaaacagggcccgttatatgccccagaacccttgtatcatcgcaacaaagactccttccagtgatgttcttgtctttgactatacaaaacatccttctaaaccagatccttctggagagtgcaacccagacttgcgtctccgtggacatcagaaggaaggctatgggctttcttggaacccaaatctcagtgggcacttacttagtgcttcagatgaccataccatctgcctgtgggacatcagtgccgttccaaaggagggaaaagtggtagatgcgaagaccatctttacagggcatacggcagtagtagaagatgtttcctggcatctactccatgagtctctgtttgggtcagttgctgatgatcagaaacttatgatttgggatactcgttcaaacaatacttccaaaccaagccactcagttgatgctcacactgctgaagtgaactgcctttctttcaatccttatagtgagttcattcttgccacaggatcagctgacaagactgttgccttgtgggatctgagaaatctgaaacttaagttgcattcctttgagtcacataaggatgaaatattccaggttcagtggtcacctcacaatgagactattttagcttccagtggtactgatcgcagactgaatgtctgggatttaagtaaaattggagaggaacaatccccagaagatgcagaagacgggccaccagagttgttgtttattcatggtggtcatactgccaagatatctgatttctcctggaatcccaatgaaccttgggtgatttgttctgtatcagaagacaatatcatgcaagtgtggcaaatggcagagaacatttataatgatgaagaccctgaaggaagcgtggatccagaaggacaagggtcctagatatgtctttacttgttgtgattttagactccccttttttcttctcaaccctgagagtgatttaacactggttttgagacagactttattcagctatccctctatataataggtaccaccgataatgctattagcccaaaccgtgggtttttctaaatattaataggggggcttgattcaacaaagccacagacttaacgttgaaattttcttcaggaattttctagtaacccaggtctaaagtagctacagaaaggggaatattatgtgtgattatttttcttcttatgctatatccccaagtttttcagactcatttaagtaaaggctagagtgagtaaggaatagagccaaatgaggtaggtgtctgagccatgaagtataaatactgaaagatgtcacttttattcaggaaatagggggagttcaagtcgtatagattcctactcgaaaatcttgacacctgactttccaggatgcacattttcatacgtagaccagtttcctcttggtttcttcagttaagtcaaaacaacacgttcctctttccccatatattcatatatttttgctcgttagtgtatttcttgagctgttttcatgttgtttatttcctgtctgtgaaatggtgtttttttttttgttgttggttttttttttttttttttaacttgggaccaccaagttgtaaagatgtatgtttttacctgacagttataccacaggtagactgtcaagttgagaagagtgaatcaataacttgtatttgttttaaaaattaaattaatccttgataagagttgctttttttttttaggagttagtccttgaccactagtttgatgccatctccattttgggtgacctgtttcaccagcaggcctgttactctccatgactaactgtgtaagtgcttaaaatggaataaattgcttttctacataaaaaaaaa

SEQ ID NO: 66 - protein, 425 aa, Homo sapiens
MADKEAAFDDAVEERVINEEYKIWKKNTPFLYDLVMTHALEWPSLTAQWLPDVTRPEGKDFSIHRLVLGTHTSDEQNHLVIASVQLPNDDAQFDASHYDSEKGEFGGFGSVSGKIEIEIKINHEGEVNRARYMPQNPCIIATKTPSSDVLVFDYTKHPSKPDPSGECNPDLRLRGHQKEGYGLSWNPNLSGHLLSASDDHTICLWDISAVPKEGKVVDAKTIFTGHTAVVEDVSWHLLHESLFGSVADDQKLMIWDTRSNNTSKPSHSVDAHTAEVNCLSFNPYSEFILATGSADKTVALWDLRNLKLKLHSFESHKDEIFQVQWSPHNETILASSGTDRRLNVWDLSKIGEEQSPEDAEDGPPELLFIHGGHTAKISDFSWNPNEPWVICSVSEDNIMQVWQMAENIYNDEDPEGSVDPEGQGS

SEQ ID NO: 67 - DNA, 2114 bp, Homo sapiens
gtgctgactacaagggcaacccagctctcagaggaactggcccagctccgggatgcctatcagaagcagaaggagcagctgcggcaacaactagaagcccctccaagccagagggatgggcactttctccaggaaagccggcgactctctgcccagtttgaaaatctcatggcagagagccgccaggacctggaggaggagtatgagcctcagttcctgcggctcctagagaggaaagaagctgggaccaaagctctgcagagaacccaggctgagatccaggaaatgaaggaggctctgagacccctgcaagcagaggcccggcagctccgcctgcaaaacaggaacctggaggaccagatcgcacttgtgaggcaaaaacgagatgaagaggtgcagcagtacagggaacagctggaggaaatggaagaacgccagaggcagttaagaaatggggtgcaactccagcaacagaagaacaaagagatggaacagctaaggctcagtcttgctgaagagctctctacttataaggctatgctactacccaagagcctggaacaggctgatgctcccacttctcaggcaggtggaatggagacacagtctcaaggggctgtttagaaatatatggccaaatctgtaacccggaaacagcaaaaaacttcttagcaaaggatcactaagtaccctttggatgtactcttccaaccagacaagagtgccagaaacttggcaagcaattcatcctgtggaagttgcaaatactggctgacctgcttaaaaagattctagagttggccggaggcagaacatgtcaactctttgctggattctatttcatctgctgttgatactgatctcaatgcaccaaggaaaggaaagatgagcctcctgtcttccagcaacaaccctcacatatgcactgagtaaaggatgaatgtatggacacatctgggagtattttaaagaatgtatcttgccttgtgttgacccaaaccaaaaacatttttgaggggcacatgtggggtcaaaaagatagccaatttccattacatgggtttacaatttccattcttttgtgccacgagtgttagaatttaaatgaatacttttacaaagtctactttttgttcaaggatatgctgacccatatagtttactcttaaaattgtgtcaaggtatttctcactatactctaaaacaactagacttgaaaagaaaccatttgagatttgaatctaatggttaacgctattcagattttcccaaagatcttacctcatgaaagtagttctgggtcagaatgatctactcagttaaaaaacaacaacaacaaaaaactaagcgattgggaaaaaacaggaattttatctggttattgcatctggtgatagaggccttcaaagcctattatttctaacctaagtaaaggccccagtgaaaaacatactggggaaataaaacctctgagaaaaggttcaagcaccttttccaaatttaaatcttgccttaaattctctctaccacactgcctttgacactcttggaagtccatgtagttctctacagacagacttcaaagaaacgttaccttatcaaagactaatctgtgccacctctgattcagtgttttatgtctttcactttccctgggaaggagtaaagttcttttctacagctctgggactattacatttaattctgctcttgatagtcaaagaccatggacaacaactgtcatctgaaggactcttctagaagccagagactggtgtttgatggatgttttatactaaataaaacccatcagcatggggttatgtagaaaagcaatttattccattttaagcacttacacagttagtcatggagagtaacaggcctgctggtgaaacaggtcacccaaaatggagatggcatcaaactagtggtcaaggactaactcctaaaaaaaaaaagcaactcttatcaaggattaatttaatttttaaaacaaatacaagttattgattcactcttcccaacttgacagtctacctgtggtataactgtcaggtaaaaacatacatctttacaacttggtggtcccaagttaaaaaaaaaaaaaaaaa

SEQ ID NO: 68 - protein, 151 aa, Homo sapiens
MAESRQDLEEEYEPQFLRLLERKEAGTKALQRTQAEIQEMKEALRPLQAEARQLRLQNRNLEDQIALVRQKRDEEVQQYREQLEEMEERQRQLRNGVQLQQQKNKEMEQLRLSLAEELSTYKAMLLPKSLEQADAPTSQAGGMETQSQGAV

SEQ ID NO: 69 - DNA, 5422 bp, Homo sapiens
gccgcagggggcctgacccgccgcccgctccgcccccgcctgccatggcggcccgcgcgccccccgccgcacctgcggccgaggagccggggaacccgggcggccccccgcgcaggaagaagtcccgctccggcgcgtccggcctccgccgcgccttcagctggctgcggggcaagcggcgcaagaagaaggcggcgggggccgagggcgccgaaccggccgccccccgggccaagaaggcggaggacaaggccaagagggccaagggcaaaggccgaggctctgccaaggctgagaatgacaaacatctaagtgtagggcctggccaggggccagggtctgcagtggatgagcaccaggacaacgtcttctttcccagtgggcgacccccccacctggaagagctgcacactcaggcccaggaggggctccgctccctacaacaccaagagaaacagaaactgaacaagggtggctgggaccatggagacacccagagtatccagtcctcccggacggggccggatgaagacaacatctccttctgcagtcagaccacatcctacgtggctgagagctccacagcagaggacgcgctctccatccgctcggagatgatccagcgcaaaggctccaccttccgaccccatgactcatttcccaaatctggaaagtcagggcggcgtcggcgggagcggcggagcactgtgctgggactcccgcagcatgtgcagaaggagcttggcctgaggaatgagcgtgaggcaccaggcacgccccgggctcctggtgcacgggatgccgtacgcatccccacagtggacggccgcccccgaggcacctcagggatgggggcccgggtgtccctgcaggcgctggaggcggaggcggaggctggcgctgagacagaggccatgctgcagcgccacattgaccgtgtctaccgggatgacacctttgttggccggtccacgggtacccgggccccaccattgacccggcccatgtccctagcagtgcctggattgacaggaggggcagggcctgcagagcccctgagcccggccatgtccatctccccccaggccacctacctgtcgaagttgattccacatgctgtgctgccgcctacagtggacgtggtggccctaggccgctgcagcctgcgcacactaagccgctgcagcctgcactcggccagcccagcctcagtccgctcgctggggcgcttctcctccgtctccagcccacagccccgcagccgccacccatcctcctccagtgacacctggagccactctcaatcctccgacaccattgtgtctgacggttccaccctctcctctaagggtggctctgagggccagccggagagctctacggctagcaatagcgtggtaccccctccccagggaggcagtgggaggggctctcccagtgggggcagcactgctgaggcctcagacacactcagcattcggagcagtgggcagttgtctggccggagtgtgtccctgcgtaagctgaagcggcctccaccccctccccgccggacccactccctccatcagcggggcttagcagtgcctgatgggccattagggttgccccctaagcctgagcgtaagcagcagccccagctgcctcggccacccaccactggtggctcagaaggggcgggggcagcaccctgtccacccaacccagccaacagctgggtacctggcttgtctccgggtggttcccggcgccccccacggtccccagaacggacactttcgccctccagtggatactcgagccaaagtggtactcccaccctccctcccaagggcctggcaggtccccctgcttccccaggcaaggcccagccccctaaaccagagcgtgtcacgtctcttcgctcccctggggcctccgtctcctcttccctcacgtctttatgttcctcctcctctgacccagccccctcagaccgctctgggccacagatattgacccccctgggtgacaggtttgtcatacctcctcaccccaaggtgcctgcccccttctccccacctccctccaagcccaggagccctaacccagctgcccctgctctagccgcccctgctgtggttcctgggcctgtttctaccactgacgccagtcctcagtcccctcccactccccagacaaccttgactccactgcaggagtctcctgtcatctccaaagaccagtcacccccaccttccccacccccatcttatcatccacccccaccacccactaagaagccagaggtggttgtggaggcaccatctgcctcagagactgctgaggagcccctccaagatcccaactggccccctcccccaccccctgcccctgaggagcaggacctgtccatggctgacttccccccaccagaggaggcttttttctctgtggccagccctgagcctgcaggcccttcaggctccccagagcttgtcagctccccggctgcttcgtcctcctcagctactgctttgcagattcagcccccgggtagcccagaccctcctccagctccgccagccccagctcctgctagttccgccccagggcatgtggccaagctccctcagaaggaaccggtgggctgtagcaagggtggtgggcctcccagggaggacgtaggtgcgcccctggtcacgccctcgctcctgcagatggtgcggctgcgctccgtgggtgctccaggaggggctcccaccccagcactggggccatcggccccccagaaaccactgcgaagggccctgtcagggcgggccagcccagtgcctgccccctcctcagggctccatgctgcggtccgactcaaggcctgcagcctggccgccagtgaaggcctctcaagtgctcagcccaacggaccgcctgaggcagagccacggcctccccagtcccctgcctcaacggccagtttcatcttctccaagggctctaggaagctgcagctggagcggcccgtgtcccctgagacccaggctgacctccagcggaatctggtggcagaactccggagcatctcagagcagcggccaccccaggccccaaagaagtcacctaaggctcccccacctgtggcccgcaagccgtctgtgggagtccccccacccgcctcccccagttaccctcgagctgagccccttactgctcctcccaccaatgggctccctcacacccaggacaggactaagagggagctggcggagaatggaggtgtcctgcagctggtgggcccagaggagaagatgggcctcccgggctcagactcacagaaagagctggcctgaccaccaggcacctcactggcactgctgacccatcccagaaacacaatctcagggacccgagcagctccaaggacgagaggatacagcagacacaacctaatagagagggcgcctgcagccttaacctccacggccttcgatacttatgcaagcctggtgttgctcctgtcctcagagtcatcctgcgctcatgccttttcccgaatgggttcacctctggcagttgccgcttcagtcttggccttagcctcatcttgaagtgggtagctggcgggagagggtggctgcgccccctgctggccctgaggctgcagagttgggagcaggacacctcacctgagtttcattttttttcatgtccaaaccatgcacatactatagtccagaatcaaagcacttttgaaaagtggctgcatggccatcctccagggcccaggaagttgcattccaagggcctgtttacatggcagcagaatccatccccggcagtcagcccatagcttgggaccagtctgtgccctcctgcccagtccagtttactcctcttggttcctgaaggtggccaagtcattgtgttcccacaggcttctctaggctgggggcaggtgtggggctgtggaattccaaagcacaaaaggtgcagaggggattggccttcctgtgcctcaactcaccaaccaccctcctgccttccagttctgccaggtgctccatgctggggacaagtaggagactgccagggcccaaagaaatgggtgagcagtagagtcatctcggggcacttggcagtgtcaagcacctgccccttgcctccttgaccacactggggtgggtgggcccccagcacttcagaggcaggagcctttgggctgagcaagcactgaggaggtggatggaagggagcatctggagggggggagcttccttgagcagtgggcccaggcctggccctccacacttcattctctgacctttctctctcctcatttcggtgcatgtcctttctgcagctgcctttcagcacaggtggttccactgggggcagctaacgctgagtgacaaggatgggaagccacaggtgcattttactcaagtcttctctagtcaatgaggggcacccagtgcttctagggcaggctgggtggtggtcccctaggtatcagcctctcttactgtactctccgggaatgttaacctttctattttcagcctgtgccacctgtctaggcaagctggcttccccattggcccctgtgggtccacagcagcgtggctgccccccagggccaccgcttctttcttgatcctctttccttaacagtgacttgggcttgagtctggcaaggaaccttgcttttagcttcaccaccaaggagagaggttgacatgacctccccgccccctcaccaaggctgggaacagaggggatgtggtgagagccaggttcctctggccctctccagggtgttttccactagtcactactgtcttctccttgtagctaatcaatcaatattcttcccttgcctgtgggcagtggagagtgctgctgggtgtacgctgcacctgcccactgagttggggaaagaggataatcagtgagcactgttctgctcagagctcctgatctaccccaccccctaggatccaggactgggtcaaagctgcatgaaaccaggccctggcagcaacctgggaatggctggaggtgggagagaacctgacttctctttccctctccctcctccaacattactggaactctatcctgttaggatcttctgagcttgtttccctgctgggtgggacagaggacaaaggagaagggagggtctagaagaggcagcccttctttgtcctctggggtaaatgagcttgacctagagtaaatggagagaccaaaagcctctgatttttaatttccataaaatgttagaagtatatatatacatatatatatttctttaaatttttgagtctttgatatgtctaaaaatccattccctctgccctgaagcctgagtgagacacatgaagaaaactgtgtttcatttaaagatgttaattaaatgattgaaacttgaaaaaaaaaa

SEQ ID NO: 70 - protein, 1094 aa, Homo sapiens
MAARAPPAAPAAEEPGNPGGPPRRKKSRSGASGLRRAFSWLRGKRRKKKAAGAEGAEPAAPRAKKAEDKAKRAKGKGRGSAKAENDKHLSVGPGQGPGSAVDEHQDNVFFPSGRPPHLEELHTQAQEGLRSLQHQEKQKLNKGGWDHGDTQSIQSSRTGPDEDNISFCSQTTSYVAESSTAEDALSIRSEMIQRKGSTFRPHDSFPKSGKSGRRRRERRSTVLGLPQHVQKELGLRNEREAPGTPRAPGARDAVRIPTVDGRPRGTSGMGARVSLQALEAEAEAGAETEAMLQRHIDRVYRDDTFVGRSTGTRAPPLTRPMSLAVPGLTGGAGPAEPLSPAMSISPQATYLSKLIPHAVLPPTVDVVALGRCSLRTLSRCSLHSASPASVRSLGRFSSVSSPQPRSRHPSSSSDTWSHSQSSDTIVSDGSTLSSKGGSEGQPESSTASNSVVPPPQGGSGRGSPSGGSTAEASDTLSIRSSGQLSGRSVSLRKLKRPPPPPRRTHSLHQRGLAVPDGPLGLPPKPERKQQPQLPRPPTTGGSEGAGAAPCPPNPANSWVPGLSPGGSRRPPRSPERTLSPSSGYSSQSGTPTLPPKGLAGPPASPGKAQPPKPERVTSLRSPGASVSSSLTSLCSSSSDPAPSDRSGPQILTPLGDRFVIPPHPKVPAPFSPPPSKPRSPNPAAPALAAPAVVPGPVSTTDASPQSPPTPQTTLTPLQESPVISKDQSPPPSPPPSYHPPPPPTKKPEVVVEAPSASETAEEPLQDPNWPPPPPPAPEEQDLSMADFPPPEEAFFSVASPEPAGPSGSPELVSSPAASSSSATALQIQPPGSPDPPPAPPAPAPASSAPGHVAKLPQKEPVGCSKGGGPPREDVGAPLVTPSLLQMVRLRSVGAPGGAPTPALGPSAPQKPLRRALSGRASPVPAPSSGLHAAVRLKACSLAASEGLSSAQPNGPPEAEPRPPQSPASTASFIFSKGSRKLQLERPVSPETQADLQRNLVAELRSISEQRPPQAPKKSPKAPPPVARKPSVGVPPPASPSYPRAEPLTAPPTNGLPHTQDRTKRELAENGGVLQLVGPEEKMGLPGSDSQKELA

SEQ ID NO: 71 - DNA, 3117 bp, Homo sapiens
gcaacagcctcccgccgagccggccgggacagaggcggcccccacccccactgggcaggggactgcagacggcgctccccgactctcaagacgaccagggagcttcccttttcctcagcggggtgaggggcatctgtcgcccgccgacttggaggtggaggggcagggacattccctcgccatcacctcaggagctagaacgcgcccttctcgcagcagggcgtgggcctcccaatccctccaaggggcggacggcgtgcgcaaccccctggagaagcaacaggcgcccccatccccctccaagccgggtaacgccgaccccctcgtccctcccgctcttcacctccggaagccgggccaaagcctgggcgaacgactgcgcctcactccgccccctgcgccattttatcgccccctccccgacctcccctaccccgagtcagccgggccaacaccagggggagggcaaaccagcagtgattggcaggaaaccgtcccgcctctaggagggttgtgccccgctcaggcgcctcagccccgccctccgcaccgcccaccgtgcccactggctccaccttttcccgtctcatcgacctgctcgactctctgctgctcctcactttttccggccgctgccggaggggtccaggccgagtaagcggagcgccgagcccagctgatgcaacctggctggactcgcgtgacagttcccggcacgcggcggcgacggtgacccaggaaggggctctggtgccgggctgagcgggggaagcaggggtagcggagccatgggggacgctcccagccctgaagagaaactgcaccttatcacccggaacctgcaggaggttctgggggaagagaagctgaaggagatactgaaggagcgggaacttaaaatttactggggaacggcaaccacgggcaaaccacatgtggcttactttgtgcccatgtcaaagattgcagacttcttaaaggcagggtgtgaggtaacaattctgtttgcggacctccacgcatacctggataacatgaaagccccatgggaacttctagaactccgagtcagttactatgagaatgtgatcaaagcaatgctggagagcattggtgtgcccttggagaagctcaagttcatcaaaggcactgattaccagctcagcaaagagtacacactagatgtgtacagactctcctccgtggtcacacagcacgattccaagaaggctggagctgaggtggtaaagcaggtggagcaccctttgctgagtggcctcttataccccggactgcaggctttggatgaagagtatttaaaagtagatgcccaatttggaggcattgatcagagaaagattttcacctttgcagagaagtacctccctgcacttggctattcaaaacgggtccatctgatgaatcctatggttccaggattaacaggcagcaaaatgagctcttcagaagaggagtccaagattgatctccttgatcggaaggaggatgtgaagaaaaaactgaagaaggccttctgtgagccaggaaatgtggagaacaatggggttctgtccttcatcaagcatgtcctttttccccttaagtccgagtttgtgatcctacgagatgagaaatggggtggaaacaaaacctacacagcttacgtggacctggaaaaggactttgctgctgaggttgtacatcctggagacctgaagaattctgttgaagtcgcactgaacaagttgctggatccaatccgggaaaagtttaatacccctgccctgaaaaaactggccagcgctgcctacccagatccctcaaagcagaagccaatggccaaaggccctgccaagaattcagaaccagaggaggtcatcccatcccggctggatatccgtgtggggaaaatcatcactgtggagaagcacccagatgcagacagcctgtatgtagagaagattgacgtgggggaagctgaaccacggactgtggtgagcggcctggtacagttcgtgcccaaggaggaactgcaggacaggctggtagtggtgctgtgcaacctgaaaccccagaagatgagaggagtcgagtcccaaggcatgcttctgtgtgcttctatagaagggataaaccgccaggttgaacctctggaccctccggcaggctctgctcctggtgagcacgtgtttgtgaagggctatgaaaagggccaaccagatgaggagctcaagcccaagaagaaagtcttcgagaagttgcaggctgacttcaaaatttctgaggagtgcatcgcacagtggaagcaaaccaacttcatgaccaagctgggctccatttcctgtaaatcgctgaaaggggggaacattagctagccagcccagcatcttccccccttcttccaccactgagtcatctgctgtctcttcagtctgctccatccatcacccatttacccatctctcaggacacggaagcagcgggtttggactctttattcggtgcagaactcggcaaggggcagcttaccctccccagaacccaggatcatcctgtctggctgcagtgagagaccaacccctaacaagggctgggccacagcagggagtccagccctaccttcttcccttggcagctggagaaatctggtttcaatataactcatttaaaaatttatgccacagtccttataattggaaaaatactggtgcccaggttttcttggagttatccaagcagctgcgcccctagctgggatctggtacctggactaggctaattacagcttctccccaacaggaaactgtgggatttgaaaaggaaagggaagggaaaacagagaacctagtggtctaccaagtggttggcaactttcccaatgtctgcttactctgaggcttggcactgggggccagggcctgccccagggctcctggaatttcccttgatccagctaggctgggacactccctaaatcagctgcgtgttgttagcatcaggcagaatgaatggcagagagtgattctgtcttcatagagggtggggtacttctccataaggcatctcagtcaaatccccatcactgtcataaattcaaataaaatgtctgaacaaggg

SEQ ID NO: 72 - protein, 528 aa, Homo sapiens
MGDAPSPEEKLHLITRNLQEVLGEEKLKEILKERELKIYWGTATTGKPHVAYFVPMSKIADFLKAGCEVTILFADLHAYLDNMKAPWELLELRVSYYENVIKAMLESIGVPLEKLKFIKGTDYQLSKEYTLDVYRLSSVVTQHDSKKAGAEVVKQVEHPLLSGLLYPGLQALDEEYLKVDAQFGGIDQRKIFTFAEKYLPALGYSKRVHLMNPMVPGLTGSKMSSSEEESKIDLLDRKEDVKKKLKKAFCEPGNVENNGVLSFIKHVLFPLKSEFVILRDEKWGGNKTYTAYVDLEKDFAAEVVHPGDLKNSVEVALNKLLDPIREKFNTPALKKLASAAYPDPSKQKPMAKGPAKNSEPEEVIPSRLDIRVGKIITVEKHPDADSLYVEKIDVGEAEPRTVVSGLVQFVPKEELQDRLVVVLCNLKPQKMRGVESQGMLLCASIEGINRQVEPLDPPAGSAPGEHVFVKGYEKGQPDEELKPKKKVFEKLQADFKISEECIAQWKQTNFMTKLGSISCKSLKGGNIS

SEQ ID NO: 73 - DNA, 1483 bp, Homo sapiens
ctggtgttggcccggctgactcggggtaggggaggtcggggagggggcgataaaatggcgcagggggcggagtgaggcgcagtcgttcgcccaggctttggcccggcttccggaggaaggtgggagtcaatcattttgacaagtctcctgaaaggaacagctagcaggaactgaaacctttttccatttggtctcgtggcaaaggcagagattgctccagcagctccacacaaaatgatgtgctcacgggtgccctctgaacagtcttctggtacctctctcttgcctaaagacggtgccccattttcttgggattccttggatgaggatggattggatgactccttgctggagctgtcagagggagaagaagatgatggtgatgtaaattacacagaggaagagattgatgcactgttgaaggaagatgacccatcatatgagcagtcttctggggaagatgatggtgggcatgttgagaagggagaaagagggagtcaaattctacttgatactccccgagagaaaaattcatcgtacagcctgggaccagtagctgagactcctgacctcttcaaactacctcagctaagtacatcaagtggtcatggaccagctcatactaaaccattaaacagacgctctgtactagaaaagaatcttataaaagtaactgttgcaccatttaatccaacagtttgtgatgctctgcttgataaggacgagactgattcgtccaaagatactgaaaaactctcttcccttggagaagagatgagagaagatggtcttagcccaaatgaaagcaaactttgtactgaatctgaagggatcagccccaataactctgcctggaatgggccccagctctcttcttcaaacaataactttcaacagactgtctctgataaaaatatgcctgacagtgagaaccctacgtctgtattctctcggatctcagaccattcagagactcctaatatggagttatcctgcagaaatggtggttcacacaagtcaagttgtgaaatgagatctctggttgtttccacctcatcaaacaaagatgttcttaacaaggattctgggaagatgaaaggccatgagagaagactaggcaaagtcattcctgttctacaaactaagaccaggactaatgttccgacgttttcacagtcaaatctagaacagcagaagcagctttatctcaggagtgtcattgctcatatagaagacccagaggacactaaccaaggatgaatccctagaagtggaattgctgggcgcagtggctcatgcctgtaatcccagcactttgggaggctgaggcagatggatcatctgaggtcaggagttcaagaccagcctgactaacatgatgaaacctgtctctactaaaaatataaaaattagctgggcgtggtggtgggcgcctgtaatcccagctactcgggaggctgaggcaggagaatctcttgaaccc

SEQ ID NO: 74 - protein, 341 aa, Homo sapiens
MMCSRVPSEQSSGTSLLPKDGAPFSWDSLDEDGLDDSLLELSEGEEDDGDVNYTEEEIDALLKEDDPSYEQSSGEDDGGHVEKGERGSQILLDTPREKNSSYSLGPVAETPDLFKLPQLSTSSGHGPAHTKPLNRRSVLEKNLIKVTVAPFNPTVCDALLDKDETDSSKDTEKLSSLGEEMREDGLSPNESKLCTESEGISPNNSAWNGPQLSSSNNNFQQTVSDKNMPDSENPTSVFSRISDHSETPNMELSCRNGGSHKSSCEMRSLVVSTSSNKDVLNKDSGKMKGHERRLGKVIPVLQTKTRTNVPTFSQSNLEQQKQLYLRSVIAHIEDPEDTNQG

SEQ ID NO: 75 - DNA, 4317 bp, Homo sapiens
ctggtgttggcccggctgactcggggtaggggaggtcggggagggggcgataaaatggcgcagggggcggagtgaggcgcagtcgttcgcccaggctttggcccggcttccggaggaaggtgggagtcaatcattttgacaagtctcctgaaaggaacagctagcaggaactgaaacctttttccatttggtctcgtggcaaaggcagagattgctccagcagctccacacaaaatgatgtgctcacgggtgccctctgaacagtcttctggtacctctctcttgcctaaagacggtgccccattttcttgggattccttggatgaggatggattggatgactccttgctggagctgtcagagggagaagaagatgatggtgatgtaaattacacagaggaagagattgatgcactgttgaaggaagatgacccatcatatgagcagtcttctggggaagatgatggtgggcatgttgagaagggagaaagagggagtcaaattctacttgatactccccgagagaaaaattcatcgtacagcctgggaccagtagctgagactcctgacctcttcaaactacctcagctaagtacatcaagtggtcatggaccagctcatactaaaccattaaacagacgctctgtactagaaaagaatcttataaaagtaactgttgcaccatttaatccaacagtttgtgatgctctgcttgataaggacgagactgattcgtccaaagatactgaaaaactctcttcccttggagaagagatgagagaagatggtcttagcccaaatgaaagcaaactttgtactgaatctgaagggatcagccccaataactctgcctggaatgggccccagctctcttcttcaaacaataactttcaacagactgtctctgataaaaatatgcctgacagtgagaaccctacgtctgtattctctcggatctcagaccattcagagactcctaatatggagttatcctgcagaaatggtggttcacacaagtcaagttgtgaaatgagatctctggttgtttccacctcatcaaacaaacaggatgttcttaacaaggattctgggaagatgaaaggccatgagagaagactaggcaaagtcattcctgttctacaaactaagaccaggactaatgttccgacgttttcacagtcaaatctagaacagcagaagcagctttatctcaggagtgtcattgctcatatagaagacccagaggacactaaccaaggtatctcgggggagctttgtgccttgatggatcaagttcatcatatgcagcactcaaaatggcagcatccttcggacctcaccacgcgaaactacgcccgccgacagaaacatctgcaaagatacagtctgactcagtgggttgacaggaacatgcgaagccaccatcggttccagcgtctcccagacttctcgtacagttaatttgtgtcatcccatcagcaatgaaggtccctatccagggtcctgcttggagcagcatttcatgttcttttgctgttttgtgctttgccgattttggattttatttttcacaaaatttttatttaaaaaactcgtcaccttttggaaatgcccattgccgacttgaatttttttgtatgaagtccctcctgattttgtgtgtgtgtgtctgtgtttaagcaagcgttcggttggtatagtttttttttgtttttttaatttaaattgaaggtagctgcctcctgaaagccagcattaagccagaacacccaggttcaagcaaaagacccacctctctgcagaggcaaagtctactttctggtacctcaaagaaatcattgttcaatcttccataaggaagagattctttaccaggctgtgagccagtgttagataacttgtgaatggatataagttacttttaacaacccctcttacttttttatttgaatcctctgaatacctgtcagtattttaaagttggcaatccaggacattataagtaggatggagcaggagaagaatcctattgaaaggacaaattaaaatagtaaatcctctcctctcccttctgtaggtactagctgccttgatttttttttgtgggtgggggggattttttcattccttattgaacttattttgcacaatagtgtttacaaatcttatacatcttactttgacagaagacttataataccttgtggtcttgagactggttgtctcctttgcctttcttcaaggattttcctttttctttttaccccccagtgaccactctgctctttaggattctagtggcagtattcttgtaacctgttagacgtggatatacctcttcaggatggcctccttgctgtctttattgaagagctgcccacccagagtcttgactctagggcaggctagtgctattgtggtgtcagttgatatttagtttcatttgctgaaccccaaatttgagtgttagttagggagcctccattctgtgggagagtgtggaaaggcactcttttttctccatattagttaacaagaggtgtctttaggccctggatgttaccatctcatttggtcaagcccctgatacctagtttcacatggatgctaacgtggatgtaatatagttgtgacagcctatgcacaaaagcattacctgatcttaaggtttggtattctaaccaaagttgacagactgtgcgtctgtcttaatggatgtcttaggagttggttattctctcttttttttttgagacggagtttcgctgttgttgcccaggctggagtgcaatggcgtatctccactcaccacaacctccgcctcctgggttcaagggattctcctgtcttagcctcctgagtagctgtgattacaggcatgcgccaccatgcctggctaatttcatattttttagtagagacaggatttctccatgttggtcaggctggtcttgaactcctgacctcaggtgatctgcccacctcggcctcctaaagtgctgggattacaggcatgagccactgcacctggccggttattctctctttacagatagctatagacatcattttaggaagtgttgcagtctggcatttgtgctattgttcattctctgtgaaggctgttcatagttgctatagcctgtgtttagttttgtgatttcatcaatcccatctttctgtgtgagtaatgcattctaaacatcctaccccactttagaaacggacgtggggaacgcttggtcatttaagccaacaataaatttaggtgaatgtccctaagtgtttactgtttttatccagtcaaggatttgcttttccttgaacatttgttttaaattctggggccaaaatgcaaaggagaagttctattcaaaggcagtagttgaaatctattattttagttagcctacttggcatttactacatcggtcacttctccaggctgccctaaattaggttgatggagtgagacatgccaaacatccacctttgggaccatagcatagttaaaattaaatgtagttggaatagctagcattgcagctacagtagggaactgtagtctagttccctacagaaaacccaaggagtgaagggacaggattttgcctaggcaaaaatctaagactcgtgccctcctggtacatggggttttaagactgaatgtgtaataggagcactgcctttgccaaatcaaatgagtgacaggttaactagaaaatgtgacaatcacatttcctcttagctcaaataattctgtttttccaaagctttagcagcttaattaaatctgttggactgggggaggagagagctgttctctagtggttaacatggtattctttaagaagaaaaaacaaagccaaagaaaactcattatctggcatgttcgccttaaagatggtactgggtagaatctggagttttcatctcttttcaaagctgcatatctcttatatttggtattggcctctaagtctaatattgcagttggaattcttgctgtattattttttaagcaagtgttaggtgcatttaactgctttcttcatccatgacgacattcccaccatgggggtcttgacaaagcagagtaaaaatatgctgtttacattgtttacttacaagtaaggagcctgaaataacctgtagtttcgaatgcaggccctgatttactggcgttgtcagtttcaattatgaaactgaagtttggtgcctcctctttatcatgttttttcccttgtagcagttgtgtttaatgtcattaaaaagaaataaaagttctttgtcagtgaaaaaaaaaaaaaaaaaaaa

SEQ ID NO: 76 - protein, 408 aa, Homo sapiens
MMCSRVPSEQSSGTSLLPKDGAPFSWDSLDEDGLDDSLLELSEGEEDDGDVNYTEEEIDALLKEDDPSYEQSSGEDDGGHVEKGERGSQILLDTPREKNSSYSLGPVAETPDLFKLPQLSTSSGHGPAHTKPLNRRSVLEKNLIKVTVAPFNPTVCDALLDKDETDSSKDTEKLSSLGEEMREDGLSPNESKLCTESEGISPNNSAWNGPQLSSSNNNFQQTVSDKNMPDSENPTSVFSRISDHSETPNMELSCRNGGSHKSSCEMRSLVVSTSSNKQDVLNKDSGKMKGHERRLGKVIPVLQTKTRTNVPTFSQSNLEQQKQLYLRSVIAHIEDPEDTNQGISGELCALMDQVHHMQHSKWQHPSDLTTRNYARRQKHLQRYSLTQWVDRNMRSHHRFQRLPDFSYS

SEQ ID NO: 77 - DNA, 13108 bp, Homo sapiens
tcctgggatggggtaggaggctattgtgaatgaggctcataagcatcgcccccggccctagatggcaagttcaaagccaccacccaagatcagctggccagaactgcacgttccaactgcacggtcccaatgggacagttgagagcccagggttcccatatggctaccccaattacgccaactgcacgtggaccatcaccgcggaagagcagcacagaatccagcttgtgttccagtcctttgccctggaagaggactttgatgtcctgtcggtgtttgatggtccaccccagccagagaatctgcgtacgaggctcacaggctttcagctgccagccaccattgttagtgcagccaccaccctctctctgcgcctcatcagcgactatgcagtcagtgcccaaggcttccacgccacctatgaagttctccccagccacacatgtgggaacccagggaggctgcccaatggcatccagcagggttcaaccttcaacctcggtgacaaggtccgctacagctgcaaccttggcttcttcctggagggccacgccgtgctcacctgccacgctggctctgagaacagcgccacgtgggacttccccctgccttcctgcagagctgatgatgcctgtggtgggaccctgcggggccagagtggcatcatctccagcccccacttcccctcggagtaccataacaatgccgactgcacatggaccatcctggctgagctgggggacaccatcgccctggtgtttattgacttccagctggaggatggttacgactttctggaagtcactgggacagaaggctcctccctctggttcaccggagccagcctcccagcccccgttatcagcagcaagaactggctgcgactgcacttcacatcggatggcaaccaccggcagcgcggattcagtgcccaataccaagtcaagaagcaaattgagttgaagtctcgaggtgtgaagctgatgcccagcaaagacaacagccagaagacgtctgtgttaactcaggttggtgtgtcccaaggacataatatgtgtccagaccctggcatacccgaaaggggcaaaagactaggctcggatttcaggttaggatccagcgtccagttcacctgcaacgagggctatgacctgcaagggtccaagcggatcacctgtatgaaagtgagcgacatgtttgcggcctggagcgaccacaggccagtctgccgagcccgcatgtgtgatgcccaccttcgaggcccctcgggcatcatcacctcccccaatttccccattcagtatgacaacaatgcacactgtgtgtggatcatcacagcactcaacccctccaaggtgatcaagctcgcctttgaggagtttgatttggagaggggctatgacaccctgacggtcggtgatggtggtcaggatggggaccagaagacagttctctacatcctgacaggtacatcggtcccggatctcattgtcagcaccaatcatcaaatgtggctcctcttccagactgatggcagtggcagttccctgggattcaaggcttcttatgaagagatcgagcagggcagttgcggtgaccctggcatacctgcatatggccggagggaaggctcccggtttcaccacggtgacacactcaagtttgagtgccagcccgcctttgagctggtgggacagaaggcaatcacatgccaaaagaataaccaatggtcggctaagaagccaggctgcgtgttctcctgcttcttcaacttcaccagcccgtctggggttgtcctgtctcccaactacccagaggactatggcaaccacctccactgtgtctggctcatcctggccaggcctgagagccgcatccacctggccttcaacgacattgacgtggagcctcagtttgatttcctggtcatcaaggatggggccaccgccgaggcgcccgtcctgggcaccttctcaggaaaccagcttccctcctccatcacaagcagtggccacgtggcccgtctcgagttccagactgaccactccacagggaagaggggcttcaacatcacttttaccaccttccgacacaacgagtgcccggatcctggcgttccagtaaatggcaaacggtttggggacagcctccagctgggcagctccatctccttcctctgtgatgaaggcttccttgggactcagggctcagagaccatcacctgcgtcctgaaggagggcagcgtggtctggaacagcgctgtgctgcggtgtgaagctccctgtggtggtcacctgacttcgcccagcggcaccatcctctctccgggctggcctggcttctacaaggatgccttgagctgtgcctgggtgattgaggcccagccaggctaccccatcaaaatcaccttcgacagattcaaaaccgaggtcaactatgacaccctggaagtacgcgatgggcggacttactcagcgcccttgatcggggtttaccacgggacccaggttccccagttcctcatcagcaccagcaactacctctacctcctcttctctaccgacaagagtcactcggacatcggcttccagctccgctatgagactataacactgcagtcagaccactgtctggatccaggaatcccagtaaatggacagcgtcatgggaatgacttctacgtgggcgcgctggtgaccttcagctgtgactcgggctacacattaagtgacggggagcctctggagtgtgagcccaacttccagtggagccgggccctgcccagttgtgaagctctctgtggtggcttcattcaaggctccagtgggaccatcttgtcgccagggttccctgacttctaccccaacaacttgaactgcacctggattatcgaaacatctcatggcaagggtgtgttcttcactttccacaccttccacctggaaagtggccatgactacctcctcatcactgagaacggcagcttcacccagcccctgaggcagctaactggatctcggctgccagctcccatcagcgctgggctctatggcaacttcactgcccaggtccgcttcatctctgatttctccatgtcatatgaaggattcaacatcaccttctcagagtacgacttggagccctgtgaggagcccgaggtcccagcctacagcatccggaagggcttgcagtttggcgtgggcgacaccttgaccttctcctgcttccccgggtaccgtctggagggcaccgcccgcatcacgtgcctggggggcagacggcgcctgtggagctcgcctctgccaaggtgtgttgctgagtgtgggaattcagtcacaggcactcagggtactttgctgtcccccaactttcctgtgaactacaataacaatcatgaatgcatctactccatccagacccagccagggaagggaattcagctgaaagccagggcattcgaactctccgaaggagatgtcctcaaggtttatgatggcaacaacaactccgcccgtttgctgggagtttttagccattctgagatgatgggggtgactttgaacagcacatccagcagtctgtggcttgatttcatcactgatgctgaaaacaccagcaagggctttgaactgcacttttccagctttgaactcatcaaatgtgaggacccaggaacccccaagtttggctacaaggttcatgatgaaggtcattttgcagggagctccgtgtccttcagctgtgaccctggatacagcctgcggggtagtgaggagctgctgtgtctgagtggagagcgccggacctgggaccggcctctgcccacctgtgtcgccgagtgtggagggacagtgagaggagaggtgtcggggcaggtgctgtcacccgggtatccagctccctatgaacacaatctcaactgcatctggaccatcgaagcagaggccggctgcaccattgggctacacttcctggtgtttgacacagaggaggttcacgacgtgctgcgcatctgggatgggcctgtggagagcggggttctgctgaaggagctgagtggcccggccctgcccaaggacctgcatagcaccttcaactcggtcgtcctgcagttcagcactgacttcttcaccagcaagcagggctttgccattcaattttcagtgtccacagcaacgtcctgcaatgaccctgggatcccgcagaatgggagtcggagtggtgacagttgggaagccggcgactccacagtgttccagtgtgaccctggctacgcgctgcagggaagtgcagagatcagctgtgtgaagatcgagaacaggttcttctggcagcccagcccgccaacatgcatcgctccctgcgggggagacctgacaggaccatctggagtcatcctctcaccaaattacccagaaccctacccgccaggcaaggagtgtgactggaaagtgaccgtctcaccagactacgtcatcgccctggtatttaacatctttaacctggagcctggctatgacttcctccatatctacgacggacgggactctctcagccctctcataggaagcttctatggctcccagctcccaggccgcattgaaagcagcagcaacagcctcttcctcgccttccgcagcgatgcatctgtgagcaatgctggcttcgtcattgactatacagaaaacccgcgggagtcatgttttgatcctggttccatcaagaacggcacacgggtggggtccgacctgaagctgggctcctccgtcacctactactgccacgggggctacgaagttgagggcacctcgaccctgagctgcatcctggggcctgatgggaagcccgtgtggaacaatccccggccagtctgcacagccccctgtgggggacagtatgtgggttcggacggagtggtcttgtcccccaactacccccagaactacaccagtggacagatctgcttgtattttgttactgtgcccaaggactatgtggtgtttggccagttcgccttctttcacacggccctcaacgacgtggtggaggttcacgacggccacagccagcactcgcggctcctcagctccctctcgggctcccatacaggagaatcactgcccttggccacctccaatcaagttctcattaagttcagcgccaaaggcctcgcaccagccagaggcttccactttgtctaccaagcggttcctcgaaccagcgccacgcagtgcagctctgtgccggaaccccgctatggcaagaggctgggcagtgacttctcggtgggggccatcgtccgcttcgaatgcaactccggctatgccctgcaggggtcgccagagatcgagtgcctccctgtgcctggggccttggcccaatggaatgtctcagcgcccacgtgtgtggtgccgtgtggaggcaacctcacagagcgcaggggcaccatcctgtcccctggcttcccagagccgtacctcaacagcctcaactgtgtgtggaagatcgtggtccccgaaggcgctggcatccagatccaagttgtcagttttgtgacagagcagaactgggactcgctggaagtatttgatggtgcagataacactgtaaccatgctggggagtttctcaggaacaaccgtgcctgcccttctgaacagcacctccaaccagctctaccttcatttctactcagatatcagcgtatctgcagctggcttccacttggagtacaaaacggtgggcctgagcagttgtccggaacctgctgtgcccagtaacggggtgaagactggcgagcgctacttggtgaatgatgtggtgtctttccagtgtgagccgggatatgccctccagggccacgcccacatctcctgcatgcccggaacagtgcggcgatggaactaccctcctccactctgtattgcacagtgtgggggaacagtggaggagatggagggggtgatcctgagccccggcttcccaggcaactaccccagtaacatggactgctcctggaaaatagcactgcccgtgggctttggagctcacatccagttcctgaacttctccaccgagcccaaccacgactacatagaaatccggaatggcccctatgagaccagccgcatgatgggaagattcagtggaagcgagcttccaagctccctcctctccacgtcccacgagaccaccgtgtatttccacagcgaccactcccagaatcggccaggattcaagctggagtatcaggatttgacttactcccaccagatttcttccttcctgagaggttttgatctctcggagttggaaagaaccaactcaactcctcccgtcgccgcttcctatgtctgggatcttgatcctggttgtgaagcctatgaacttcaagagtgcccagacccagagccctttgccaatggcattgtgaggggagctggctacaacgtgggacaatcagtgaccttcgagtgcctcccggggtatcaattgactggccaccctgtcctcacgtgtcaacatggcaccaaccggaactgggaccaccccctgcccaagtgtgaagtcccttgtggcgggaacatcacttcttccaacggcactgtgtactccccggggttccctagcccgtactccagctcccaggactgtgtctggctgatcaccgtgcccattggccatggcgtccgcctcaacctcagcctgctgcagacagagccctctggagatttcatcaccatctgggatgggccacagcaaacagcaccacggctcggcgtcttcacccggagcatggccaagaaaacagtgcagagttcatccaaccaggtcctgctcaagttccaccgtgatgcagccacaggggggatcttcgccatagctttctccgcttatccactcaccaaatgccctcctcccaccatcctccccaacgccgaagtcgtcacagagaatgaagaattcaatataggtgacatcgtacgctacagatgcctccctggctttaccttagtggggaatgaaattctgacctgcaaacttggaacctacctgcagtttgaaggaccacccccgatatgtgaagtgcactgtccaacaaatgagcttctgacagactccacaggcgtgatcctgagccagagctaccctggaagctatccccagttccagacctgctcttggctggtgagagtggagcccgactataacatctccctcacagtggagtacttcctcagcgagaagcaatatgatgagtttgagatttttgatggtccatcaggacagagtcctctgctgaaagccctcagtgggaattactcagctcccctgattgtcaccagctcaagcaactctgtgtacctgcgttggtcatctgatcacgcctacaatcggaagggcttcaagatccgctattcagccccttactgcagcctgcccagggctccactccatggcttcatcctaggccagaccagcacccagcccgggggctccatccactttggctgcaacgccggctaccgcctggtgggacacagcatggccatctgtacccggcacccccagggctaccacctgtggagcgaagccatccctctctgtcaagctctttcctgtgggcttcctgaggcccccaagaatggaatggtgtttggcaaggagtacacagtgggaaccaaggccatgtacagctgcagtgaaggctaccacctccaggcaggcgctgaggccactgcagagtgtctggacacaggcctatggagcaaccgcaatgtcccaccacagtgtgtccctgtgacttgtcctgatgtcagtagcatcagcgtggagcatggccgatggaggcttatctttgagacacagtatcagttccaggcccagctgatgctcatctgtgaccctggctactactatactggccaaagggtcatccgctgtcaggccaatggcaaatggagcctcggggactctacgcccacctgccgaatcatctcctgtggagagctcccgattccccccaatggccaccgcatcggaacactgtctgtctacggggcaacagccatcttctcctgcaattccggatacacactggtgggctccagggtgcgtgagtgcatggccaatgggctctggagtggctctgaagtccgctgccttgctggacactgtgggactcctgagcccattgtcaacggacacatcaatggggagaactacagctaccggggcagtgtggtgtaccaatgcaatgctggcttccgcctgatcggcatgtctgtgcgcatctgccagcaggatcatcactggtcgggcaagacccctttctgtgtgctggtgtcctgtggccatccgggctccccgcctcactcccagatgtctggagacagttatactgtgggagcagtggtgcggtacagctgcatcggcaagcgtactctggtgggaaacagcacccgcatgtgtgggctggatggacactggactggctccctccctcactgctcaggaaccagcgtgggagtttgcggtgaccctgggatcccggctcatggcatccgtttgggggacagctttgatccaggcactgtgatgcgcttcagctgtgaagctggccacgtgctccggggatcgtcagagcgcacctgtcaagccaatggctcgtggagcggctcgcagcctgagtgtggagtgatctcttgtgggaaccctgggactccaagtaatgcccgagttgtgttcagtgatggcctggttttctccagctctatcgtctatgagtgccgggaaggatactacgccacaggcctgctcagccgtcactgctcggtcaatggtacctggacaggcagtgaccctgagtgcctcgtcataaactgtggtgaccctgggattccagccaatggccttcggctgggcaatgacttcaggtacaacaaaactgtgacatatcagtgtgtccctggctatatgatggagtcacatagagtatctgtgctgagctgcaccaaggaccggacatggaatggaaccaagcccgtctgcaaagctctcatgtgcaagccacctccgctcatccccaatgggaaggtggtggggtctgacttcatgtggggctcaagtgtgacttatgcctgcctggaggggtaccagctctccctgcccgcggtgttcacctgtgagggaaatgggtcctggaccggagagctgcctcagtgtttccctgtgttctgcggggatcctggtgtcccgtcccgtgggaggagagaggaccgaggcttctcctacaggtcatctgtctccttctcctgccatccccctctggtgctggtgggctctccacgcaggttttgccagtcagatgggacatggagtggcacccagcccagctgcatagatccgaccctgaccacgtgtgcggaccctggtgtgccacagtttgggatacagaacaattctcagggctaccaggttggaagcacagtcctcttccgttgtcaaaaaggctacctgcttcagggctccaccaccaggacctgcctcccaaacctgacctggagtggaaccccacctgactgtgtcccccaccactgcaggcagccagagacgccaacgcatgccaacgtcggggccctggatttgccctccatgggctacacgctcatctactcctgccaggagggcttctccctcaagggtggctccgagcaccgcacctgcaaggcggatggcagctggacaggcaagccgcccatctgcctggaggtccggcccagtgggagacccatcaacactgcccgggagccaccgctcacccaagccttgattcctggggatgtttttgccaagaattccctgtggaaaggggcctatgaataccaggggaagaagcagccagccatgctcagagtgactggcttccaagttgccaacagcaaggtcaatgccaccatgatcgaccacagtggcgtggagctgcacttggctggaacttacaagaaagaagattttcatctcctactccaggtgtaccagattacagggcctgtggagatctttatgaataagttcaaagatgatcactgggctttagatggccatgtctcgtcagagtcctccggagccaccttcatctaccaaggctctgtcaagggccaaggctttgggcagttcggctttcaaagactggacctcaggctgctggagtcagaccccgagtccattggccgccactttgcttccaacagcagctcagtggcagccgcgatcctggtgcctttcatcgccctcattattgcgggcttcgtgctctatctctacaagcacaggagaagacccaaagttcctttcaatggctatgctggccacgagaacaccaatgttcgggccacatttgagaacccaatgtacgaccgcaacatccagcccacagacatcatggccagcgaggcggagttcacagtcagcacagtgtgcacagcagtatagccacccggcctggccgccaccaccgccaccgagagccccgcctccagcagccgttccccagggggcaggaagtaggctcccctgagcacagtgcccagtgcccatcttcgttcgtctccttgcctgtgtctgctactgctgggactcaggccctcgccctgccgccatctatgccagttaccctggagaggactcctgccgtgtcctgaaaaggcagaaaaggaagaggggctgcagacagaggaagaaagtttatggatttaaaatagcaaagcaacttgtggatctgtgtgtgtgtgtgtgtgtatgggcctgatcacacacaaacacacacacctctccttcattcacgtcctatggaagagaccataaaggcttcaaaactagaagtgcgcatgaaggatgcttcatgccctgttccccacacagagaagagatgaagagggggaggtacggtcagctttcaaaacaatatgccccccgcccatcccatgtgtgaggacatggtgactcggtgactgtaacagtaggacacatcccatcatgcggtcagagtgcagaaacccggtcagcgtgcagaaaccagctgtctgctgatgaacggcccatctgcacagcggcagcaaggattaccccaagggcaggaaaaaagtctttggaaatagattgaaaatcagtttctttatttttttcaaacactgttttattgagttctaaacccagtggattaaaaagtcatttgggtcctgggaagcactgggaaagaagggagagccggggaggatagggcaggagtctggccaggagcccaaggtcaagtctggctgtcaactgacaaagagaagagaagacaagtctgtggcccagacaggatgccaagtctgggggcagcagcagggtccttgagagaacaggggagcaagcctgccccagtacccaaaaaacaatggctatcatgtactggggttattctctgtgcctgacactttacctgtagtatttctagtctgcacaataacaccaaaatgtaggatttgttattcccctttgacagatgagaaaacagaagcctgcaaaggtaaagacagagttaggaagtgtggagtcagaatgcaaacccagatcagtctgccccaaagtccactacaccagctgccagaaaccctgttctagaaggggcagctaagaagggaggagccgatgaatctctacagtagcactgtggccaggtctggaaagccaggcaagacacctgtgtgtcctatctgggttctgctgtctccgcgtaggcagcttcggggcaaggattcaactccccaggcctcccacggttggtgctggctccttggctcccagcagccgctgaccatagccagcaaaagacctggcaggtcctgaatcaaaacaacagagtggctgaaagtcacacctctccagctccttgcgagtgggtttgattgattttgacagctatatcatgcttgggtcgttcatgaattccatgagaattgttgggaagttcatgagtttaggaatcaaagtatagcatttagggccactttctctgtcctcgggaaggcccccacaagcttaagcccctgtatacgtgtgacatgctggcctcagagattcatgtcacatattgaaatagcaaatagaaatgtgcaggagcggagggacagcgacacctggttcttaagcaaattctagattggaacaattagaagatctgactgatgttaagagtggccagaggaaagtgagaggcgtccatttccagcagacacaatggaggctgacagaggcaggagcctacccctggccacaccacctctgggacacggcacccccctgggcctggagggagagggccaatccagacacactcacactctcatctctttccttggctggaaacaagtgcaggaagctcccctcccaatttcttatgctcccttcccccttacactcctctccttcgactgctcccttcccccttcttatgcccctctcagaccacccagcggatgcctattcccgccccccacccctcccctgcgtctccttgtaaagttccatgagatgctcgaggagcacctgctggtggggcacccagcactctgctgggcatcaccctccgcacccctgacatttctctccacctccagaggcttggaagggaacagggcagatgaggcccttcacccaccatctacgccatatacccatcaccatcccatgaggaaaaaaaaaaaagtaaaacaaagacaaaaaaaatcttttgtacagagatatatttttattatacaaagtttgtacagtaccaaaaaagaaaaaaaaaaaggtgtaaatttttttttcattattgtaggtaaacggtagtggaagccttttttgtaaatgtaataaaatgtataaatatggttttcagaaaacatcaagtgctgtaaatatgtaatctacacaccttcttggcttgtctgcagtatatacatttaatttatctgtctctgtatatgaggcttccccctggggtcctgcattatggtactttcctgaatttgaaagcaattttaaattttttgaattcaaataaaatataaatttttgcattg

SEQ ID NO: 78 - protein, 3487 aa, Homo sapiens
MRLISIAPGPRWQVQSHHPRSAGQNCTFQLHGPNGTVESPGFPYGYPNYANCTWTITAEEQHRIQLVFQSFALEEDFDVLSVFDGPPQPENLRTRLTGFQLPATIVSAATTLSLRLISDYAVSAQGFHATYEVLPSHTCGNPGRLPNGIQQGSTFNLGDKVRYSCNLGFFLEGHAVLTCHAGSENSATWDFPLPSCRADDACGGTLRGQSGIISSPHFPSEYHNNADCTWTILAELGDTIALVFIDFQLEDGYDFLEVTGTEGSSLWFTGASLPAPVISSKNWLRLHFTSDGNHRQRGFSAQYQVKKQIELKSRGVKLMPSKDNSQKTSVLTQVGVSQGHNMCPDPGIPERGKRLGSDFRLGSSVQFTCNEGYDLQGSKRITCMKVSDMFAAWSDHRPVCRARMCDAHLRGPSGIITSPNFPIQYDNNAHCVWIITALNPSKVIKLAFEEFDLERGYDTLTVGDGGQDGDQKTVLYILTGTSVPDLIVSTNHQMWLLFQTDGSGSSLGFKASYEEIEQGSCGDPGIPAYGRREGSRFHHGDTLKFECQPAFELVGQKAITCQKNNQWSAKKPGCVFSCFFNFTSPSGVVLSPNYPEDYGNHLHCVWLILARPESRIHLAFNDIDVEPQFDFLVIKDGATAEAPVLGTFSGNQLPSSITSSGHVARLEFQTDHSTGKRGFNITFTTFRHNECPDPGVPVNGKRFGDSLQLGSSISFLCDEGFLGTQGSETITCVLKEGSVVWNSAVLRCEAPCGGHLTSPSGTILSPGWPGFYKDALSCAWVIEAQPGYPIKITFDRFKTEVNYDTLEVRDGRTYSAPLIGVYHGTQVPQFLISTSNYLYLLFSTDKSHSDIGFQLRYETITLQSDHCLDPGIPVNGQRHGNDFYVGALVTFSCDSGYTLSDGEPLECEPNFQWSRALPSCEALCGGFIQGSSGTILSPGFPDFYPNNLNCTWIIETSHGKGVFFTFHTFHLESGHDYLLITENGSFTQPLRQLTGSRLPAPISAGLYGNFTAQVRFISDFSMSYEGFNITFSEYDLEPCEEPEVPAYSIRKGLQFGVGDTLTFSCFPGYRLEGTARITCLGGRRRLWSSPLPRCVAECGNSVTGTQGTLLSPNFPVNYNNNHECIYSIQTQPGKGIQLKARAFELSEGDVLKVYDGNNNSARLLGVFSHSEMMGVTLNSTSSSLWLDFITDAENTSKGFELHFSSFELIKCEDPGTPKFGYKVHDEGHFAGSSVSFSCDPGYSLRGSEELLCLSGERRTWDRPLPTCVAECGGTVRGEVSGQVLSPGYPAPYEHNLNCIWTIEAEAGCTIGLHFLVFDTEEVHDVLRIWDGPVESGVLLKELSGPALPKDLHSTFNSVVLQFSTDFFTSKQGFAIQFSVSTATSCNDPGIPQNGSRSGDSWEAGDSTVFQCDPGYALQGSAEISCVKIENRFFWQPSPPTCIAPCGGDLTGPSGVILSPNYPEPYPPGKECDWKVTVSPDYVIALVFNIFNLEPGYDFLHIYDGRDSLSPLIGSFYGSQLPGRIESSSNSLFLAFRSDASVSNAGFVIDYTENPRESCFDPGSIKNGTRVGSDLKLGSSVTYYCHGGYEVEGTSTLSCILGPDGKPVWNNPRPVCTAPCGGQYVGSDGVVLSPNYPQNYTSGQICLYFVTVPKDYVVFGQFAFFHTALNDVVEVHDGHSQHSRLLSSLSGSHTGESLPLATSNQVLIKFSAKGLAPARGFHFVYQAVPRTSATQCSSVPEPRYGKRLGSDFSVGAIVRFECNSGYALQGSPEIECLPVPGALAQWNVSAPTCVVPCGGNLTERRGTILSPGFPEPYLNSLNCVWKIVVPEGAGIQIQVVSFVTEQNWDSLEVFDGADNTVTMLGSFSGTTVPALLNSTSNQLYLHFYSDISVSAAGFHLEYKTVGLSSCPEPAVPSNGVKTGERYLVNDVVSFQCEPGYALQGHAHISCMPGTVRRWNYPPPLCIAQCGGTVEEMEGVILSPGFPGNYPSNMDCSWKIALPVGFGAHIQFLNFSTEPNHDYIEIRNGPYETSRMMGRFSGSELPSSLLSTSHETTVYFHSDHSQNRPGFKLEYQDLTYSHQISSFLRGFDLSELERTNSTPPVAASYVWDLDPGCEAYELQECPDPEPFANGIVRGAGYNVGQSVTFECLPGYQLTGHPVLTCQHGTNRNWDHPLPKCEVPCGGNITSSNGTVYSPGFPSPYSSSQDCVWLITVPIGHGVRLNLSLLQTEPSGDFITIWDGPQQTAPRLGVFTRSMAKKTVQSSSNQVLLKFHRDAATGGIFAIAFSAYPLTKCPPPTILPNAEVVTENEEFNIGDIVRYRCLPGFTLVGNEILTCKLGTYLQFEGPPPICEVHCPTNELLTDSTGVILSQSYPGSYPQFQTCSWLVRVEPDYNISLTVEYFLSEKQYDEFEIFDGPSGQSPLLKALSGNYSAPLIVTSSSNSVYLRWSSDHAYNRKGFKIRYSAPYCSLPRAPLHGFILGQTSTQPGGSIHFGCNAGYRLVGHSMAICTRHPQGYHLWSEAIPLCQALSCGLPEAPKNGMVFGKEYTVGTKAMYSCSEGYHLQAGAEATAECLDTGLWSNRNVPPQCVPVTCPDVSSISVEHGRWRLIFETQYQFQAQLMLICDPGYYYTGQRVIRCQANGKWSLGDSTPTCRIISCGELPIPPNGHRIGTLSVYGATAIFSCNSGYTLVGSRVRECMANGLWSGSEVRCLAGHCGTPEPIVNGHINGENYSYRGSVVYQCNAGFRLIGMSVRICQQDHHWSGKTPFCVLVSCGHPGSPPHSQMSGDSYTVGAVVRYSCIGKRTLVGNSTRMCGLDGHWTGSLPHCSGTSVGVCGDPGIPAHGIRLGDSFDPGTVMRFSCEAGHVLRGSSERTCQANGSWSGSQPECGVISCGNPGTPSNARVVFSDGLVFSSSIVYECREGYYATGLLSRHCSVNGTWTGSDPECLVINCGDPGIPANGLRLGNDFRYNKTVTYQCVPGYMMESHRVSVLSCTKDRTWNGTKPVCKALMCKPPPLIPNGKVVGSDFMWGSSVTYACLEGYQLSLPAVFTCEGNGSWTGELPQCFPVFCGDPGVPSRGRREDRGFSYRSSVSFSCHPPLVLVGSPRRFCQSDGTWSGTQPSCIDPTLTTCADPGVPQFGIQNNSQGYQVGSTVLFRCQKGYLLQGSTTRTCLPNLTWSGTPPDCVPHHCRQPETPTHANVGALDLPSMGYTLIYSCQEGFSLKGGSEHRTCKADGSWTGKPPICLEVRPSGRPINTAREPPLTQALIPGDVFAKNSLWKGAYEYQGKKQPAMLRVTGFQVANSKVNATMIDHSGVELHLAGTYKKEDFHLLLQVYQITGPVEIFMNKFKDDHWALDGHVSSESSGATFIYQGSVKGQGFGQFGFQRLDLRLLESDPESIGRHFASNSSSVAAAILVPFIALIIAGFVLYLYKHRRRPKVPFNGYAGHENTNVRATFENPMYDRNIQPTDIMASEAEFTVSTVCTAV

SEQ ID NO: 79 - DNA, 2580 bp, Homo sapiens
ataaggtatgaaagatgtggcctgcagagagccggcactatctctactgctgctgctgctgctactgctgctgttgctaccgctgcctctgctgccaccgccactactgctgccagcggagccgctaggagtgagcatcccctctccgggatacccagctccgcggcgtctcccgcgcgccctggccccacacggacctgccagccccagggaacaaaagcggagcccgctcgccctctactgcagccggaggatgagtcgagagggctgagcggagagtgtggtcctcggcggctggagctatttccttggcttctctccatgacgattcctgactcgtggccccggcaatcttgggaagacatcatccagcttcttcagtccagaccctgggcaccccccttttgccaggatcgtccccacccagcctggacacattgactgaactgttttctaggacactgcactcagcaagacatggtggtgagccctgactctcagtcttcatgattgaagaactcttttgtacaacacaaagcactcaaaaagagtgaatgaaatgtgcagctcagagtgtcatttctgaagggaggagtctttctcttggagaagagtcctcaatgagcctggccgaggcccgggatctgtgtgaagtggactaaggattaagtaggatgtcaactgagacagaacttcaagtagctgtgaaaaccagcgccaagaaagactccagaaagaaaggtcaggatcgcagtgaagccactttgataaagaggtttaaaggtgaaggggtccggtacaaagccaaattgatcgggattgatgaagtttccgcagctcggggagacaagttatgtcaagattccatgatgaaactcaagggcgttgttgctggcgctcgttccaaaggagaacacaaacagaaaatctttttaaccatctcctttggaggaatcaaaatctttgatgagaagacaggggcccttcagcatcatcatgctgttcatgaaatatcctacattgcaaaggacattacagatcaccgggcctttggatatgtttgtgggaaggaagggaatcacagatttgtggccataaaaacagcccaggcggctgaacctgttattctggacttgagagatctctttcaactcatttatgaattgaagcaaagagaagaattagaaaaaaaggcacaaaaggataagcagtgtgaacaagctgtgtaccagacaatattggaagaggatgttgaagatcctgtgtaccagtacattgtgtttgaggctggacacgagccaatccgtgatcccgaaacggaagaaaacatttatcaggttcccaccagccaaaagaaggaaggtgtttatgatgtgccaaaaagtcaacctgtaagtgctgtgacccaattagaactttttggggacatgtccacaccccctgatataacctctccccccactcctgcaactccaggtgatgcctttatcccatcttcatctcagacccttccagcgagtgcagatgtgtttagttctgtacctttcggcactgctgctgtaccctcaggttacgttgcaatgggcgctgtcctcccgtccttctggggtcagcagcccctcgtccaacagcagatggtcatgggtgcccagccaccagtcgctcaggtgatgccgggggctcagcccatcgcatggggccagccgggtctctttcctgccactcagcagccctggccaactgtggccgggcagtttccgccagccgccttcatgcccacacaaactgttatgcctttgccagctgccatgttccaaggtcccctcaccccccttgccaccgtcccaggcacgagtgactccaccaggtcaagtccacagaccgacaagcccaggcagaaaatgggcaaagaaacgtttaaggatttccagatggcccagcctccgcccgtgccctcccgcaaacccgaccagccctccctcacctgtacctcagaggccttctccagttacttcaacaaagtcggggtggcacaggatacagacgactgtgatgactttgacatctcccagttgaatttgacccctgtgacttctaccacaccatcgaccaactcacctccaaccccagcccctagacagagctctccatccaaatcatctgcatcccatgccagtgatcctaccacagatgacatctttgaagagggctttgaaagtcccagcaaaagcgaagagcaagaagctcctgatggatcacaggcctcatccaacagtgatccatttggtgagcccagtggggagcccagtggtgataatataagtccacaggccggtagctagatagcgcaggtctgggagccagagcctctgtacgcgcagatcaacagacctaagaaatagcatcgatgcgagctcgtggtgggtgctcaagactggcatggacatcagcatcacgacaggctctcttgtattctttcacctcttcccacaagaaattcatgattgcccaatggaactcgctcagaagagggaactaagcatttttggcaaccaatggcagatatctatggcagcacac

SEQ ID NO: 80 - protein, 555 aa, Homo sapiens
MSTETELQVAVKTSAKKDSRKKGQDRSEATLIKRFKGEGVRYKAKLIGIDEVSAARGDKLCQDSMMKLKGVVAGARSKGEHKQKIFLTISFGGIKIFDEKTGALQHHHAVHEISYIAKDITDHRAFGYVCGKEGNHRFVAIKTAQAAEPVILDLRDLFQLIYELKQREELEKKAQKDKQCEQAVYQTILEEDVEDPVYQYIVFEAGHEPIRDPETEENIYQVPTSQKKEGVYDVPKSQPVSAVTQLELFGDMSTPPDITSPPTPATPGDAFIPSSSQTLPASADVFSSVPFGTAAVPSGYVAMGAVLPSFWGQQPLVQQQMVMGAQPPVAQVMPGAQPIAWGQPGLFPATQQPWPTVAGQFPPAAFMPTQTVMPLPAAMFQGPLTPLATVPGTSDSTRSSPQTDKPRQKMGKETFKDFQMAQPPPVPSRKPDQPSLTCTSEAFSSYFNKVGVAQDTDDCDDFDISQLNLTPVTSTTPSTNSPPTPAPRQSSPSKSSASHASDPTTDDIFEEGFESPSKSEEQEAPDGSQASSNSDPFGEPSGEPSGDNISPQAGS

SEQ ID NO: 81 - DNA, 1579 bp, Homo sapiens
atgtgggaccatggattaggtgagaagacaggaagtgagatccaaacagagatcaacagcgacttgctcctttctgcccgtggatgccgccgaagaagcatcgttaaagtctctcttctccctgccatcctgtctaagtcagagtctcctaaagagcccgaacagcttaggaagctcttcactggagggctgagctttgacaccactgatgagaacctgagaagccattttgagcaatagggaacgctcacggactgtgtggtcctgagagatccaaacaccaagtgctccgggggctttgggtttgtcacatatgccactgtggaggaggtggatgcagccacaaatgcaaggccacacaaggtgggtggaagagttgtggaaacagagagctgtctcaagagaagattcccaaagaccaggtgcccacttaactgtgaaaaaggtatttgttggtggttttaaagaagacactgaagaacatcacctaagagattatttttaacagttggaaaaatggaagtgattgaaatcatgactgactgaggcagtggcaaagaaaaaggggctttgcctttgtaacctttgacaaccatgattccgtggataagactgtcattcagaaatactatactgtgaatggccacaactgtgaagttaggaaagccctgtcaaagcaagagatggctagtgtttcatccagccaaagaggtgaagtggttctggaaactttggtggtggtcgtggaggtggtttcagtgggaatgacaactttggttgtggaggaaactttagtggtcatggtggctttggtggcagctgtgatgtcagtggatatggtggcagtggggatggttataatgggtttggcaattatggtggttatggaggaagtggccctggttactctggaggaagcagaggctatggaagtggtggacagggttatggaaaccagggcagtggctatggcgggagtggcagctatgacagctataacaatagaggtggaggtagctttggcagtggcagtggaagcagttttggaggtggtggaagctacagtgatttgggcaattaaaacaatcagttttcaaattttggacccatgaaggggggagattttggaggcagaagctctggcccctatggcggtggaggccaatactttgccaaactgtgaaaccaaggtggctatggcggttccagtagcagcagtagctgtggcagtggcagaagattttaattaggaaacaaagcttagcaggagagaagagccagagaagtgacagggaagctataggttacaacagatttgtgaactcagccaaacacagtggtggcagggcctagctgctgcaaagaagacatgttttagacaaatactcatgtatatgggcaaaaaacttgaggactatatttgtgactaattgtataacaggttattttagttgctgttctgtggaaagtgtaaagcattccaacaaagggttttaatgtagatttttttttgcacccatgctgttgattgctaaatgtaatagtctgatcgtgatgctgaataaatgccttaaaaaaa

SEQ ID NO: 82 - DNA, 845 bp, Homo sapiens
atgtgcatgttgctgccagagagtgatctgggggacccagagaagcctgcctcttttctggctggaaccatagaaggtgttgaagagaagaaaaagaaggttcctgctgtgccagaaacccttaagaaaaagcgaaagaatttcgcagagctgaagatcaagcacctaagaaagaagtttgtccaaaagatgctttgaaaggcaaggaggaagcttatctgtgaaaaagcaaagcactatcacaaggaatataggcagatgtacagaactgaaattcgaatggtgaggaaggcaagaaaagctggcaacttctatgtacctgcagaacacagatcggtatttgtcatcaggatcaggggtatcaatggtgtggccaaaaggtccgaaaggtgttgcggcttcttcaccttcgtcaaatcttcagtggaacttttgtgaagcttaacaaggcttcaattaacatgctgaggattgtagatccatatattgtatgggggtacccaaatctgaagtcagtaaatgaactaatctacaagtgtggttatggcaaaatcaataagaaaataattgctttgacagacaacgctttgattgctccatctcttggtaaatatggcatcatctgcatggaggatatgattaatgagatctatactgttggaaaacacttcaaagaagcaaataacttcctgtggccctttgaattatcttctccacgaggcggaatgaagaaaaagaccacccattttgtagaaggtggagatgctggcaacagacaggaccagatcaacaggttttttagaagaatgaactaaggtgtctaccatgattatttttctaagctg

SEQ ID NO: 83 - DNA, 652 bp, Homo sapiens
atgagcagcaaagtctcttgcgacaccgtgtacgaggtgatgcaggaagtcctgcaagggaaccagcacaagggccccaagtctggagacagtggagttgcagattagtttgaggaactgtgactcccagaaggacaagcacctctcggacaccgtcaggcttaagtccactccccaccccaagttctccgtgtgtgtcccggggtaccagcaacactgtgacgaggccaaggtcatggatatcccccacatggacatcgaggcgctgaaaaaactcaacaaaaataagaaactggtcaagaagctagccaagaagtatgatgcatttttggcctcagagcctctgatcaagtggatcccacaaatcctgggcccaggcctaaataaggcaggaaagttcccttccctgctcacacacaatgaaaacatggcggccaaagcggatgaggtgaagtccaccttcaagttccaaatgaagaaggtgttatgtctggctgtggctgttggccacgtgaagatgacagaagatgagcttgtgtagaacattcacctggctgtcaaattcttgctgtcattgctcaagaaaaactggcagaatgtcctggccttatatatcaagagcaccatgggcaagcctcagcacctatattaa

SEQ ID NO: 84 - DNA, 1566 bp, Homo sapiens
ccttgtcctgcccagatcttgtcccttctagtactggccttccccattcctgggggcccccgcccctccgacccccgccgaccggcgctggactacaactcccggcgtgccgcgcgcgtccggccggctgcaccggggctttgcgcgtggcggccgccgagctccgcgcggggcaaacctcccggcgcggccatgcggggagttgctgaagtaaaggaaccctgcagccttcccatgctatctgttgacatggaaaacaaggaaaatggctctgtcggtgtaaaaaattccatggaaaatgggagaccacctgatcctgcagactgggccgtgatggatgtcgtcaattatttccgaaccgtgggatttgaggagcaagctagtgcttttcaggaacaggaaattgatggaaaatccctgctattgatgacaagaaatgatgtgttgacaggacttcagttaaaattggggcctgctctgaaaatctacgaatatcatgtaaaacctctgcagacaaagcatttaaagaacaactcttcatagtacagtcaaattggggtcttcgacctcaaaaaaatacataatgacataatttagtttcatgtaatgaaactttgtaaacagaatacatacatgtgtatatgtaaagaatttcaatcaaatgaaacgttatcctattggatagactaggcaattcatcagctcacctgaaatcagccaggaggagcaaggacaagatgcgcacagggtggttttcctcatggattttgtcaaatagatgatctttgacacgattagacactcctccccacaaaggctttgaaatcataaggattttcctcatctctttatagctttcccaaaatcttttaaaaaagaatttaattaaatgacagtcttttggttacagacttaggatgagtaaaaacaagaaaatttggggagggggagaaagaagaaagggattgctgtctcccttgaattcctctgttccttagagcttgtgttacttggacggaattgccaacacccttttttatagagggttctccacttgaccttattaaggttttattgggatatgctgcagtgtttgaaatgaacatgcatcatggccccttcaggagcagaatcatagctctgaaaagagaagctccgttgtgtactgaggatatccatccatattcagctagctttcaaatggggtaatgatattttctgcatagattttcttttaaattggttctttgtttctgaagaaagaattttttttaacttcatggttttatttataataatttgtttctgaagaaatttgccgagagttacaggtcaaaaagccttgttactagtacagaatatttttatatatattccttcatgatggtgtaattttttttaattgtcctatgctttgttcggttcctgggttaagtacttgtttttaagagcttggaaaaagtgggcttgctacatctctgttcaaagagacatttgttcaatctctgtgtgtcaacgccttgttgaattggtgctttgtggttgcaataaagcattgcttcagtt

SEQ ID NO: 85 - protein, 116 aa, Homo sapiens
MRGVAEVKEPCSLPMLSVDMENKENGSVGVKNSMENGRPPDPADWAVMDVVNYFRTVGFEEQASAFQEQEIDGKSLLLMTRNDVLTGLQLKLGPALKIYEYHVKPLQTKHLKNNSS

SEQ ID NO: 86 - DNA, 1279 bp, Homo sapiens
atggggaaagtgtcctgctgtggcatgaaataaatgaaacagaaaatgatggcaagactgctaagaacatcctttgctttgctcttccttggcctctttggggtgctgggggcagcaacaatttcatgcagaaatgaagaagggaaagctgtggactggtttactttttataagttacctaaaagacaaaacaaggaaagtggagagactgggttagagtacctgtacctagactctacaactagaagctggaggaagagtgagcaactaatgaatgacaccaagagtgttttgggaaggacattacaacagctatatgaagcatatgcctctaagagtaacaacacagcctatctaatatacaatgatggagtccctaaacctgtgaattacagcagaaagtatggacacaccaaaggtttactgctgtggaacagagttcaagggttctggctgattcattccatccctcagtttcctccaattccggaagaaggctatgattatccacccacagggagacgaaatggacaaagtggcatctgcataactttcaagtacaaccagtatgaggcaatagattctcagctcttggtctgcaaccccaacgtctatagctgctccatcccagccacctttcaccaggagctcattcacatgccccagctgtgcaccagggccagctcatcagagattcctggcaggctcctcaccacacttcagtcggcccagggacaaaaattcctccattttgcaaagtcggattcttttcttgacgacatctttgcagcctggatggctcaacggctgaagacacacttgttaacagaaacctggcagcgaaaaagacaagagcttccttcaaactgctcccttccttaccatgtctacaatataaaagcaattaaattatcacgacactcttatttcagttcttatcaagatcatgccaagtggtgtatttcccaaaagggcaccaaaaatcgctggacatgtattggagacctaaatcggagtccacaccaagccttcagaagtggaggattcatttgtacccagaattggcaaatttaccaagcatttcaaggattagtattatactatgaaagctgtaagtaaacttggtgaaaggacacaggtactatcattgaaaaccttgacaatgggtcttcttccattacaccttctttatattttaaaggcctgtgaatatacttataacctgcatatcacaaaataaaacatttttctctcatgttaaaaaaaaaaaaaaaaaaaa

SEQ ID NO: 87 - protein, 357 aa, Homo sapiens
MMARLLRTSFALLFLGLFGVLGAATISCRNEEGKAVDWFTFYKLPKRQNKESGETGLEYLYLDSTTRSWRKSEQLMNDTKSVLGRTLQQLYEAYASKSNNTAYLIYNDGVPKPVNYSRKYGHTKGLLLWNRVQGFWLIHSIPQFPPIPEEGYDYPPTGRRNGQSGICITFKYNQYEAIDSQLLVCNPNVYSCSIPATFHQELIHMPQLCTRASSSEIPGRLLTTLQSAQGQKFLHFAKSDSFLDDIFAAWMAQRLKTHLLTETWQRKRQELPSNCSLPYHVYNIKAIKLSRHSYFSSYQDHAKWCISQKGTKNRWTCIGDLNRSPHQAFRSGGFICTQNWQIYQAFQGLVLYYESCK

SEQ ID NO: 88 - DNA, 1029 bp, Homo sapiens
attgcaggctgggtagctggtagaaatgttgtgggcgtttgtaagtggaagatttacgccattataaccctaatatattcctgcagagtaacaacacagcctatctaatatacaatgatggagtccctaaacctgtgaattacagcagaaagtatggacacaccaaaggtttactgctgtggaacagagttcaagggttctggctgattcattccatccctcagtttcctccaattccggaagaaggctatgattatccacccacagggagacgaaatggacaaagtggcatctgcataactttcaagtacaaccagtatgaggcaatagattctcagctcttggtctgcaaccccaacgtctatagctgctccatcccagccacctttcaccaggagctcattcacatgccccagctgtgcaccagggccagctcatcagagattcctggcaggctcctcaccacacttcagtcggcccagggacaaaaattcctccattttgcaaagtcggattcttttcttgacgacatctttgcagcctggatggctcaacggctgaagacacacttgttaacagaaacctggcagcgaaaaagacaagagcttccttcaaactgctcccttccttaccatgtctacaatataaaagcaattaaattatcacgacactcttatttcagttcttatcaagatcatgccaagtggtgtatttcccaaaagggcaccaaaaatcgctggacatgtattggagacctaaatcggagtccacaccaagccttcagaagtggaggattcatttgtacccagaattggcaaatttaccaagcatttcaaggattagtattatactatgaaagctgtaagtaaacttggtgaaaggacacaggtactatcattgaaaaccttgacaatgggtcttcttccattacaccttctttatattttaaaggcctgtgaatatacttataacctgcatatcacaaaataaaacatttttctctcatgttaaaaaaaaaaaaaaaaaaaa

SEQ ID NO: 89 - protein, 153 aa, Homo sapiens
MPQLCTRASSSEIPGRLLTTLQSAQGQKFLHFAKSDSFLDDIFAAWMAQRLKTHLLTETWQRKRQELPSNCSLPYHVYNIKAIKLSRHSYFSSYQDHAKWCISQKGTKNRWTCIGDLNRSPHQAFRSGGFICTQNWQIYQAFQGLVLYYESCK

SEQ ID NO: 90 - DNA, 1975 bp, Homo sapiens
agaaggctatttccgtttccgtacggaagcaaaggagccaagaccatggcgaaagccggggataagagcagcagcagcgggaagaaaagtctaaaacggaaagccgctgccgaagaacttcaggaggctgcaggcgctggggatggggcgacggaaaacggggtccaacccccgaaagcggctgcctttccgccaggctttagcatttcggagattaaaaacaaacagcggcgacacttaatgttcacgcggtggaaacagcagcagcggaaggaaaagttggcagctaagaaaaaacttaaaaaagaaagagaggctcttggcgataaggctccaccaaagcctgtacccaagaccattgacaaccagcgagtgtatgatgaaaccacagtagaccctaatgatgaagaggtcgcttatgatgaagctacagatgaatttgcttcttacttcaacaaacagacttctcccaagattctcatcacaacatcagatagacctcatgggagaacagtacgactctgtgaacagctctccacagttataccaaactcacatgtttattacagaagaggactggctctgaaaaaaattattccacagtgcatcgcaagagatttcacagacctgattgttattaatgaagatcgtaaaaccccaaatggacttattttgagtcacttgccaaatggcccaactgctcattttaaaatgagcagtgttcgtcttcgtaaagaaattaagagaagaggcaaggaccccacagaacacatacctgaaataattctgaataattttacaacacggctgggtcattcaattggacgtatgtttgcatctctctttcctcataatcctcaatttatcggaaggcaggttgccacattccacaatcaacgggattacatattcttcagatttcacagatacatattcaggagtgaaaagaaagtgggaattcaggaacttggaccacgttttaccttaaaattaaggtctcttcagaaaggaacctttgattctaaatatggagagtatgaatgggtccataagccccgggaaatggatacaagtagaagaaaattccatttataaagtactgagagaatgatattggattttgctgaacaggcctatcttgaactttggtaaattatttttgacagaatactcttttcaaaatggcatttgctgatttcataaacctttcacgtctggacgaattaccaaatgccatgaattgccactgtgtgtttatgtagaaaatacaaataaaagttattttgatggcttaggtttccttaaacttagttctcttgtttttgggtaactgtgaataattaagttggaatcaagattcagattaactttcctatttgcatagaacacatgagaggaataaaatggttggtaaatattggctaacccttgatttttataccagattaaccttggattcccagtgtctggcacagttttaatagcttaaatggaggccaggtttctggatgttttaacattctcttaagccttcagaagggtaaaaaatttaaagcaaaatgatctaccagggtttaaagcaaagttgcaaattactgaagctaatctttgcttcctgattttgaggtttttggttttttgtgcccacgttgtggggagctcttttttacctcattacatggtgctgtagtactccattcaggcactgaaacaaagttaaccctataagtaactcatggatggaaacccgtagaacttaacagcctcctcctgaccttaaaagaataaaggttcacagtttacctttaattccctagcagtcttgccagatgtatggcataaagtcatgtgagaagagtaggtggaaaaaactgtacaaacttaaccccttcaggtgttcagaacagattaatataccatgtatttaataccaataataatgcaaaataaaagtttcatactaagttttattgta

SEQ ID NO: 91 - protein, 349 aa, Homo sapiens
MAKAGDKSSSSGKKSLKRKAAAEELQEAAGAGDGATENGVQPPKAAAFPPGFSISEIKNKQRRHLMFTRWKQQQRKEKLAAKKKLKKEREALGDKAPPKPVPKTIDNQRVYDETTVDPNDEEVAYDEATDEFASYFNKQTSPKILITTSDRPHGRTVRLCEQLSTVIPNSHVYYRRGLALKKIIPQCIARDFTDLIVINEDRKTPNGLILSHLPNGPTAHFKMSSVRLRKEIKRRGKDPTEHIPEIILNNFTTRLGHSIGRMFASLFPHNPQFIGRQVATFHNQRDYIFFRFHRYIFRSEKKVGIQELGPRFTLKLRSLQKGTFDSKYGEYEWVHKPREMDTSRRKFHL

SEQ ID NO: 92 - DNA, 698 bp, Homo sapiens
cacaaactgggaggaaaactgagacctcctggtacccgccgccgggccttttagaaactcccacaagctctgccttccctccctggtcctcttcagaccccctcttagttcttcgcggctaacggctcgcgctcggggccgggtgtggagctggaacagagggctggcaaggcgcgcatcggaccgagggtggagccgctgagcacagaaccggaaacttagagacaaagttcggagccccgcccccgccgcgcgccgctgagttgtctggccccgccgacccacggcccacgacccaccgacccacgaatcggcccggccgtcgcgtgcaccatgtctggctcctccagcgtcgccgctatgaagaaagtggttcaacagctccggctggaggccggactcaaccgcgtaaaagtttcccaggcagctgcagacttgaaacagttctgtctgcagaatgctcaacatgaccctctgctgactggagtatcttcaagtacaaatcccttcagaccccagaaagtctgttcctttttgtagtaaaatgaatctttcaaaggtttcccaaaccactccttatgatccagtgatattcaagagagctacatttgaagcctgtacaaaagcttatccctgtaacacatgtgccataatatacaaacttctactttcgtcagtccttaacatctacctctctg

SEQ ID NO: 93 - protein, 68 aa, Homo sapiens
MSGSSSVAAMKKVVQQLRLEAGLNRVKVSQAAADLKQFCLQNAQHDPLLTGVSSSTNPFRPQKVCSFL

SEQ ID NO: 94 - DNA, 1618 bp, Homo sapiens
atgtcccggccgcagcttcgacgctggcgcctcgtctctagcccgccgagcggcgtcccgggtctagcgctgctggcgctgctggcgctgctggcgctgcggctcgcggccgggaccgactgcccatgcccggagcctgagctctgccgcccgattcgccaccatccagatttcgaggtctttgtgtttgatgttggacagaaaacttggaaatcttatgattggtcacagattacaactgtggcaacatttggaaaatatgactcagaacttatgtgctacgctcattcaaaaggagccagagtagtacttaaaggagatgtatccttaaaggatatcattgatcctgctttcagagcatcctggatagctcaaaaacttaatttggccaaaacacaatatatggatggaattaatatagatatagagcaagaagttaattgtttatcacctgaatatgatgcattaactgctttagtcaaagaaactacagactctttccatcgtgaaattgagggatcacaggtaacctttgatgtagcttggtctccaaagaacatagacagaagatgctataattatactggaatcgcagatgcttgtgacttcctctttgtgatgtcttatgatgaacaaagtcagatctggtcagaatgtattgcagcagccaatgctccctataatcagacattaactggatataatgactacatcaagatgagcattaatcctaagaaacttgtaatgggtgttccttggtatggttatgattatacctgcctgaatctgtctgaggatcatgtttgtaccattgcaaaagtccctttccggggggctccttgtagtgacgctgcaggacgtcaggtgccctacaaaacgatcatgaagcaaataaatagttctatttctggaaacctatgggataaagatcagcgggctccttattataactataaagatcctgctggccactttcatcaagtatggtatgataaccctcagagtatttctttaaaggcaacatatatacaaaactatcgcttacggggcattggcatgtggaatgcaaactgtcttgactactctggagatgctgtagccaaacagcaaactgaagaaatgtgggaagtcttaaagccaaagctgttacagagatgaacatcttttgtcaaaccattaagagttagaaagatgatctgtatcaacagatctagtttcttgcatttttattatgttgctatatacttttgttatccgtatactaaaaaaaaagaataaataaatgttttgattgtttgaatttgaaaaatacacacgaatgtcctcagtatccaggaacataaaggcaagaagcaagtcaacttacctattaaatattcctctattagatgtttcaacactataatttaattgggaaaaattgctttcagaattttattatgccatatttcccttcattatagtaaaatatatgctcacgaatcaatgctgatttttaaaatatgtataatctgaagtggaaattgtttgcttagagtttttaaaaacctagtctttgaaaagcagtttgtgctatacttttcccccaaccctccaataaatcttaaatttaaaacct

SEQ ID NO: 95 - protein, 385 aa, Homo sapiens
MSRPQLRRWRLVSSPPSGVPGLALLALLALLALRLAAGTDCPCPEPELCRPIRHHPDFEVFVFDVGQKTWKSYDWSQITTVATFGKYDSELMCYAHSKGARVVLKGDVSLKDIIDPAFRASWIAQKLNLAKTQYMDGINIDIEQEVNCLSPEYDALTALVKETTDSFHREIEGSQVTFDVAWSPKNIDRRCYNYTGIADACDFLFVMSYDEQSQIWSECIAAANAPYNQTLTGYNDYIKMSINPKKLVMGVPWYGYDYTCLNLSEDHVCTIAKVPFRGAPCSDAAGRQVPYKTIMKQINSSISGNLWDKDQRAPYYNYKDPAGHFHQVWYDNPQSISLKATYIQNYRLRGIGMWNANCLDYSGDAVAKQQTEEMWEVLKPKLLQR

SEQ ID NO: 96 - DNA, 1735 bp, Homo sapiens
caaaatcccaggcagcatggacctcagtcttctctgggtacttctgcccctagtcaccatggcctggggccagtatggcgattatggatacccataccagcagtatcatgactacagcgatgatgggtgggtgaatttgaaccggcaaggcttcagctaccagtgtccccaggggcaggtgatagtggccgtgaggagcatcttcagcaagaaggaaggttctgacagacaatggaactacgcctgcatgcccacgccacagagcctcggggaacccacggagtgctggtgggaggagatcaacagggctggcatggaatggtaccagacgtgctccaacaatgggctggtggcaggattccagagccgctacttcgagtcagtgctggatcgggagtggcagttttactgttgtcgctacagcaagaggtgcccatattcctgctggctaacaacagaatatccaggtcactatggtgaggaaatggacatgatttcctacaattatgattactatatccgaggagcaacaaccactttctctgcagtggaaagggatcgccagtggaagttcataatgtgccggatgactgaatacgactgtgaatttgcaaatgtttagatttgccacataccaaatctgggtgaaaggaaaggggccggggacaggagggtgtccacatatgttaacatcagttggatctcctatagaagtttctgctgctctctttccttctccctgagctggtaactgcaatgccaacttcctgggcctttctgactagtatcacacttctaataaaatccacaattaaaccatgtttctcacttttcacatgtttcatagcaactgctttatatgactgatgatggcttccttgcacaccacatatacagtgcgcatgcttacagccgggcttctggagcaccagctgcagcctggctactgctttttactgcagaatgaactgcaagttcagcatagtggaggggagaggcagaactggaggagaggtgcagtgaaggttctctacagctaagcctgtttgaatgatacgtaggttccccaccaaaagcaggctttctgccctgagggacatcttcccactcccctgctccacatgagccatgcatgcttagcaatccaagtgcagagctctttgctccaggagtgaggagactgggaggtgaaatggggaaatggaagggtttggaggcagagctgaaaacagggttggaaggatttcctgaattagaagacaaacgttagcatacccagtaaggaaaatgagtgcaggggccaggggaacccgtgaggatcactctcaaatgagattaaaaacaaggaagcagagaatggtcagagaatgggattcagattgggaacttgtggggatgagagtgaccaggttgaactgggaagtggaaaaaggagtttgagtcactggcacctagaagcctgcccacgattcctaggaaggctggcagacaccctggaaccctggggagctactggcaaactctcctggattgggcctgatttttttggtgggaaaggctgccctggggatcaactttccttctgtgtgtggctcaggagttcttctgcagagatggcgctatctttcctcctcctgtgatgtcctgctcccaaccatttgtactcttcattacaaaagaaataaaaatattaacgttcactaaaaaaaaaaaaaaaaaaaaaaaaaaaaaaaaa

SEQ ID NO: 97 - protein, 201 aa, Homo sapiens
MDLSLLWVLLPLVTMAWGQYGDYGYPYQQYHDYSDDGWVNLNRQGFSYQCPQGQVIVAVRSIFSKKEGSDRQWNYACMPTPQSLGEPTECWWEEINRAGMEWYQTCSNNGLVAGFQSRYFESVLDREWQFYCCRYSKRCPYSCWLTTEYPGHYGEEMDMISYNYDYYIRGATTTFSAVERDRQWKFIMCRMTEYDCEFANV

SEQ ID NO: 98 - DNA, 748 bp, Homo sapiens
catgacattgcatccttcacccatcacttgtgaatttttgttttccacagctctcatttctccaaaaatgtgtttgagccacttggaaaatatgcctttaagccattcaagaactcaaggagctcagagatcatcctggaagctgtggctcttttgctcaatagttatgttgctatttctttgctccttcagttggctaatctttatttttctccaattagagactgctaaggagccctgtatggctaagtttggaccattaccctcaaaatggcaaatggcatcttctgaacctccttgcgtgaataaggtgtctgactggaagctggagatacttcagaatggcttatatttaatttatggccaagtggctcccaatgcaaactacaatgatgtagctccttttgaggtgcggctgtataaaaacaaagacatgatacaaactctaacaaacaaatctaaaatccaaaatgtaggagggacttatgaattgcatgttggggacaccatagacttgatattcaactctgagcatcaggttctaaaaaataatacatactggggtatcattttactagcaaatccccaattcatctcctagagacttgatttgatctcctcattcccttcagcacatgtagaggtgccagtgggtggattggagggagaagatattcaatttctagagtttgtctgtctacaaaaatcaacacaaacagaactcctctgcacgtgaattttcatctat

SEQ ID NO: 99 - protein, 199 aa, Homo sapiens
MTLHPSPITCEFLFSTALISPKMCLSHLENMPLSHSRTQGAQRSSWKLWLFCSIVMLLFLCSFSWLIFIFLQLETAKEPCMAKFGPLPSKWQMASSEPPCVNKVSDWKLEILQNGLYLIYGQVAPNANYNDVAPFEVRLYKNKDMIQTLTNKSKIQNVGGTYELHVGDTIDLIFNSEHQVLKNNTYWGIILLANPQFIS

SEQ ID NO: 100 - DNA, 963 bp, Homo sapiens
atgcatcaatgttccaacacggtgaaccattacgacaagcccccagatctctgcacgcacccacagcctgaatcatctgctctgagcagccagactcacagacacgactgcagcaaacatgggcacaaagcaaaaaagcacagaaaactggatgttccatccctgggaaaggacgcacaaccactctcgcacaaggagactcaagccggatcaaaaagcaagtcaccctatgcagcctggcttcctctgtgctctttcctcccctacttcgagccccaattcccagtcctgtcccaggaaaggacccaccctactcgctctgacccgcaactccatagacacccagtccaccctacagcagtcccgagtcgcctccaaaggcacatgcagtttccttcacggaaacttcgctgcaagctcagccactggcccgcgcgccctccccaccagcgatccgcgcacaaaacttcccgaagccggggacctgctgagccgcccgcgcccggaggcatggaagggcggccagaggccccaaggcttgcgaaaacccagcggctcgagcctgctcccttctcggagcctggctccgctccccggcggcgcgtgagtccccctcactgcttggtgagaaccctgcatcctcgagcgggatgctgccctgagcgctgcggcaaggggcgcaacactcacaccctaagtgccaaagagcgcgggggcgtttcccacgccaggacaattcccacagaagttgcaaaggaacggacagagcgtgcagaggaggaacaggcagcgcgtgcagaggagattccgagaaggttagggccaactacggatctccaaggtccatgcatccccccaacacgtagaagcgcgggggccagacccgtggcgccgccggggagtgcagcgcagccccgcaggcagtgcatgcggggcgcaagacagacacatctctggcagtaa

SEQ ID NO: 101 - protein, 320 aa, Homo sapiens
MHQCSNTVNHYDKPPDLCTHPQPESSALSSQTHRHDCSKHGHKAKKHRKLDVPSLGKDAQPLSHKETQAGSKSKSPYAAWLPLCSFLPYFEPQFPVLSQERTHPTRSDPQLHRHPVHPTAVPSRLQRHMQFPSRKLRCKLSHWPARPPHQRSAHKTSRSRGPAEPPAPGGMEGRPEAPRLAKTQRLEPAPFSEPGSAPRRRVSPPHCLVRTLHPRAGCCPERCGKGRNTHTLSAKERGGVSHARTIPTEVAKERTERAEEEQAARAEEIPRRLGPTTDLQGPCIPPTRRSAGARPVAPPGSAAQPRRQCMRGARQTHLWQ

SEQ ID NO: 102 - DNA, 2432 bp, Homo sapiens
aagcagcggccgctcagtctgggcgcttgcaggctgctaaacccaaccgcagttgactagcacctgctaccgcgcctttgcttcctggcgcacgcggagcctcctggagcctgccaccatcctgcctactacgtgctgccctgcgcccgcagccatgtgccgcaccctggccgccttccccaccacctgcctggagagagccaaagagttcaagacacgtctggggatctttcttcacaaatcagagctgggctgcgatactgggagtactggcaagttcgagtggggcagtaaacacagcaaagagaatagaaacttctcagaagatgtgctggggtggagagagtcgttcgacctgctgctgagcagtaaaaatggagtggctgccttccacgctttcctgaagacagagttcagtgaggagaacctggagttctggctggcctgtgaggagttcaagaagatccgatcagctaccaagctggcctccagggcacaccagatctttgaggagttcatttgcagtgaggcccctaaagaggtcaacattgaccatgagacccacgagctgacgaggatgaacctgcagactgccacagccacatgctttgatgcggctcaggggaagacacgtaccctgatggagaaggactcctacccacgcttcctgaagtcgcctgcttaccgggacctggctgcccaagcctcagccgcctctgccactctgtccagctgcagcctggacgagccctcacacacctgagtctccacggcagtgaggaagccagccgggaagagaggttgagtcacccatccccgaggtggctgcccctgtgtgggaggcaggttctgcaaagcaagtgcaagaggacaaaaaaaaaaaaaaaaaaaaaaaaaatgcgctccagcagcctgtttgggaagcagcagtctctccttcagatactgtgggactcatgctggagaggagccgcccacttccaggacctgtgaataagggctaatgatgagggttggtggggctctctgtggggcaaaaaggtggtatgggggttagcactggctctcgttctcaccggagaaggaagtgttctagtgtggtttaggaaacatgtggataaagggaaccatgaaaatgagaggaggaaagacatccagatcagctgttttgcctgttgctcagttgactctgattgcatcctgttttcctaattcccagactgttctgggcacggaagggaccctggatgtggagtcttcccctttggccctcctcactggcctctgggctagcccagagtcccttagcttgtacctcgtaacactcctgtgtgtctgtccagccttgcagtcatgtcaaggccagcaagctgatgtgactcttgccccatgcgagatatttatacctcaaacactggcctgtgagccctttccaagtcagtggagagccctgaaaggaggctcacttgaatccagctcagtgctctgggtggccccctgcaggtggcccctgaccctgcgttgcagcagggtccacctgtgagcaggcccgccctggggcctcttcctggatgtgccctctctgagttctgtgctgtctcttggaggcagggcccaggagaacaaagtgtggaggcctcggggagtggcttttccagctctcatgccccgcagtgtggaacaaggcagaaaaggatcctaggaaataagtctcttggcggtccctgagagtcctgctgaaatccagccagtgttttttgtggtatgagaacaggcaaaaagagatgccccgagatagaaggggagccttgtgtttctttcctgcagacgtgagatgaacactggagtgggcagaggtggcccaggaccatggcacccttagagtgcagaagctggggggagaggctgcttcgaagggcaggactggggataatcagaacctgcctgtcacctcagggcatcactgaacaaacatttcctgatggcaactcctgcggcagagcccaggctggggaagtgaactacccagggcagcccctttgtggcccaggataatcaacactgttctctctgtaccatgagctcctccaggagattatttaagtgtattgtatcattggttttctgtgattgtcataacattgtttttgttattgttggtgctgttgttatttattattgtaatttcagtttgcctctactggagaatctcagcaggggtttcagcctgactgtctccctttctctaccagactctacctctgaatgtgctgggaacctcttggagcctgtcaggaactcctcactgtttaaatatttatttattgtgacaaatggagctggtttcctagatatgaatgatgtttgcaatccccattttcctgtttcagcatgttatattcttataaaataaaagcaaaagtcaaatatga

SEQ ID NO: 103 - protein, 202 aa, Homo sapiens
MCRTLAAFPTTCLERAKEFKTRLGIFLHKSELGCDTGSTGKFEWGSKHSKENRNFSEDVLGWRESFDLLLSSKNGVAAFHAFLKTEFSEENLEFWLACEEFKKIRSATKLASRAHQIFEEFICSEAPKEVNIDHETHELTRMNLQTATATCFDAAQGKTRTLMEKDSYPRFLKSPAYRDLAAQASAASATLSSCSLDEPSHT

SEQ ID NO: 104 - DNA, 1791 bp, Homo sapiens
cccagaaattctacccaagctccctcagcaccatgtaccgagcacttcggctcctcgcgcgctcgcgtcccctcgtgcgggctccagccgcagccttagcttcggctcccggcttgggtggcgcggccgtgccctcgttttggcctccgaacgcggctcgaatggcaagccaaaattccttccggatagaatatgatacctttggtgaactaaaggtgccaaatgataagtattatggcgcccagaccgtgagatctacgatgaactttaagattggaggtgtgacagaacgcatgccaaccccagttattaaagcttttggcatcttgaagcgagcggccgctgaagtaaaccaggattatggtcttgatccaaagattgctaatgcaataatgaaggcagcagatgaggtagctgaaggtaaattaaatgatcattttcctctcgtggtatggcagactggatcaggaactcagacaaatatgaatgtaaatgaagtcattagcaatagagcaattgaaatgttaggaggtgaacttggcagcaagatacctgtgcatcccaacgatcatgttaataaaagccagagctcaaatgatacttttcccacagcaatgcacattgctgctgcaatagaagttcatgaagtactgttaccaggactacagaagttacatgatgctcttgatgcaaaatccaaagagtttgcacagatcatcaagattggacgtactcatactcaggatgctgttccacttactcttgggcaggaatttagtggttatgttcaacaagtaaaatatgcaatgacaagaataaaagctgccatgccaagaatctatgagctcgcagctggaggcactgctgttggtacaggtttaaatactagaattggctttgcagaaaaggttgctgcaaaagtggctgcacttacaggcttgccttttgtcactgctccgaataaatttgaagctctggctgctcatgacgctctggttgagctcagtggagccatgaacactactgcctgcagtctgatgaagatagcaaatgatattcgatttttgggttctggtcctcggtcaggtctgggagaattgatcttgcctgaaaatgaaccaggaagcagtatcatgccaggcaaggtgaaccctactcagtgtgaagcaatgaccatggttgcagcccaagtcatggggaaccatgttgctgtcactgtcggaggcagcaatggacattttgagttgaatgttttcaagccaatgatgattaaaaatgtgttacactcagccaggctgctgggggatgcttcagtttcctttacagaaaactgcgtggtgggaatccaggccaatacagaaaggatcaacaagctgatgaatgagtctctaatgttggtgacagctctcaatcctcatatagggtatgacaaggcagcaaagattgctaagacagcacacaaaaatggatcaaccttaaaggaaactgctatcgaacttggctatctcacagcagagcagtttgacgaatgggtaaaacctaaggacatgctgggtccaaagtgatttacataaatttataatgaaaataaacatgtataaaatttaaaaaaacagactcccatttcttaaaaacggataagtttgaaaggaaactgctattgaacttaagcatctctagcagagcaatttgatcagtatataaaaccctaggatgtgctaggtctaagatggattaaacaagtataaaataaaatacatttataaaataaaaaggaaaacagacttaaaa

SEQ ID NO: 105 - protein, 510 aa, Homo sapiens
MYRALRLLARSRPLVRAPAAALASAPGLGGAAVPSFWPPNAARMASQNSFRIEYDTFGELKVPNDKYYGAQTVRSTMNFKIGGVTERMPTPVIKAFGILKRAAAEVNQDYGLDPKIANAIMKAADEVAEGKLNDHFPLVVWQTGSGTQTNMNVNEVISNRAIEMLGGELGSKIPVHPNDHVNKSQSSNDTFPTAMHIAAAIEVHEVLLPGLQKLHDALDAKSKEFAQIIKIGRTHTQDAVPLTLGQEFSGYVQQVKYAMTRIKAAMPRIYELAAGGTAVGTGLNTRIGFAEKVAAKVAALTGLPFVTAPNKFEALAAHDALVELSGAMNTTACSLMKIANDIRFLGSGPRSGLGELILPENEPGSSIMPGKVNPTQCEAMTMVAAQVMGNHVAVTVGGSNGHFELNVFKPMMIKNVLHSARLLGDASVSFTENCVVGIQANTERINKLMNESLMLVTALNPHIGYDKAAKIAKTAHKNGSTLKETAIELGYLTAEQFDEWVKPKDMLGPK

SEQ ID NO: 106 - DNA, 4992 bp, Homo sapiens
cagaagcaacaataattgtgaaaaatacttcagcagttatggactcatctgtcattcaaaggaaaaaagtagctgtcattggtggtggcttggttggctcattacaagcatgctttcttgcaaagaggaatttccagattgatgtatatgaagctagggaagatactcgagtggctaccttcacacgtggaagaagcattaacttagccctttctcatagaggacgacaagccttgaaagctgttggcctggaagatcagattgtatcccaaggtattcccatgagagcaagaatgatccactctctttcaggaaaaaagtctgcaattccctatgggacaaagtctcagtatattctttctgtaagcagagaaaatctaaacaaggatctattgactgctgctgagaaataccccaatgtgaaaatgcactttaaccacaggctgttgaaatgtaatccagaggaaggaatgatcacagtgcttggatctgacaaagttcccaaagatgtcacttgtgacctcattgtaggatgtgatggagcctattcaactgtcagatctcacctgatgaagaaacctcgctttgattacagtcagcagtacattcctcatgggtacatggagttgactattccacctaagaacggagattatgccatggaacctaattatctgcatatttggcctagaaatacctttatgatgattgcacttcctaacatgaacaaatcattcacatgtactttgttcatgccctttgaagagtttgaaaaacttctaaccagtaatgatgtggtagatttcttccagaaatactttccggatgccatccctctaattggagagaaactcctagtgcaagatttcttcctgttgcctgcccagcccatgatatctgtaaagtgctcttcatttcactttaaatctcactgtgtactgctgggagatgcagctcatgctatagtgccgttttttgggcaaggaatgaatgcgggctttgaagactgcttggtatttgatgagttaatggataaattcagtaacgaccttagtttgtgtcttcctgtgttctcaagattgagaatcccagatgatcacgcgatttcagacctatccatgtacaattacatagagatgcgagcacatgtcaactcaagctggttcatttttcagaagaacatggagagatttcttcatgcgattatgccatcgacctttatccctctctatacaatggtcactttttccagaataagataccatgaggctgtgcagcgttggcattggcaaaaaaaggtgataaacaaaggactctttttcttgggatcactgatagccatcagcagtacctacctacttatacactacatgtcaccacgatctttcctctgcttgagaagaccatggaactggatagctcacttccggaatacaacatgtttccccgcaaaggccgtggactccctagaacaaatttccaatctcattagcaggtgatagaaaggttttgtggtagcaaatgcatgatttctctgtgaccaaaattaagcatgaaaaaaatgtttccattgccatatttgattcactagtggaagatagtgttctgcttataattaaactgaatgtagagtatctctgtatgttaattgcaattactggttggggggtgcattttaaaagatgaaacatgcagcttccctacattacacacactcaggttgagtcattctaactataaaagtgcaatgactaagatccttcacttctctgaaagtaaggccctagatgcctcagggaagacagtaatcatgccttttctttaaaagacacaataggactcgcaacagcattgactcaacacctaggactaaaaatcacaacttaactagcatgttaactgcacttttcattacgtgaatggaacttacctaaccacagggctcagacttactagataaaaccagaaatggaaataaggaattcaggggagttccagagacttacaaaatgaactcattttattttcccaccttcaaatataagtattatcatctatctgtttatcgtctatctatctatcatctatctatctatctatcatctatctatctatctatctatctatctatctatctatctatctatctatctctatttatttatgtatttagagatcaggtctcactctgttgaccaggctggagtgcagtggtgagatctgggttcactgcaacctctgcctcctgggctcaagcaatcctcccacttcagcctcccaaatagctggggctaccatggtatttttcagtagagaccgggtcttgccatgctgcccaggccagtctcaaactcctggcctcatgtgatctgcccacctcagcctcccaaagtacagggattagagttgtgagccaccgctgccagcccagagttaccctctaaagataagaaaaaggctattaatatcatactaagtgaaggacaggaaagggttttattcataaattaaatgtctacatgtgccagaatggaaaggaaacaaggggagacaacttttatagaaatacaaagccattactttattcaatttcagaccctcagaagcaatttactaatttattcttcgactacatactgcagcagaaccagcaatacacttgatttttaaaagcacatttagtgaaatgttttctttggttcatccttctttaacaggctgctgagtcactcagaaatccttcaaacatgattaattatgaagatgaaacactagagtcatataagaaataaaaattgggcaataaaataaaatgattcagtgtttcttttctatattgtcaatgaaaaccttgagttctaataatccatgttcagtttgtagggaaagaaaaaataatttttccttctacccactttaggttccttggctggggcccctataacaaaagacagattgacaagagaaaaacaaacataaatttattagcgggtatatgtaatatatatgtgggaaatacaggggaatgagcaaatctcaaagagctggcgtcttagaactccctggcttatatagcatcgacaaagaacagtaaatttttagagaaacaacaaaacaaagaaaaagagctttgagtctgtaggggcagcaatttgggggaagcaaatatatgggagtttgccttgtagattcctctggtggtggtctccaggctgacaaggattcaaagttgtctctgaaactcctctttgtcatactgcacatataaaacgtcttttgtttccaacaagaggatttctttttcattctagaattatctccttgataacttgatcagatataggacatgacactgaatagagtccaacagtacaaaaaaaattcagtatgttctagctacttcacacatgtgtacgcgacagttatttttacagtaaggtattttcgagaaaaatgcattacgtgttttggaaaatagagtaatttaaaaaatatatttgaaatgaaaatctccaacacattagaagatgatgatgttagatgcccatcgtgtgccacaagtggttttttcattatgtaaagcacccgttgaattaaaagaatttgtttttgttcaacctcttcctgaggcccaagagcatatgggcaattcggatttcctgctggaccacaaggttctgttgatattacatagaaacgggtattccagacacttcttatgatgaaagtccaaaagtggcatccaatttaaggccccatctttcgttgccattcttcattcctacaaaggacgaacttggattacatcaactttggacccattggttttgtcgctgtcgtcaactgacagtgattcaccactggtgatgataaaaatgatggaagaagagttgaaagtcacttttttctttggcctgtccccatctttctgtgacatcacaatgggtctgatctgcatttcacttccagctgctggtaggtctttagcaggcctctggcacctcagcagtcggaggcacagaagctgcaaaagggatcttcgaaactgggcagagaaaaaataaagtggaatattaagtaaaagttgggcactaatctggattaacattcgaggaaatcagttgagctgatttaagttgttttttgtttgttagcaggtgtggatgtggggttatgtggtcatgctcagatctacctaaatcaccccagagctttatgtcttttattcattctaaatcttattaaccggaatatgtaggaccatttcaataccttgtaatcctccaagcttcaatctgcacacactttctatgagggcaggtacaactattaagagattttgaacattaagttagtccacaaatattcagtgggcatctactaggtgacagccactgtgctataattagagactttttactataagcatcaaaaacagataaggctcttcctggcagagtttacagcctggtgtacttgctaatgtctctttaattaggtgaagaattttttttttctatcgaaattactaatcagttggggaaaaaaatactatagcagacagcactaatgtcatcaacaaacattgttcttctccgtgtcctgggtacaacatcgaataatatttcttggcctcctttccgcttctcctctctgctgttcctctctacaagaacctgggaggccaacgcctaaagatcataatatcacaatggaaggaacctagattcctaaatgactgcataggacagatcccatctcctccacccaatacattattagactgaactgtgacctgaaatgagcaataaactctgtattaattcactgaaatgttggggttgcttgttatagtagtcggtccatcatgaccagtaaaacataaatcaaaagttaatgtaattgttatcccattatttagagcgaaataaatgttgaatatatggactttctcagattaggaaataccaattaaaaatataataaatagct

SEQ ID NO: 107 - protein, 486 aa, Homo sapiens
MDSSVIQRKKVAVIGGGLVGSLQACFLAKRNFQIDVYEAREDTRVATFTRGRSINLALSHRGRQALKAVGLEDQIVSQGIPMRARMIHSLSGKKSAIPYGTKSQYILSVSRENLNKDLLTAAEKYPNVKMHFNHRLLKCNPEEGMITVLGSDKVPKDVTCDLIVGCDGAYSTVRSHLMKKPRFDYSQQYIPHGYMELTIPPKNGDYAMEPNYLHIWPRNTFMMIALPNMNKSFTCTLFMPFEEFEKLLTSNDVVDFFQKYFPDAIPLIGEKLLVQDFFLLPAQPMISVKCSSFHFKSHCVLLGDAAHAIVPFFGQGMNAGFEDCLVFDELMDKFSNDLSLCLPVFSRLRIPDDHAISDLSMYNYIEMRAHVNSSWFIFQKNMERFLHAIMPSTFIPLYTMVTFSRIRYHEAVQRWHWQKKVINKGLFFLGSLIAISSTYLLIHYMSPRSFLCLRRPWNWIAHFRNTTCFPAKAVDSLEQISNLISR

SEQ ID NO: 108 - DNA, 2632 bp, Homo sapiens
gggcccggcgcgcggtagcgcgggcccctcagtgcacaatggctagagcaggcggcggagccccaaccccacccagtgcggagcgcgccgcgagccccgccgcaagctgagcgcctccgcccgccaggcgcgccggcgccgggccatgtactcggggaaccgcagcggcggccacggctactgggacggcggcggggccgcgggcgctgaggggccggcgccggcggggacactgagccccgcgcccctcttcagccccggcacctacgagcgcctggcgctgctgctgggctccattgggctgctgggcgtcggcaacaacctgctggtgctcgtcctctactacaagttccagcggctccgcactcccactcacctcctcctggtcaacatcagcctcagcgacctgctggtgtccctcttcggggtcacctttaccttcgtgtcctgcctgaggaacggctgggtgtgggacaccgtgggctgcgtgtgggacgggtttagcggcagcctcttcgggattgtttccattgccaccctaaccgtgctggcctatgaacgttacattcgcgtggtccatgccagagtgatcaatttttcctgggcctggagggccattacctacatctggctctactcactggcgtgggcaggagcacctctcctgggatggaacaggtacatcctggacgtacacggactaggctgcactgtggactggaaatccaaggatgccaacgattcctcctttgtgcttttcttatttcttggctgcctggtggtgcccctgggtgtcatagcccattgctatggccatattctatattccattcgaatgcttcgttgtgtggaagatcttcagacaattcaagtgatcaagattttaaaatatgaaaagaaactggccaaaatgtgctttttaatgatattcaccttcctggtctgttggatgccttatatcgtgatctgcttcttggtggttaatggtcatggtcacctggtcactccaacaatatctattgtttcgtacctctttgctaaatcgaacactgtatacaatccagtgatttatgtcttcatgatcagaaagtttcgaagatcccttttgcagcttctgtgcctccgactgctgaggtgccagaggcctgctaaagacctaccagcagctggaagtgaaatgcagatcagacccattgtgatgtcacagaaagatggggacaggccaaagaaaaaagtgactttcaactcttcttccatcatttttatcatcaccagtgatgaatcactgtcagttgacgacagcgacaaaaccaatgggtccaaagttgatgtaatccaagttcgtcctttgtaggaatgaagaatggcaacgaaagatggggccttaaattggatgccacttttggactttcatcataagaagtgtctggaatacccgttctatgtaatatcaacagaaccttgtggtccagcaggaaatccgaattgcccatatgctcttgggcctcaggaagaggttgaacaaaaacaaattcttttaattcaacgggtgctttacataatgaaaaaaccacttgtggcacacgatgggcatctaacatcatcatcttctaatgtgttggagattttcatttcaaatatattttttaaattactctattttccaaaacacgtaatgcatttttctcgaaaataccttactgtaaaaataactgtcgcgtacacatgtgtgaagtagctagaacatactgaattttttttgtactgttggactctattcagtgtcatgtcctatatctgatcaagttatcaaggagataattctagaatgaaaaagaaaatcctcttgttggaaacaaaagacgttttatatgtgcagtatgacaaagaggagtttcagagacaactttgaatccttgtcagcctggagaccagcaccagaggaatctacaaggcaaactcccatatatttgcttcccccaaattgctgcccctacagactcaaagctctttttctttgttttgttgtttctctaaaaatttactgttctttgtcgatgctatataagccagggagttctaagacgccagctctttgagatttgctcattcccctgtatttcccacatatatattacatatacccgctaataaatttatgtttgtttttctcttgtcaatctgtcttttgttataggggccccagccaaggaacctaaagtgggtagaaggaaaaattattttttctttccctacaaactgaacatggattattagaactcaaggttttcattgacaatatagaaaagaaacactgaatcattttattttattgcccaatttttatttcttatatgactctagtgtttcatcttcataattaatcatgtttgaaggatttctgagtgactcagcagcctgttaaagaaggatgaaccaaagaaaacatttcactaaatgtgcttttaaaaatcaagtgtattgctggttctgctgcagtatgtagtcgaagaataaattagtaaattgcttctgagggtctgaaattgaataaagtaatggctttgtatttctataaaagttgtctccccttgtttcctttccattctggcacatgtagacatttaattta

SEQ ID NO: 109 - protein, 402 aa, Homo sapiens
MYSGNRSGGHGYWDGGGAAGAEGPAPAGTLSPAPLFSPGTYERLALLLGSIGLLGVGNNLLVLVLYYKFQRLRTPTHLLLVNISLSDLLVSLFGVTFTFVSCLRNGWVWDTVGCVWDGFSGSLFGIVSIATLTVLAYERYIRVVHARVINFSWAWRAITYIWLYSLAWAGAPLLGWNRYILDVHGLGCTVDWKSKDANDSSFVLFLFLGCLVVPLGVIAHCYGHILYSIRMLRCVEDLQTIQVIKILKYEKKLAKMCFLMIFTFLVCWMPYIVICFLVVNGHGHLVTPTISIVSYLFAKSNTVYNPVIYVFMIRKFRRSLLQLLCLRLLRCQRPAKDLPAAGSEMQIRPIVMSQKDGDRPKKKVTFNSSSIIFIITSDESLSVDDSDKTNGSKVDVIQVRPL

SEQ ID NO: 110 - DNA, 7082 bp, Homo sapiens
ataagaaaaaaaatattttaaaagggtaaccgttaaacagctaggacctgcaacttcagtgcttctgggataactggaacatcagaaggacagattttattacagcataatcacacctcatttctttcatcagcagttgtcaccagacgctgttacttcctaaaatggcggacaatcttcccacagagtttgatgtggttataatagggacaggtttgcccgaatccatccttgcagctgcatgttcaagaagtggtcagagggttctgcatattgattcaagaagctactatggaggaaactgggctagtttcagcttttcaggattgctatcctggttgaaggagtatcagcaaaacaatgacattggggaagaaagtactgttgtatggcaggacctgatccatgaaacagaagaagccatcactcttcgcaagaaggatgaaactattcaacacacagaagctttttgctacgccagtcaggatatggaggacaacgttgaagagattggtgctctgcagaaaaatccttctttgggggtgtctaataccttcactgaagttctggattctgcattacctgaagaaagccagttatcgtattttaatagcgacgaaatgcctgcaaaacacactcagaaaagtgatacagagatttcactagaagtaactgatgtagaggaatcagtggagaaggaaaagtattgtggagataaaacttgtatgcacacagtttcagataaagatggagataaagatgaaagcaaatctacagtagaagataaggccgatgaaccaattagaaataggattacttactctcaaatagttaaagaaggcaggaggtttaatattgatttggtgtcaaaactgctgtattctcaaggattgctaattgatcttttaatcaaatcagatgttagtcgttatgtagaatttaaaaatgtcactaggattcttgcatttcgggaaggaaaggtagaacaagttccttgttccagagcagatgtctttaatagcaaggaactcaccatggttgaaaagaggatgctaatgaaatttctcacattttgtttagagtatgaacaacatcctgatgaataccaagctttcaggcagtgttcattttcagaatacttaaaaactaaaaaactaactcccaaccttcaacattttgtactgcactcaattgcaatgacatcagaatcatcttgcactacaatagatggtcttaacgcaactaaaaacttccttcagtgtctcggacggtttggcaacaccccctttttatttcccttgtatggccaaggagaaattccccagggtttctgtaggatgtgtgcagtttttggtggaatctattgtcttcgtcataaagtacaatgctttgtagtcgacaaagaatctggacgatgtaaagcaattatagatcactttggtcaaagaataaatgctaaatattttattgtggaagacagttacctttctgaggaaacatgctcaaatgtgcagtataagcagatctctagggcagtactcattacagatcagtctatactaaagacagatttagatcagcagacttccattctgatagttcctccagcagagccaggagcttgtgctgtacgggtcacagaattatgttcttcaaccatgacatgcatgaaggacacctatctggtacatttgacatgttcatcttctaaaacagcaagagaagacttagaatcagtggtgaagaaattattcactccgtatactgaaacagaaataaacgaggaagaacttacaaagccaagactcttgtgggctctttattttaatatgagagattcctcgggaatcagcagaagctcgtataatggcttgccttccaatgtttatgtctgctctgggcctgactgtggcctgggaaatgagcatgctgtcaagcaagctgaaacacttttccaggagatctttccaactgaagaattctgccctccacctccaaatccagaagacattatctttgatggtgatgataagcagccagaggctcctggaaccaataatgtagtaatggccaaactagaatcctctgaggaaagcaaaaacctagaaagcccagagaagcaccttcaaaattagaaaagagcaatctcgaaatgctgttttggacctccttcatggcatcagaattttctcatttaaaggacagtttcccatatgagtaattagaagtggttatatatgatgaatgctatgcagatgttgtctttaactctcagacattcagcattgaatatctttgttaacctatcaatgagtgatttattgattattgaacattttgtttagaatgggctatatgacccagaatcttaaaacagagttagctttattttagtattgggtatatatgtaagggttccatattagcaactcagcttaaaggtaatgtatttgctaatgatcttcagattttatctttgtctacagaacaattagtaatacccaagtaatattttaattacttttgcagctgttacagttgctgcggcctgttcgaatagtgaaacatacacaaatggtaaattatgtggatcttttgcatataatataaatgtatagacatggtggtaggaatagcaactaatacaaatgccaatatgataataaaatacatttgtctataatcgtttaaagattagctttgcatgatcctttatgcactgtgaaggtctgaagtttataatactcacttgacccttgtaactgatgaggcaatgatgccaccacagtattctaatttacaaaaagaattggagttcaattagtggttgtaaagctcattttggggaggttgattgcaaaggaaatttgaaagataagatttattcttatttaatacttcagaaaatttctgcagagccctgccctggcacttaaaatagcttccaataagtaacttagaccaaaaggaaaaatgaagtgccccaggagaagatacttcagaagggctgttctgaaattcctaaggaggaattcttaggaattcctaaggagaaacagagtgaggcctttttaacctgagattacagatacttataaaaccctctataaatagattacccaaggtttttcagtgagaatgaaacataccaccttgttggctctaccactttaattaatatcactataacataactgataggaatgaatcaaaggaggatttaccatgccctttcggttgtgtcccacttaacaaattgtgaagtaacaattttctgtaatctctcttgcctcttagctgttatccagagtatagaaactttttttctcccagagccacccaacgtcataaaactggtagtactctaatggtgaaaacctgtggagctgtcagaagacatgaacttgcttttcctctagtccagtttccattcttcagtcagagtatgatgatccctgtgacagtttttgctctgaaatagtatttatcatgtgtttggtacctagtattatgctttctcatgacagtttctcaacaatcctgtgaggcaaattcgcatgtaccctctgtattagtgtgttctcatgctgttgataaagacacacctgagatggtaatttgtaaagaaaaaggtttaatggactcacagttccatgtggctggggaggcctcacaatcatggtggaaggtgaaaggcacgtcttacatggcggtggacaagagagaatgagaactaagtgaaaagggaaacccttttaaaaccatcagatatcgtgagacttatttactaccatgagaacagtatgggggaaacaactccatgattcagttatctcccaccaggttcctcccacaacacgtgggaattataggagctacaattcaagatgagatttgagtgggaacacagccaaaccatatcaccttcaaagaagaaataagagaattattagtaatttgctcagaatctggtatgtggaagagccaacatggggacccagccttttgtgattctaaaacctttgatctttctactaacattcactgttagagagtgtaggcgctgcaggagaaagagaaagtgcccacgaaaattagtctagcattgccgggggtaaaaagcacacactggtcctgcagcttattgaatcagagaaatgtgaagataagatgaactaaacaaacatattttagagcatggatctcgaagcagaatttggctaaattttaacaaaatgttcttcagtaacacatctcatgatctgaagattgtgttacaaaaaatattatcaggccaaaatttgttcggaatacactaatttttgctcctctatatgtgaggaaaatgagactagacagatttaagtaattgacaacttacttaaagtagcaaagtcatggattgtattgacttttaaaaatatagtaaaagtcatatttaaactttatcctaaagtttaaatctaacagaacaactgaaatacttgaaatagacctataaaatagtaattaaaatgagaaatacataagatgataaataaaatgaaggtgaaggtattccagatctaccgaaaagattttcagtatcacagattattcataagaaattgagaaaaggaacaatcagaagttgcaaaagatggtatagccgaatataatggaaataggaaaaattagtcgaaaataaaggttgatttagaaatgaagaaaatgaatatatttcttaatacaaaataagtgggaaatgagaagttataccaataaaaagcatttaaaaatttaggggatattgtaacccagtataattttctgacaggttggactttgaccctaatggacttactggtgaactttttcaaatgtttaaataatgtctatccatgtatcatgaaggacagtatgcttcaaattgtcttttgaggcagacatgttctcagtactaaaagacatttttagaaggattttattctcaacagatgcaaaatgcaaaataaaatattggcaaacaatacagcaacaaataatttactatcactcaggattataaggctggtgttaagcagaacagccattaaatcagcatcaaaagaacaaatagtaaaatccaaagtattaattacagataacttttcaaaaattcatcattcacccttgatttaattatttctctggcaatgatttaatagacttctcggagtctgttaagtacttaaaccaagaactaccattattcctactgggaaaacataaacatttctcaagtggaaagtaaacagtgttggcactatttttatatatggttaaagagacctgtcattgcaataaaagccagcattcacaaaatgaggaagataaggaaagtagcataaatattttctattaacatggctttacaactgctaaaacttatagtataaaaatgtactaacaaagactaattcaagaagttgcaggatacacaatttttaaaaatctcatttctacatcttagcagtgacaaactgcaatttaaaaagtgtgtttggttattaatatatatgagacttttaaagaaagttatataactacatagagataaattaagaaagatgcctaaatagaagcaagtttaaagagctatatttttaaacatgaacaaactcccatgggagccatgccagtgtagtggaaaagtagtacatggggagatggggagtttttttgaaaaccagaattacagttctcatttcactacttaccagttgtatactcttgggaaagtcactcctagtatctatttcaccatctacagaagagaaatacttcacagaattattgtggggattaagttagataatgtgttttaaaatataaagctacatccaaagaaatgccaatatgtgacattagtatgaaatttactacagttccatttaacattccaactggttgctgtgtggaatatggcataattgtaataaattatttaggaaagcaagcaaagatgtaagtttttttaatttagggggaaaaaatgggagccttgctctccaaatccttaaaacatgctattaagcaacctttctgaatattctgtggtgccaagtagaaagtttaactgaaattaataagccaatggaaagaaagaaatattaataactgctggtggaaagactagctagatgtcagtgtggaaagattagatccactttacatgtgatattccaaatgaattaaaatgttaagtataaaaagaaaaatactacaagtctcacaccaatagtggtataaaggaacttcatggcaattggcaaggtagatcaactaagagaaaaagttttaaatgtgtagtaaataggaaaaagacaaaacaagatggaatttaaaagaagctatttgcattacacatggatgcactcagtttttgtaaaactatatgcatatccataagggtttgtactcttaggcaaatttataaagcgatcgtgtataaatgatataaaaaatcaatttgaatggtattcaaatttcctaatattaaaaatgcaactttgacttagttcatgctattgtattagcaaaactgttttaattgcatgtgtccttatagcagcagcattgtgtattagtagccttttaagagaactgtgtagaagactataaaaagggctttataactgatcttttgacatactcactttgagtggcatatgcccaggaaaatatttaaaagaaagaaaagctatttgtacaaagttttctagcagttccactcagataactttaagggggaaaaaagcccaacgattggaaatggttaagtaaattttggtgtattgctagtgctatcacagaatgttatatagccattcaataatattgatatatgtcaaattgtatgcaaaaaagtgagattcaaaaatgttaataagaacataaattgtgtttactgatacatgtgaaaatttaggtctacattgaaaagaatcagaagataacatgtaattcagtttaacattaggggttctttatttttcttctgttaaatattgatgtatgcaataaaaaataaaagattaattggtaaaaaaaaaaaaaaaaaa

SEQ ID NO: 111 - protein, 656 aa, Homo sapiens
MADNLPTEFDVVIIGTGLPESILAAACSRSGQRVLHIDSRSYYGGNWASFSFSGLLSWLKEYQQNNDIGEESTVVWQDLIHETEEAITLRKKDETIQHTEAFCYASQDMEDNVEEIGALQKNPSLGVSNTFTEVLDSALPEESQLSYFNSDEMPAKHTQKSDTEISLEVTDVEESVEKEKYCGDKTCMHTVSDKDGDKDESKSTVEDKADEPIRNRITYSQIVKEGRRFNIDLVSKLLYSQGLLIDLLIKSDVSRYVEFKNVTRILAFREGKVEQVPCSRADVFNSKELTMVEKRMLMKFLTFCLEYEQHPDEYQAFRQCSFSEYLKTKKLTPNLQHFVLHSIAMTSESSCTTIDGLNATKNFLQCLGRFGNTPFLFPLYGQGEIPQGFCRMCAVFGGIYCLRHKVQCFVVDKESGRCKAIIDHFGQRINAKYFIVEDSYLSEETCSNVQYKQISRAVLITDQSILKTDLDQQTSILIVPPAEPGACAVRVTELCSSTMTCMKDTYLVHLTCSSSKTAREDLESVVKKLFTPYTETEINEEELTKPRLLWALYFNMRDSSGISRSSYNGLPSNVYVCSGPDCGLGNEHAVKQAETLFQEIFPTEEFCPPPPNPEDIIFDGDDKQPEAPGTNNVVMAKLESSEESKNLESPEKHLQN

SEQ ID NO: 112 - DNA, 2632 bp, Homo sapiens
agaaatggcggttggggcggagcagggggctggcgcgggaagcggggctgtctggctcggttacgcccccacctcgccaggaatctaggagtcggtttgttttccgaacccatctccttccgctctcccgcccctgcaggctgtgtgccgagcttggaagaaagtgtgacccgttcgacggaacaaaggacatgacagcccggccccgtgcggccactgcggagcgttaggaacattccctaaaatggcggccggcgcgtcggaacagggcgggaggcggcggcgcgtgggggcgggacggggaggggcgcggccagccgggcttctgcttccgcgaccccggcggtgcagggcgggtggagtcgcggagtagtcctcatggccgccccgccggagcccggtgagcccgaggagaggaagtcccttaagctcctaggatttttagatgttgaaaatactccctgcgcccggcattcaatattgtatggttcattaggatctgttgtggctggctttggacattttttgttcactagtagaattagaagatcatgtgatgttggagtaggagggtttatcttggtgactttgggatgctggtttcattgtaggtataattatgcaaagcaaagaatccaggaaagaattgccagagaagaaattaaaaagaagatattatatgaaggtacccacctcgatcctgaaagaaaacacaacggcagcagcagcaattgaacaatcttgagcatagaagtcaatgtaaacgaagttaagatcaaccacataaaacatttcatgtgcaataagctctcaatcaagtaaataaagtttaagttgtagtcatttttttcccacacttgtgtggaatgaaaacttgccagtttattctggccctgtgtctactgccaggatagcattcttacgtgttacatatagtggacttgtcatccttaaaatgtgaacagaatttattggcagtgtggcaaagaattataaaacatagtgtttaatgtacttggagtttccttgtagtagtaagtatagagtttgatgataagtaaacgtcccttaacaaaaacctcaaccttattactatcccattaaaaaacagcaaatacttactgagttcttgtaagagctaatgtcattgtaagatttaaaactaagggcttttatcactttgcaaattattttttaaatgcattcatcatttgacagtgttctctcatttcttaaaatgcgagtcatcttccaaaagagttgtttttaactgccctaaacatttttggggaagtatgcagggtttaaatttttaagtataattagttctgaattaaaatatgcacatggaacttgtctggcagactgatgcaatagtaaaacaactgcagaattactattaatgtaaacaatccatttgaaagtcaatcagctgctcccattaaaatattatttaaaatacaatacccacagcatctaactaaatcctcaggatttattctccgggagaaattatccctttctaggaaaatgaagttatttctggttttaattcatacaatactttaagaaaatctgttaaatataacaaaacacaagctagatgcttaagaaatgcttaaagaaatattggggcgaaggtaacagcagtcaacaggattgtggccattactggtcctattattttgatgtaccatggaaggcacagaaatcgagcaaggaagaaaatattagttattttgatctacatctttttctaaagaaaagtggagcttgcctccagttcaattcacaagagcattttccctcccatgcccaccttttcttgtggctgtcgctaggaaggatgcagaggctgtgtggtttaccaaatgccttaacttagcagtgaatgacaactgtcaaacacatgttgagggaaaatttttactgattcacaaaaaggaagacagtttgcccactcttagtggcacaaatcaaagctgcatgcactacattatccaaattagtcgtaaccaaatagttaaaaaattctgctgggcacggtggctcatacctgtaatcccagcactttgggaggccgaggcagttggatcacctgaggttaggagtttgagaccagcctggccaacagggtgaaaccctgtctcgtctaaaaatacaaaaattagccgggcgtggtggtgcatgcctgtagtcccaggtactcaggaggctgaggcaggagaatcacttgaacccgaggtggggcaggcggaggttgcagtaagccaagatcgcgccattgcactctagcctaggtgacagagtgagactccatctcaaaaaaaaaaaaaaattccataggatgttcaaccatgttttcagaggccgcactgcatgaatgcgggaaaatgttgatgatcactaatcaataatctgatatttaacaaaatatggacaggccacttatgctcagttttaccttagttattccttggtatccacaggcccaagtccctttaaataaaataccctcatatttccatataatctacatacattctcccatatactttaaatcatctctagattacttataatgtctaatacaaaataaatgctatgtaaatgtaaaaaaaaaaaaaaaaaa

SEQ ID NO: 113 - protein, 118 aa, Homo sapiens
MAAPPEPGEPEERKSLKLLGFLDVENTPCARHSILYGSLGSVVAGFGHFLFTSRIRRSCDVGVGGFILVTLGCWFHCRYNYAKQRIQERIAREEIKKKILYEGTHLDPERKHNGSSSN

SEQ ID NO: 114 - DNA, 6789 bp, Homo sapiens
ctcgcgccaggcgagtctccgcgtctccctcgcgaactcggtgaaaggaattggcgccgttcgacaccaggcggatccgctctgcagcacgaacccatctccagccgcagccgcagccgccgcccgggccgaggagcagccgcagcagccgccaccagtggccgagtgagcggagccgagtttgaggcagcgcctagcggtgaatcggggccctcaccatgagttcctcgcctgttaatgtaaaaaagctgaaggtgtcggagctgaaagaggagctcaagaagcgacgcctttctgacaagggtctcaaggccgagctcatggagcgactccaggctgcgctggacgacgaggaggccgggggccgccccgccatggagcccgggaacggcagcctagacctgggcggggattccgctgggcgctcgggagcaggcctcgagcaggaggccgcggccggcggcgatgaagaggaggaggaagaggaagaggaggaggaaggaatctccgctctggacggcgaccagatggagctaggagaggagaacggggccgcgggggcggccgactcgggcccgatggaggaggaggaggccgcctcggaagacgagaacggcgacgatcagggtttccaggaaggggaagatgagctcggggacgaagaggaaggcgcgggcgacgagaacgggcacggggagcagcagcctcaaccgccggcgacgcagcagcaacagccccaacagcagcgcggggccgccaaggaggccgcggggaagagcagcggccccacctcgctgttcgcggtgacggtggcgccgcccggggcgaggcagggccagcagcaggcgggaggggacggcaaaacagaacagaaaggcggagataaaaagaggggtgttaaaagaccacgagaagatcatggccgtggatattttgagtacattgaagagaacaagtatagcagagccaaatctcctcagccacctgttgaagaagaagatgaacacttcgatgacacagtggtttgtcttgatacttataattgtgatctacattttaaaatatcaagagatcgtctcagtgcttcttcccttacaatggagagttttgcttttctttgggctggaggaagagcatcctatggtgtgtcaaaaggcaaagtgtgttttgagatgaaggttacagagaagatcccagtaaggcatttatatacaaaagatattgacatacatgaagttcgtattggctggtcactaactacaagtggaatgttacttggtgaagaagaattttcttatgggtattctctaaaaggaataaaaacatgcaactgtgagactgaagattatggagaaaagtttgatgaaaatgatgtgattacatgttttgctaactttgaaagtgatgaagtagaactctcgtatgctaagaatggacaagatcttggcgttgccttcaaaatcagtaaggaagttcttgctggacggccactgttcccgcatgttctctgccacaactgtgcagttgaatttaattttggtcagaaggaaaagccatattttccaatacctgaagagtatactttcatccagaacgtccccttagaggatcgagttagaggaccaaaggggcctgaagagaagaaagattgtgaagttgtgatgatgattggcttgccaggagctggaaaaactacctgggttactaaacatgcagcagaaaatccagggaaatataacattcttggcacaaatactattatggataagatgatggtggcaggttttaagaagcaaatggcagatactggaaaactgaacacactgttgcagagagccccccagtgtcttgggaaatttattgagattgctgcccgaaagaagcgaaattttattctggatcagacaaatgtgtctgctgctgcccagaggagaaaaatgtgcctgtttgcaggcttccagcgaaaagctgttgtagtttgcccaaaagatgaagactataagcaaagaacacagaagaaagcagaagtagaggggaaagacctaccagaacatgcggtcctcaaaatgaaaggaaactttaccctcccagaggtagctgagtgctttgatgaaataacctatgttgaacttcagaaggaagaagcccaaaaactcttggagcaatataaggaagaaagcaaaaaggctcttccaccagaaaagaaacagaacactggctcaaagaaaagcaataaaaataagagtggcaagaaccagtttaacagaggtggtggccatagaggacgtggaggattcaatatgcgtggtggaaatttcagaggaggagcccctgggaatcgtggcggatataataggaggggcaacatgccacagagaggtggtggcggtggaggaagtggtggaatcggctatccataccctcgtgcccctgtttttcctggccgtggtagttactcaaacagagggaactacaacagaggtggaatgcccaacagagggaactacaaccagaacttcagaggacgaggaaacaatcgtggctacaaaaatcaatctcagggctacaaccagtggcagcagggtcaattctggggtcagaagccatggagtcagcattatcaccaaggatattattgaatacccaaataaaacgaactgatacatatttctccaaaaccttcacaagaagtcgactgttttctttagtaggctaactttttaaacattccacaagaggaagtgcctgcgggttccttttttagaagctttgtgggttgattttttttcttttcttttttgtacatttttaattgcagtttaaaagtgaatcgtaagagaacctcagcattgtgcacgataagagaatgtgtcagtatttcagggttctacattttatctgtaaaatgtgacttttttttttttttatcacaacagaagtaaaatgttgctttgtacctggtgtcttttattaagaatttactccccccatttctcacagagaataacagtcgggagtcattgtcacaatataatagaaatgttagcaaccagattcatgtaaggactaagtggtcctcatgaattgcattaagactctgtactgctcatattacactccatcctctctgtagtttgctgggtagtggagggggtaagctaaatcatagtttctgacaataactgggaaggttttttcttaaaataacaatggaattggtataattgggattgaaaactaaaacttggaactaagatagagaagatggagtgtatgtagaagggctgttaaaaatgtaaaacttggttgcattatttgtggaggctcaaacttgtgaaggttaataccataatttttccatttgttctgcattttgattctgaaaagaaagctggctttgcccatttcttattaaaaaaacttgttgtaaatccagttgtctaatgggatctatatgaagttagccatgtctgtatgcccttctcccacaaaatactgtataactagtgtgcttgtagtagttaactccaccatctttgtaagctaatgaaattgtgagtcacccatttatatcttaatttttaatcatgtcagttcttgaatgggtatctccttagcctgctgatttctttttctttctaaagaaagtgggtggagaaattaatttagacgtttgtttgcaataaaaagaattcattttactcttgttttgggattctcgccatcaaggttcaaaatccctttatataactcccaagaggagaaatttattaagtgtgtgctttctggacagcttattctttactctgcatagaacatttaggttttaaaaacttaaatgtatactgacaattgatacataattatgaagtaaagttgaattcttcccttcccctcccccccagacaacttttaacatatttaatgaggggaaaaggtactggctgggagaagttaacactgagtttatcatctttacagaatgctaatgctgtcctcaactgattattttatatacatatatatgatacatgaaactctgggatcagatgcttttagaagccatcatgcaagccagtcattgatgtcactgctacacaacactgctaacttgactgtagctatgtaataacattagatcccctaattgtaattatattgggtttgcacagaacactttaatcttcccctcaccaatgtgaagtgaggaatcaggagtcaaactgtagaactaaaatttgacttcagtctagcgtttccttggtgtttttaggttgctttggtaagtttaggtttgctatatttctgattgcttagaattttgttttagccctttaaaatcagatcataaatatgaattcatacttctaaggaattttcttgctataagctggagtttaggtgatgtataggttcagttgagacatttttggaacaggcaaatccttagttaacataagatatttaacagttgaagatagtgtcatggatttttatcttttttagcaagtaatgctaagaaccactggcctgagctactactcttcagtatacattattaggattgcatagacttactagaggaacagtttcaggttttgatgctaatcagtgttgtgtcctaaagttgtcctttgtgcctttaaaaagttttggatatatcttctagtttaaaattgcttattaaggaattcattttataattgcagtgggaaagtaatggtcaagtaacactaggtagactatcatgcctgtttagcccagagaatttggggggagagagaatagataaaaatggcacccagaaaaatgttaaaatctttagtcaagactagaattaatacaattgtctacacttgtatggcagaaataaccttataaagtgtttaaggaattcagagaagggaatgtaccaaataagcaacagggagaaaattaggtaagaagtaagatacgaacgagaaacctgatttattgctcatccttcccttgcctccctaatggcaagcaaaactctgaacatctgaaaaggatgtagttctggacaaatcctgactacccagaggaaactcactgtgagattgctgttgatttgaagggtgctttcactaaggttatattttaaagtagaataacacatgctgagtgtaaactggctttggattggtcagctgcagtagtacaaaaacagcatagaatttgagaaaactaaaactgctatgagatagctatgagaaaactaaaactgctatgagatagaaatgatgtaaaattatgtggaaagttttccctcatatactcacatacagcctttgaagggctctggctctgaccggttgatggccttgagcgagatgaaatcatgaaattgagtcaaatcaatttgacattgaaatgacaagaggaaactcttaaatacataaaaacaagctctcatttgcctaggatagatactgtcttaaaaataaagactgaacctagatgttctgagcactagcaacaaggtattttaacaagtttaaaggaattctctgaaaaagttataaaattattctaggaaacataaccataatagtgttttaagggactttcacctggggattttatattcatgaacagagtgtattctgtatttaaaatgtctcatttgtgggaattggatgacatgttttttgataaatttattcacaatataaattgactttttattctaggaccatgtgaataatgggttccattgcacaaatacaaatattttaatagcttcttaggcagtggtgtagacatcttggatataaataattgtagatcttgtatatttgatttttaaaaaactagaataaacagagaggcataaacatatcttagagtccaagtggtagtgtttagcattggatataataaatggatgttttacaaagtgtttccataattctcttcctatacataaatgtcttgttttcaaaagtggatggaacttggctgggtgtggtggctcacgcctgtaatcctagcactttgggaggccaaggcgggaggatcacttgagctcaggagtttgagaccatcctgggcaacatagtgagacctggtctcttgaaaaaaaaaaagtggatggaacttgtagcagagaattttatctacttctcaacctgcttcagaatacccatttgagatgttcccctggaaagatgaacacaatactgcatctgaagccatttcttcccacctaacattcttaaaatgattagagtctaaactttgtcattcattcctaattctggagctctgaggttgaggtgttcagagtttggtgaataattgggtttaagttttaacattttagtaataataaaagcaaacacatacatgttaaggcctgacaataggttgcaatacccatgcattgggactcatacccagcataaatggtgagggactgaacattagtgctttgagcaagaattggttaactacctgagatctctaaaacagtaatttgaattactaatacataaaccacaagtctcttcgaattgttaattgcctaaatttaccctaaaacttagttaacgctgcagtgcctttattaaagcttttttttgggggggggtgtgggcacagctactccataactttaaattttaaagcatgaaggtgatctagctagtgttagtgcttgagttggtagttacataggctgctcttgaatcgtcctgttttctttgcctagtattagcaccacaggtacatatttgtaaaataagcattaaaagtactttgtccagc

SEQ ID NO: 115 - protein, 806 aa, Homo sapiens
MSSSPVNVKKLKVSELKEELKKRRLSDKGLKAELMERLQAALDDEEAGGRPAMEPGNGSLDLGGDSAGRSGAGLEQEAAAGGDEEEEEEEEEEEGISALDGDQMELGEENGAAGAADSGPMEEEEAASEDENGDDQGFQEGEDELGDEEEGAGDENGHGEQQPQPPATQQQQPQQQRGAAKEAAGKSSGPTSLFAVTVAPPGARQGQQQAGGDGKTEQKGGDKKRGVKRPREDHGRGYFEYIEENKYSRAKSPQPPVEEEDEHFDDTVVCLDTYNCDLHFKISRDRLSASSLTMESFAFLWAGGRASYGVSKGKVCFEMKVTEKIPVRHLYTKDIDIHEVRIGWSLTTSGMLLGEEEFSYGYSLKGIKTCNCETEDYGEKFDENDVITCFANFESDEVELSYAKNGQDLGVAFKISKEVLAGRPLFPHVLCHNCAVEFNFGQKEKPYFPIPEEYTFIQNVPLEDRVRGPKGPEEKKDCEVVMMIGLPGAGKTTWVTKHAAENPGKYNILGTNTIMDKMMVAGFKKQMADTGKLNTLLQRAPQCLGKFIEIAARKKRNFILDQTNVSAAAQRRKMCLFAGFQRKAVVVCPKDEDYKQRTQKKAEVEGKDLPEHAVLKMKGNFTLPEVAECFDEITYVELQKEEAQKLLEQYKEESKKALPPEKKQNTGSKKSNKNKSGKNQFNRGGGHRGRGGFNMRGGNFRGGAPGNRGGYNRRGNMPQRGGGGGGSGGIGYPYPRAPVFPGRGSYSNRGNYNRGGMPNRGNYNQNFRGRGNNRGYKNQSQGYNQWQQGQFWGQKPWSQHYHQGYY

SEQ ID NO: 116 - DNA, 6846 bp, Homo sapiens
ctcgcgccaggcgagtctccgcgtctccctcgcgaactcggtgaaaggaattggcgccgttcgacaccaggcggatccgctctgcagcacgaacccatctccagccgcagccgcagccgccgcccgggccgaggagcagccgcagcagccgccaccagtggccgagtgagcggagccgagtttgaggcagcgcctagcggtgaatcggggccctcaccatgagttcctcgcctgttaatgtaaaaaagctgaaggtgtcggagctgaaagaggagctcaagaagcgacgcctttctgacaagggtctcaaggccgagctcatggagcgactccaggctgcgctggacgacgaggaggccgggggccgccccgccatggagcccgggaacggcagcctagacctgggcggggattccgctgggcgctcgggagcaggcctcgagcaggaggccgcggccggcggcgatgaagaggaggaggaagaggaagaggaggaggaaggaatctccgctctggacggcgaccagatggagctaggagaggagaacggggccgcgggggcggccgactcgggcccgatggaggaggaggaggccgcctcggaagacgagaacggcgacgatcagggtttccaggaaggggaagatgagctcggggacgaagaggaaggcgcgggcgacgagaacgggcacggggagcagcagcctcaaccgccggcgacgcagcagcaacagccccaacagcagcgcggggccgccaaggaggccgcggggaagagcagcggccccacctcgctgttcgcggtgacggtggcgccgcccggggcgaggcagggccagcagcaggcgggaggtaagaagaaggcggaaggcggcggaggcggcggtcgccccggggctccggcggcgggggacggcaaaacagaacagaaaggcggagataaaaagaggggtgttaaaagaccacgagaagatcatggccgtggatattttgagtacattgaagagaacaagtatagcagagccaaatctcctcagccacctgttgaagaagaagatgaacacttcgatgacacagtggtttgtcttgatacttataattgtgatctacattttaaaatatcaagagatcgtctcagtgcttcttcccttacaatggagagttttgcttttctttgggctggaggaagagcatcctatggtgtgtcaaaaggcaaagtgtgttttgagatgaaggttacagagaagatcccagtaaggcatttatatacaaaagatattgacatacatgaagttcgtattggctggtcactaactacaagtggaatgttacttggtgaagaagaattttcttatgggtattctctaaaaggaataaaaacatgcaactgtgagactgaagattatggagaaaagtttgatgaaaatgatgtgattacatgttttgctaactttgaaagtgatgaagtagaactctcgtatgctaagaatggacaagatcttggcgttgccttcaaaatcagtaaggaagttcttgctggacggccactgttcccgcatgttctctgccacaactgtgcagttgaatttaattttggtcagaaggaaaagccatattttccaatacctgaagagtatactttcatccagaacgtccccttagaggatcgagttagaggaccaaaggggcctgaagagaagaaagattgtgaagttgtgatgatgattggcttgccaggagctggaaaaactacctgggttactaaacatgcagcagaaaatccagggaaatataacattcttggcacaaatactattatggataagatgatggtggcaggttttaagaagcaaatggcagatactggaaaactgaacacactgttgcagagagccccccagtgtcttgggaaatttattgagattgctgcccgaaagaagcgaaattttattctggatcagacaaatgtgtctgctgctgcccagaggagaaaaatgtgcctgtttgcaggcttccagcgaaaagctgttgtagtttgcccaaaagatgaagactataagcaaagaacacagaagaaagcagaagtagaggggaaagacctaccagaacatgcggtcctcaaaatgaaaggaaactttaccctcccagaggtagctgagtgctttgatgaaataacctatgttgaacttcagaaggaagaagcccaaaaactcttggagcaatataaggaagaaagcaaaaaggctcttccaccagaaaagaaacagaacactggctcaaagaaaagcaataaaaataagagtggcaagaaccagtttaacagaggtggtggccatagaggacgtggaggattcaatatgcgtggtggaaatttcagaggaggagcccctgggaatcgtggcggatataataggaggggcaacatgccacagagaggtggtggcggtggaggaagtggtggaatcggctatccataccctcgtgcccctgtttttcctggccgtggtagttactcaaacagagggaactacaacagaggtggaatgcccaacagagggaactacaaccagaacttcagaggacgaggaaacaatcgtggctacaaaaatcaatctcagggctacaaccagtggcagcagggtcaattctggggtcagaagccatggagtcagcattatcaccaaggatattattgaatacccaaataaaacgaactgatacatatttctccaaaaccttcacaagaagtcgactgttttctttagtaggctaactttttaaacattccacaagaggaagtgcctgcgggttccttttttagaagctttgtgggttgattttttttcttttcttttttgtacatttttaattgcagtttaaaagtgaatcgtaagagaacctcagcattgtgcacgataagagaatgtgtcagtatttcagggttctacattttatctgtaaaatgtgacttttttttttttttatcacaacagaagtaaaatgttgctttgtacctggtgtcttttattaagaatttactccccccatttctcacagagaataacagtcgggagtcattgtcacaatataatagaaatgttagcaaccagattcatgtaaggactaagtggtcctcatgaattgcattaagactctgtactgctcatattacactccatcctctctgtagtttgctgggtagtggagggggtaagctaaatcatagtttctgacaataactgggaaggttttttcttaaaataacaatggaattggtataattgggattgaaaactaaaacttggaactaagatagagaagatggagtgtatgtagaagggctgttaaaaatgtaaaacttggttgcattatttgtggaggctcaaacttgtgaaggttaataccataatttttccatttgttctgcattttgattctgaaaagaaagctggctttgcccatttcttattaaaaaaacttgttgtaaatccagttgtctaatgggatctatatgaagttagccatgtctgtatgcccttctcccacaaaatactgtataactagtgtgcttgtagtagttaactccaccatctttgtaagctaatgaaattgtgagtcacccatttatatcttaatttttaatcatgtcagttcttgaatgggtatctccttagcctgctgatttctttttctttctaaagaaagtgggtggagaaattaatttagacgtttgtttgcaataaaaagaattcattttactcttgttttgggattctcgccatcaaggttcaaaatccctttatataactcccaagaggagaaatttattaagtgtgtgctttctggacagcttattctttactctgcatagaacatttaggttttaaaaacttaaatgtatactgacaattgatacataattatgaagtaaagttgaattcttcccttcccctcccccccagacaacttttaacatatttaatgaggggaaaaggtactggctgggagaagttaacactgagtttatcatctttacagaatgctaatgctgtcctcaactgattattttatatacatatatatgatacatgaaactctgggatcagatgcttttagaagccatcatgcaagccagtcattgatgtcactgctacacaacactgctaacttgactgtagctatgtaataacattagatcccctaattgtaattatattgggtttgcacagaacactttaatcttcccctcaccaatgtgaagtgaggaatcaggagtcaaactgtagaactaaaatttgacttcagtctagcgtttccttggtgtttttaggttgctttggtaagtttaggtttgctatatttctgattgcttagaattttgttttagccctttaaaatcagatcataaatatgaattcatacttctaaggaattttcttgctataagctggagtttaggtgatgtataggttcagttgagacatttttggaacaggcaaatccttagttaacataagatatttaacagttgaagatagtgtcatggatttttatcttttttagcaagtaatgctaagaaccactggcctgagctactactcttcagtatacattattaggattgcatagacttactagaggaacagtttcaggttttgatgctaatcagtgttgtgtcctaaagttgtcctttgtgcctttaaaaagttttggatatatcttctagtttaaaattgcttattaaggaattcattttataattgcagtgggaaagtaatggtcaagtaacactaggtagactatcatgcctgtttagcccagagaatttggggggagagagaatagataaaaatggcacccagaaaaatgttaaaatctttagtcaagactagaattaatacaattgtctacacttgtatggcagaaataaccttataaagtgtttaaggaattcagagaagggaatgtaccaaataagcaacagggagaaaattaggtaagaagtaagatacgaacgagaaacctgatttattgctcatccttcccttgcctccctaatggcaagcaaaactctgaacatctgaaaaggatgtagttctggacaaatcctgactacccagaggaaactcactgtgagattgctgttgatttgaagggtgctttcactaaggttatattttaaagtagaataacacatgctgagtgtaaactggctttggattggtcagctgcagtagtacaaaaacagcatagaatttgagaaaactaaaactgctatgagatagctatgagaaaactaaaactgctatgagatagaaatgatgtaaaattatgtggaaagttttccctcatatactcacatacagcctttgaagggctctggctctgaccggttgatggccttgagcgagatgaaatcatgaaattgagtcaaatcaatttgacattgaaatgacaagaggaaactcttaaatacataaaaacaagctctcatttgcctaggatagatactgtcttaaaaataaagactgaacctagatgttctgagcactagcaacaaggtattttaacaagtttaaaggaattctctgaaaaagttataaaattattctaggaaacataaccataatagtgttttaagggactttcacctggggattttatattcatgaacagagtgtattctgtatttaaaatgtctcatttgtgggaattggatgacatgttttttgataaatttattcacaatataaattgactttttattctaggaccatgtgaataatgggttccattgcacaaatacaaatattttaatagcttcttaggcagtggtgtagacatcttggatataaataattgtagatcttgtatatttgatttttaaaaaactagaataaacagagaggcataaacatatcttagagtccaagtggtagtgtttagcattggatataataaatggatgttttacaaagtgtttccataattctcttcctatacataaatgtcttgttttcaaaagtggatggaacttggctgggtgtggtggctcacgcctgtaatcctagcactttgggaggccaaggcgggaggatcacttgagctcaggagtttgagaccatcctgggcaacatagtgagacctggtctcttgaaaaaaaaaaagtggatggaacttgtagcagagaattttatctacttctcaacctgcttcagaatacccatttgagatgttcccctggaaagatgaacacaatactgcatctgaagccatttcttcccacctaacattcttaaaatgattagagtctaaactttgtcattcattcctaattctggagctctgaggttgaggtgttcagagtttggtgaataattgggtttaagttttaacattttagtaataataaaagcaaacacatacatgttaaggcctgacaataggttgcaatacccatgcattgggactcatacccagcataaatggtgagggactgaacattagtgctttgagcaagaattggttaactacctgagatctctaaaacagtaatttgaattactaatacataaaccacaagtctcttcgaattgttaattgcctaaatttaccctaaaacttagttaacgctgcagtgcctttattaaagcttttttttgggggggggtgtgggcacagctactccataactttaaattttaaagcatgaaggtgatctagctagtgttagtgcttgagttggtagttacataggctgctcttgaatcgtcctgttttctttgcctagtattagcaccacaggtacatatttgtaaaataagcattaaaagtactttgtccagc

SEQ ID NO: 117 - protein, 825 aa, Homo sapiens
MSSSPVNVKKLKVSELKEELKKRRLSDKGLKAELMERLQAALDDEEAGGRPAMEPGNGSLDLGGDSAGRSGAGLEQEAAAGGDEEEEEEEEEEEGISALDGDQMELGEENGAAGAADSGPMEEEEAASEDENGDDQGFQEGEDELGDEEEGAGDENGHGEQQPQPPATQQQQPQQQRGAAKEAAGKSSGPTSLFAVTVAPPGARQGQQQAGGKKKAEGGGGGGRPGAPAAGDGKTEQKGGDKKRGVKRPREDHGRGYFEYIEENKYSRAKSPQPPVEEEDEHFDDTVVCLDTYNCDLHFKISRDRLSASSLTMESFAFLWAGGRASYGVSKGKVCFEMKVTEKIPVRHLYTKDIDIHEVRIGWSLTTSGMLLGEEEFSYGYSLKGIKTCNCETEDYGEKFDENDVITCFANFESDEVELSYAKNGQDLGVAFKISKEVLAGRPLFPHVLCHNCAVEFNFGQKEKPYFPIPEEYTFIQNVPLEDRVRGPKGPEEKKDCEVVMMIGLPGAGKTTWVTKHAAENPGKYNILGTNTIMDKMMVAGFKKQMADTGKLNTLLQRAPQCLGKFIEIAARKKRNFILDQTNVSAAAQRRKMCLFAGFQRKAVVVCPKDEDYKQRTQKKAEVEGKDLPEHAVLKMKGNFTLPEVAECFDEITYVELQKEEAQKLLEQYKEESKKALPPEKKQNTGSKKSNKNKSGKNQFNRGGGHRGRGGFNMRGGNFRGGAPGNRGGYNRRGNMPQRGGGGGGSGGIGYPYPRAPVFPGRGSYSNRGNYNRGGMPNRGNYNQNFRGRGNNRGYKNQSQGYNQWQQGQFWGQKPWSQHYHQGYY

SEQ ID NO: 118 - DNA, 8526 bp, Homo sapiens
tggaagtatgcgagacttaagagctcaagtgactagtggtctcctgccatttccagaagtgactcttcaagcccttggagaagacgaaataacattagaatctgtgcttcgtggaaagtttgctgcagggaaaaatggacttgcttgcttggcttgtggtccacaacttgaggtagtaaactctataacaggagagcgattgtctgcttacagattcagtggagtcaatgaacagcctcctgtagttttagctgtgaaagaattctcttggcagaagagaactggattattaataggattggaagaaacagaagggagtgttctctgtctttatgaccttggaatatcaaaagtagttaaagcagttgttcttcctggaagggtaacagctattgaacctataattaatcatggaggagccagtgcaagcactcagcatttacatccaagtctgcgatggctttttggagtggcagctgtggtcactgatgttggacagatccttcttgttgacctatgtttggatgacttgtcatgcaatcaaaatgaagttgaagcatcagatcttgaagttctaactggtatcccagctgaagtaccacacattagagaaagtgtaatgagacaagggcgccatctgtgtttccagttagtaagtccaacaggaacagctgtttcaactcttagttacataagcaggacaaatcagcttgctgtaggtttttctgatggctatctagcactttggaacatgaaaagcatgaaaagagaatattacatacaattggaaagtggacaagttcctgtatatgctgtcacttttcaagaacctgagaatgatcctcggaattgctgttacttgtgggctgttcagtctacacaagatagtgaaggggatgttttgagtttgcatctgctgcagctggcctttggtaatagaaagtgtttggcatcaggacaaatcttatatgaggggttagaatactgtgaagaaagatacaccctggacctgacaggtggcatgttccctttgaggggacagacgagtaataccaaattgttgggatgccagagtatagagaaatttcgatctcatggtgacagggaggaaggcgtgaatgaagctctatcgcctgacactagtgtttcagtctttacctggcaggtgaatatatatggacagggaaagccttctgtatatttggggctttttgatataaatcgttggtatcatgcacaaatgccagattcgttaaggtcaggagaatatctacataattgctcttattttgcactgtggtcattggagtctgttgtaagtaggacttctccacatggcatcttggatatattagtacatgagagaagtttaaatagaggagtccctccttcatatccacctcccgagcagttttttaatccaagcacttataattttgatgccacttgtttgttaaactcgggagttgttcatttaacttgtactggctttcagaaggagactttgacttttttaaagaaatcaggtccatcactcaatgaactcattcctgatggttataatcgatgtcttgtagctggccttctttccccaagatttgttgatgttcagccttccagtttaagccaagaagaacagttagaagctatattgtcagcagcaattcagactagttccctgggacttttgactggttatatccgaagatggataacagaagaacaaccaaattctgccactaatttgcgctttgttcttgaatggacgtggaataaagtggttctcacaaaagaggaatttgacagactatgtgtgccattatttgatggttcgtgtcatttcatggatccacaaactatacagtctatccagcaatgctatttgcttcttagcaatcttaatatagtcttgagctgttttgcatcagaagcccgagagatcactgagagaggactgatagacttaagcaataagtttgtggtttcccacctcatctgtcagtatgcacaagtggttctttggttctctcattctgggcttttaccagaaggcatagatgattctgtgcagttgtcaaggttatgctacaactaccctgtaattcagaactactacaccagtcgtcgacagaagtttgagcgtttatcaagagggaagtggaatcccgattgcttgatgattgatggactggtttctcagttaggagagcgaattgagaagttgtggaaacgagatgaaggaggcacaggaaaatatcctcctgctagtctgcatgcagtacttgatatgtacctattagacggcgttactgaagcagccaaacactctattaccatttatttgctacttgatattatgtattcctttcccaacaaaacagacactcccattgaatctttcccaactgtatttgccatttcttggggccaagttaaacttattcaggggttttggttgatagatcataatgactatgagagtggtttggatcttttgtttcatccagctactgcaaaacctttgtcatggcaacattcaaagattattcaggcattcatgagtcagggcgagcacagacaagccctcagatatattcagacaatgaagccaacagtgtccagtggtaacgatgttatccttcacctcactgttttgctttttaataggtgtatggttgaagcctggaattttttgcggcaacattgcaataggttgaatatagaggagttactgaagcacatgtatgaagtctgtcaggaaatgggcttgatggaagatttactgaagttaccatttacagacactgagcaggaatgtttagtgaaatttttgcagtccagtgccagcgttcagaatcatgaattccttttagtgcaccatttgcagcgtgccaattatgtgcctgccttgaagctgaaccaaactctgaagattaatgttatgaatgatcgtgatcctcgtttgcgggagagatcactggctcgaaattctatattagaccagtatggaaaaatccttcctagagtccatcgaaaattagccattgaacgagctaagccttatcatctgtcaacatcatcagtttttcgattagtttctagacccaaaccattatcagcagttccaaagcaagttgtaacaggaactgtgttgacaagatctgttttcatcaacaatgtgttatctaaaattggagaagtttgggcaagcaaagaacctataaatagcaccacacctttcaatagttctaaaatagaagaaccatctcctatagtgtattcgctcccagctccagagctgcctgaggcattttttggaacaccaatttcaaaagcatcacaaaaaatttctagactgctagatttggttgttcagcctgtcccccggccttctcagtgttcggagtttattcagcaaagctccatgaaatctcctttgtacctagtatcccgttcactgccctcaagttcgcaattaaaaggatcgcctcaggccatctccagggcttcagaattacatttgcttgaaactcctcttgtagttaagaaagctaaaagtttggccatgtcagttactacttctggattttctgagttcactcctcagtccatcctgaggtctactcttcgatcaacacctttagcatctccctctccatcacctggaaggtctcctcaacgacttaaagaaactagaatttcatttgtggaagaagatgtccacccaaaatggattcctggggctgcagatgatagcaaattagaagtatttactacacctaaaaaatgtgcagttccagtggaaactgaatggctgaagagcaaagataggaccacatcttttttcctgaacagccctgaaaaggagcatcaagaaatggatgaggggtcacaaagtttagagaaactggatgtgagcaaaggaaacagcagtgtttcaatcacatccgatgagactaccttagagtatcaggatgcaccgtcaccggaagaccttgaagagactgttttcacggcctctaagcccaaaagctcttccactgcactaactactaatgtaactgaacaaactgaaaaggatggagataaagatgtatttgcatcagaagtaactccttcagacctacagaaacaaatgggcaatttagaagatgcagaaacaaaggatctcttagttgcagcagaggcattttcagaattgaatcacttaagcccggttcaaggaactgaagcttctctttgtgcaccatcagtctatgaagggaaaatcttcacccagaagtccaaggtaccagtgttggacgaaggattaacatctgttgaaacctacacccctgcaattagagcaaatgacaataaatctatggctgatgtccttggtgatggtggaaactcctcgctcactatctctgaaggtcctattgtctctgagcgcaggcttaaccaggaagtagcgctgaacttaaaagaagatcatgaagtagaagttggtgtactaaaagaaagtgttgacttaccagaagaaaagcttccaatttctgacagccctcctgatactcaagaaattcatgtgattgaacaagaaaagcttgaagctcaagattcaggagaagaggctaggaatctttcatttaatgagttatatccctctggaacacttaagcttcagtacaattttgatactattgaccaacagttttgtgacttagctgataacaaagacactgctgaatgtgacattgctgaagtagatggggaactttttgtggctcaaagcaactttaccttgatattggaaggtgaagaaggagaagttgagccaggtgattttgcatcatctgatgtgttacctaaagcagctaacacagcaactgaagaaaaacttgtatgcagtggggaaaatgataatcatggacaaattgcaaatttgccatctgccgtaactagtgaccaaaagtcccaaaaagtagacactttaccatatgtgcctgaacctattaaagtagcaattgcagaaaatttactagatgtaattaaagacacaagaagtaaagaaattacttcagatacaatggaacagtccattcatgaaacaatacctttagtgagccaaaacataatgtgtcccactaaattggtcaaatctgcatttaagactgctcaggaaacaagcacaatgactatgaatgtcagccaggttgatgacgtggtttcctccaaaactcgtacgagaggtcaacgtatccaaaacgtgaatgtcaaatcagcacaacaggaagcatcagcagatgttgctactcctaagatgccagggcagtcagtcaggaagaaaactaggaaggcaaaagaaatttctgaagcttctgaaaacatctattctgatgtcagaggactatctcagaaccagcaaatacctcaaaattctgttacgcctaggagaggaaggagaaagaaagaagttaatcaggacatactagaaaacaccagttctgtggaacaagaattacagatcactacaggtagggaatcaaaaagattaaaatcatctcagctgttggaaccagcagttgaagaaactactaaaaaagaagttaaggtttcatctgttacaaaaaggactcctagaagaattaaaagatctgtagaaaatcaggaaagtgttgaaattataaatgatctaaaagttagtacggtaacaagtcctagcagaatgatcagaaaattgagaagtactaatttagatgcttctgaaaatacaggaaataagcaagatgataaatccagtgacaagcagctgcgtattaaacatgttagaagggtcagagggagagaagttagtccatcagatgtgagagaagactccaaccttgagtcatctcagttgactgttcaagcagaatttgatatgtctgccatacctagaaaacgtggtagaccaagaaaaatcaatccatctgaagatgtaggatctaaggctgttaaggaagagagaagccccaagaagaaagaagctcccagcattagaaggagatctacaagaaataccccagctaaaagtgaaaatgttgatgttggaaaaccagctttaggaaaatccattttagtgccaaacgaggaactttcgatggtgatgagctctaagaaaaaacttacaaaaaagactgaaagtcaaagccaaaaacgttcattgcactcagtatcagaagaacgcacagatgaaatgacacataaagaaacaaatgagcaggaagaaagattgctcgccacagcttccttcactaaatcatcccgcagcagcaggactcggtctagcaaggccatcttgttgccggacctttctgaaccaaacaatgagcctttattttctccagcgtcagaagttccaaggaaagcaaaagctaaaaaaatagaggttcctgcacagctgaaagaattagtttcggatttatcttctcagtttgtcatctcacctcctgctttaaggagcagacaaaaaaacacatccaataagaacaagcttgaagatgaactgaaagatgatgcacaatcagtagaaactctgggaaagccaaaagcgaaacgaatcaggacgtcaaaaacaaaacaagcaagcaaaaacacagaaaaagaaagtgcttggtcacctcctcccatagaaattcggctgatttcccccttggctagcccagctgacggagtcaagagcaaaccaagaaaaactacagaagtgacaggaacaggtcttggaaggaacagaaagaaactgtcttcctatccaaagcaaattttacgcagaaaaatgctgtaatttcttgggaagattttaatgtacacctatttgtaaagtcatcagaatagtgtggattattaaatatctagtttggaagaaaataatttatataaattattgtaaatttttatgtaaacagaaggtcttcaataagtaaagtaactccatatggagtgattgtttcagtccaggcaatttttctattttatattaagacttcatacatttatatatgtaaatatggcttattaatggaatgttaaataaaatgtatacttcacagtcgtttgtgtcttggatttttgaaagggaggggatatctgtttaaatagttttatatgctcattggtctcattttctctataattaaaatactagaccagtcttaaaatggggatgattgaagtattgatatttctttttacagttactattttataatttatgcactttgattctgtgattcagatttctaatcagaaaatgtatttttttgtttttggctgttactatgttaaaattgaattatgggcatgtcattttgccatctttgtagtttcacaaattttgtgtaatctacctcaaatgaataatccaagtattggttaactataatgttggcatctcttattcggcaagcttaaaggctctttaaagtcttaattagtcaaagactaatccaggttagattgaccggttcactgctcacttgcaaccttatcaaagggtttgacaaagggaaatgtaaaataaatctgtttatggatattgagtgcatcttgtatgtgcctaatattgataggatgagatgtctgaacaaatttttataatattgctgtgaaggagcttgctattgaaccacagaaatcccttaatattcaggttttaaaactggcaaattctcacaggacctcaggcacagattattgaggttgggagagagtgagtagatgtagaaaaggagaaaaacaacacacgccctgttctctacagtacaactgtgtgcaattaagcaatggtacttgatgtaggctctaacactcatcaataaataagtgttgtaaaataatttataacaggtaatcgatagtgtgtaatgaatggactattaataattgattatctagaaacgaactgctttcgtgggcttttaatattttaatgtgaagcatatgcagtgtgctttctgcatttatttttctaccaaataatacagataatgagaaattggtgaaaatgcctacgcaaagtgttgacagtgtgaaagcagtgcgagtgcggccttttagtcaggttagtgatggatgttacgctgccttgttgaaaatttcactgactttgattttattacttttttaatgatagttatcaaacttgtatttaagctgcttgtcatttatggaatattgaacttatttaaatgaacttgttaaatgaataaagagctaaacataattcagtaaacaattcctttgcgcaagtagcacaataaacatggatgcaacgtatgtcaagttaatacttttttaaaccaacgcaatttggtgaatatagatgtgtggtacctgtttttaataagtgtactttttttcccccctccgtgaatgtagatcataagcaaacaaattgcctgttctaaatgaactttacatatattttaaatgaatgtatgtacttacgtataaatgtctttatatagcttgaataaaaacactgctcattaaaaaaaaaaaaaa

SEQ ID NO: 119 - protein, 2266 aa, Homo sapiens
MRDLRAQVTSGLLPFPEVTLQALGEDEITLESVLRGKFAAGKNGLACLACGPQLEVVNSITGERLSAYRFSGVNEQPPVVLAVKEFSWQKRTGLLIGLEETEGSVLCLYDLGISKVVKAVVLPGRVTAIEPIINHGGASASTQHLHPSLRWLFGVAAVVTDVGQILLVDLCLDDLSCNQNEVEASDLEVLTGIPAEVPHIRESVMRQGRHLCFQLVSPTGTAVSTLSYISRTNQLAVGFSDGYLALWNMKSMKREYYIQLESGQVPVYAVTFQEPENDPRNCCYLWAVQSTQDSEGDVLSLHLLQLAFGNRKCLASGQILYEGLEYCEERYTLDLTGGMFPLRGQTSNTKLLGCQSIEKFRSHGDREEGVNEALSPDTSVSVFTWQVNIYGQGKPSVYLGLFDINRWYHAQMPDSLRSGEYLHNCSYFALWSLESVVSRTSPHGILDILVHERSLNRGVPPSYPPPEQFFNPSTYNFDATCLLNSGVVHLTCTGFQKETLTFLKKSGPSLNELIPDGYNRCLVAGLLSPRFVDVQPSSLSQEEQLEAILSAAIQTSSLGLLTGYIRRWITEEQPNSATNLRFVLEWTWNKVVLTKEEFDRLCVPLFDGSCHFMDPQTIQSIQQCYLLLSNLNIVLSCFASEAREITERGLIDLSNKFVVSHLICQYAQVVLWFSHSGLLPEGIDDSVQLSRLCYNYPVIQNYYTSRRQKFERLSRGKWNPDCLMIDGLVSQLGERIEKLWKRDEGGTGKYPPASLHAVLDMYLLDGVTEAAKHSITIYLLLDIMYSFPNKTDTPIESFPTVFAISWGQVKLIQGFWLIDHNDYESGLDLLFHPATAKPLSWQHSKIIQAFMSQGEHRQALRYIQTMKPTVSSGNDVILHLTVLLFNRCMVEAWNFLRQHCNRLNIEELLKHMYEVCQEMGLMEDLLKLPFTDTEQECLVKFLQSSASVQNHEFLLVHHLQRANYVPALKLNQTLKINVMNDRDPRLRERSLARNSILDQYGKILPRVHRKLAIERAKPYHLSTSSVFRLVSRPKPLSAVPKQVVTGTVLTRSVFINNVLSKIGEVWASKEPINSTTPFNSSKIEEPSPIVYSLPAPELPEAFFGTPISKASQKISRLLDLVVQPVPRPSQCSEFIQQSSMKSPLYLVSRSLPSSSQLKGSPQAISRASELHLLETPLVVKKAKSLAMSVTTSGFSEFTPQSILRSTLRSTPLASPSPSPGRSPQRLKETRISFVEEDVHPKWIPGAADDSKLEVFTTPKKCAVPVETEWLKSKDRTTSFFLNSPEKEHQEMDEGSQSLEKLDVSKGNSSVSITSDETTLEYQDAPSPEDLEETVFTASKPKSSSTALTTNVTEQTEKDGDKDVFASEVTPSDLQKQMGNLEDAETKDLLVAAEAFSELNHLSPVQGTEASLCAPSVYEGKIFTQKSKVPVLDEGLTSVETYTPAIRANDNKSMADVLGDGGNSSLTISEGPIVSERRLNQEVALNLKEDHEVEVGVLKESVDLPEEKLPISDSPPDTQEIHVIEQEKLEAQDSGEEARNLSFNELYPSGTLKLQYNFDTIDQQFCDLADNKDTAECDIAEVDGELFVAQSNFTLILEGEEGEVEPGDFASSDVLPKAANTATEEKLVCSGENDNHGQIANLPSAVTSDQKSQKVDTLPYVPEPIKVAIAENLLDVIKDTRSKEITSDTMEQSIHETIPLVSQNIMCPTKLVKSAFKTAQETSTMTMNVSQVDDVVSSKTRTRGQRIQNVNVKSAQQEASADVATPKMPGQSVRKKTRKAKEISEASENIYSDVRGLSQNQQIPQNSVTPRRGRRKKEVNQDILENTSSVEQELQITTGRESKRLKSSQLLEPAVEETTKKEVKVSSVTKRTPRRIKRSVENQESVEIINDLKVSTVTSPSRMIRKLRSTNLDASENTGNKQDDKSSDKQLRIKHVRRVRGREVSPSDVREDSNLESSQLTVQAEFDMSAIPRKRGRPRKINPSEDVGSKAVKEERSPKKKEAPSIRRRSTRNTPAKSENVDVGKPALGKSILVPNEELSMVMSSKKKLTKKTESQSQKRSLHSVSEERTDEMTHKETNEQEERLLATASFTKSSRSSRTRSSKAILLPDLSEPNNEPLFSPASEVPRKAKAKKIEVPAQLKELVSDLSSQFVISPPALRSRQKNTSNKNKLEDELKDDAQSVETLGKPKAKRIRTSKTKQASKNTEKESAWSPPPIEIRLISPLASPADGVKSKPRKTTEVTGTGLGRNRKKLSSYPKQILRRKML

SEQ ID NO: 120 - DNA, 3352 bp, Homo sapiens
gtctccttgcggccggcggggtgctgggttcccgtctgctgcctctcggagagtcccgggtgactgccgcaggctccatcgccctgtggcctgcaggtattgcgagatttatagggaggacgctgggacccccaaaagctgggaaatgggactattggcattcagggatgtggctctagaattctctccagaggagtgggaatgcctggacccagctcagcggagtttgtatagggatgtgatgttagagaactacagaaacctgatctcccttggtgaggatagcttcaatatgcaattcctatttcacagtcttgctatgtctaagccagaactgatcatctgtctggaggcaaggaaagagccctggaacgtgaacacagagaagacagccagacactcagttttgtcttcttatcttactgaagacattttgccagagcagggcctgcaagtttcattccaaaaagtgatgctgagaagatatgaaagatgttgtcttgagaaattacgcttaaggaatgactgggaaattgtgggtgagtggaaagggcagaaggcaagttataatggacttgacctatgctcagcaactactcatagcaaaaactttcaatgcaataaatgtgtgaaaggttttagtaaatttgcaaatctaaataaatgtaagataagccatactggagaaaaaccattcaaatgcaaagaatgtggcaatgtctcttgcatgtctttaataatgactcaacagcagagaatccatattggagagaacccgtaccaatgtaaaaaatgtggcaaagcctttaatgagtgctcatgctttactgactgtaagagaattcatgttggagagaaacattgcaaatgtgaagaatgtaataacatttttaagtcttgctcaagtcttgctgttgttgagaaaaatcatactgaaaagaaaacctacagatgtgaagaatgtggcaaagcttttaacctgtgctcagttcttactaaacataagaaaattcatactggagagaaaccatacaaatgtgaagaatgtggcaaatcctttaagttgttcccataccttactcaacacaagagaattcatagtagagagaaaccctacaagtgtgaagaatgtggcaaagtctttaaattgttgtcataccttactcaacatagaagaattcatactggagagaaaaccttccgatgtgaagaatgtggaaaagcctttaaccagagctcacatctgactgaacataggagaattcatactggtgagaaaccatacaaatgtgaggaatgtggcaaagcttttacctggttctcataccttattcagcataagagaattcatactgggcagaaaccctacaaatgtgaggaatgtggcaaagcttttacctggttttcataccttactcaacataagagaattcatactggagagaaaccctacaaatgtgatgaatgtggcaaagcttttaactggttttcatatcttactaatcataagagaattcatactggagagaaaccctacaaatgtgaagaatgtggcaaagcctttggccagagctcacacctttctaaacataagacaattcataccagagagaaaccatacaagtgtgaggaatgtggcaaagcctttaaccactctgcacaacttgctgtacatgagaaaactcatacctgagaaaaaccctacaattctaaacaatatggcatagtctttaatacctattcacaacttcacagcagaatatttttactgaataagagtgttacaaatgtaatgactgtcaaaaggccatttacagtctatgagcctttgagtgcactaaaatgtttaggctacgaacaatacaaatagaccggttcaacacctccacttatatcacagctcttactgtacacagaagaatttatactggagggaaaccctccagttgctcaaactgtattcaatttcaaagactttgtattggagagaaaccctacaaatgtaataaatgcagaaacaacatttgttcaaaaaatatacctcagaaaacaccagagtgttcacactaaaaactgttttacagatgcagtaaatgtgaaaaaatgtctaatcaaaaattacatcaaaacacatccaagaattcatagtaaaaagcactaagtcactgacactttcagacattactgtaaatctgagtgttggttatagagaataattcaaagttaagttaaagtaagtaggagattcaccttttggggaagttataattacatttcaagtataccttttggtgccaggcacggtggctctttcctatagttgctgcacttttggatgccgaggtcgggggattgcttgagcccaggagtttgggaccaggctgggcaacatggcaaaacctcatctctacaaaaagtaaaataaaagccaggcttggtggcacatgcctgttgtcccagctacttggaaggctcaggtgggaggattgcttgagcctggaggttgaggatgcagtgagctgctatctggcaacttcactcctgcctgggcaacagagcaagaccctttctcaataataataataacaacataataataaagtatactcggtgcactgaaagagttttagcttttttgaaaatcacatatttatgtaattcaagtcttaaatcacttgataccatgccttcatttctagtgtttatgtgaaggcatgaggcctactgttgctacatgaaagctgtgagagtttcttctatattcgggtgggtgttgttcatatccttttctttggaagattatggacattgcattgtaagcttcctgaagaaatttaactggagaggctctttgtacttgtcttataatagggttgtaagtgattcatgagataggtcttcagagtactattctgcattatatttaagaaagaaacatttgagttttacaagtcagttgtttttcctattgcacattaaggtaataaaattcagtggattttgaaatgctctttttagactgtttgaacttaatttgttttaataagacattgttttaatgtctttggaccgttgtacattaagtgatgcgtatcctaccaccaacgttaacctatctcaccttagttacggttgtaggtaacaaatggtaacaatacaatagtgggtaacatggtggaatagtatctctaatgatcccttctcccagtggcattaaacttcaaataatttgaaaaatattgttcccacacgttacaccttcattctgtttgctctttttgtaatgacagtgtcattattaaggctataataaagcctatataggattataatcaaaaaaaaaaaaaaaaaa

SEQ ID NO: 121 - protein, 515 aa, Homo sapiens
MGLLAFRDVALEFSPEEWECLDPAQRSLYRDVMLENYRNLISLGEDSFNMQFLFHSLAMSKPELIICLEARKEPWNVNTEKTARHSVLSSYLTEDILPEQGLQVSFQKVMLRRYERCCLEKLRLRNDWEIVGEWKGQKASYNGLDLCSATTHSKNFQCNKCVKGFSKFANLNKCKISHTGEKPFKCKECGNVSCMSLIMTQQQRIHIGENPYQCKKCGKAFNECSCFTDCKRIHVGEKHCKCEECNNIFKSCSSLAVVEKNHTEKKTYRCEECGKAFNLCSVLTKHKKIHTGEKPYKCEECGKSFKLFPYLTQHKRIHSREKPYKCEECGKVFKLLSYLTQHRRIHTGEKTFRCEECGKAFNQSSHLTEHRRIHTGEKPYKCEECGKAFTWFSYLIQHKRIHTGQKPYKCEECGKAFTWFSYLTQHKRIHTGEKPYKCDECGKAFNWFSYLTNHKRIHTGEKPYKCEECGKAFGQSSHLSKHKTIHTREKPYKCEECGKAFNHSAQLAVHEKTHT

SEQ ID NO: 122 - DNA, 2005 bp, Homo sapiens
ggcgcggcttttgtgttgggcagcgcgaatgtggcgagctcggtgcgtctccgctgctccttccccttatccctgggaggtccaagtggtcccgcggcagcttctgttgctctgggacctgcaggtcccggaaggtccttagggaggaccccagacaccggagactgggaaatggattcagtgtcatttgaagatgtggctgtggcctttactcaggaggagtgggctttgctggatccttctcaaaagaatctctacagagatgtgatgcaagaaatcttcaggaacctggcttctgtaggaaacaaatcagaagaccagaatatccaagatgacttcaaaaatcctgggagaaatctaagcagtcatgtggtagagagactgtttgaaattaaagaaggcagtcaatatggagaaaccttcagccaggattcaaatttgaatctgaataagaaagtttctactggagtaaagccatgtgaatgcagtgtgtgtggaaaagtcttcatatgtcattcagcccttcataggcacatcctgtctcacattggaaacaaactatttgagtgtgaggaatgtccagagaagttatatcattgcaaacaatgtgggaaagcctttatctctctcaccagtgttgacagacacatggtaacacacactagtaatgggccttataagggtccagtgtatgagaagccttttgattttcctagtgtatttcaaatgcctcagagcacttacactggagagaaaacatataaatgtaaacattgtgataaagccttcaattattcaagttatcttcgtgaacatgaaagaactcatactggagagaaaccctatgcatgtaagaaatgtggtaaatcattcactttttccagttctcttcgccaacatgaaagatctcatactggagagaaaccctatgaatgtaaggaatgtggcaaagccttcagtcgttccacttacttgggaatacatgaaagaacgcatactggagaaaaaccctatgaatgtataaaatgtggcaaagcctttagatgttccagagtcctcagagtccatgaaaggactcacagtggagaaaagccctatgaatgtaaacaatgtggtaaagccttcaaatattctagtaacctatgtgagcatgaaagaactcacactggagtgaaaccttatggatgtaaggaatgtggtaagtcgtttacttcttccagtgcccttcgaagccatgaaaggactcatactggagaaaaaccctatgaatgtaagaaatgtggtaaagccttcagttgttccagttcccttcgaaagcatgaaagagcttatatgtggtaaaaaacaacaacaacaaaacacctctgtcaatgtaagaagtgtgttaaagctttcagttattctagtttcattagaacacgtgaaaaaattaaaaactcaaattagagagaaacccaacacatgtaaggaagattagaatgtatgcaattttcctagttcccttctaaaacttagaaggacccgtcctgggaaagaacgtcataaaatacgaaaaatgtgttagaacactttattttcccagccgctttcaaatatatttttatcagtggttcattgttaaagaaggtgtctatactttagattttcagttttttgcagggaatcatggagctgagaatttcacagatactttataagccatagtacatgagcttaataggctgtgttttgtttctcatcagttaacataatttttgtctattcatttaaaaatttgttggatccctagactaagttgaaatgtatttctaatagtaggcaattttaattttcatgtagttgtttaattgttctctaattaatggaccaatgaaaaatgagttcatgtgtgtgtgtgtgtgtgtgtgtgtgtgtgtgtattctacctttttatgggaaaactacttttttgttgtaaagattttcttctgttttctttgctaataaagaattgttattaatttgc

SEQ ID NO: 123 - protein, 389 aa, Homo sapiens
MDSVSFEDVAVAFTQEEWALLDPSQKNLYRDVMQEIFRNLASVGNKSEDQNIQDDFKNPGRNLSSHVVERLFEIKEGSQYGETFSQDSNLNLNKKVSTGVKPCECSVCGKVFICHSALHRHILSHIGNKLFECEECPEKLYHCKQCGKAFISLTSVDRHMVTHTSNGPYKGPVYEKPFDFPSVFQMPQSTYTGEKTYKCKHCDKAFNYSSYLREHERTHTGEKPYACKKCGKSFTFSSSLRQHERSHTGEKPYECKECGKAFSRSTYLGIHERTHTGEKPYECIKCGKAFRCSRVLRVHERTHSGEKPYECKQCGKAFKYSSNLCEHERTHTGVKPYGCKECGKSFTSSSALRSHERTHTGEKPYECKKCGKAFSCSSSLRKHERAYMW

SEQ ID NO: 124 - DNA, 1905 bp, Homo sapiens
gttagtctccgctgctagttcttggctctgggaggcccaggtggctctgcagcagcctctgccaccctgtgacctgcgagtattgggacatccctagctgacgccaggacacccgggaagccgaggaatggtgagtggactgcgcctggcttcccgaagtggagaagagggctggttgaaacctgctgtggcgcgactcgggcctccacgccatcggctccggaacctgcggaccgagtcgccgtggcgtagccggggctcagtcctcttctgttcagggccgggccgggcggggcgggcagcggaacccctgcatcctgtctgtacctgcgggcgccacttccgccggccggatccctgtcgggaacccctcgcctcccctatccaggactcggtggcttttgaggatgtggctgtgaactttacccaggaggaatgggctttgctagattcttctcagaagaatctctacagagaagtgatgcaggaaacctgtaggaacctggcttctgtaggaagccaatggaaagaccagaatattgaagatcacttcgaaaaacctgggaaagatataagaaatcatatcgtacagagactgtgtgaaagtaaagaagatggtcagtatggagaagttgtcagccaaattccaaatcttgatctgaacgagaacatttctactggattaaaaccatgtgaatgcagtatttgtggaaaagtctttgtacgtcattccctctttaataggcatatcctagctcactcaggatacaaaccatatggagagaagcaatataaatgtgaacagtgtgggaaattcttcgtttctgttccaggtgttagaagacacatgataatgcacagtggaaatccagcttataaatgtacgatatgtgggaaagctttttattttctcaattcagttgaaagacatcagagaactcacacaggagaaaaaccctataaatgtaaacaatgtggtaaagcattcactgtttccggttcttgtctaatacatgaacgaactcacactggagagaaaccctacgaatgtaaggaatgtgggaaaacattcagattttcttgttcttttaagacgcatgaaaggactcacactggagaaagaccctataaatgtaccaaatgtgataaagccttcagctgttccacttcccttcgttaccatggaagcattcatactggagagagaccctatgagtgtaaacaatgtggcaaagcctttagtcgtttgagttccctttgtaaccatagaagtactcataccggagagaaaccctatgaatgtaaacaatgtgatcaagccttcagtcgcctcagttcccttcacctccacgaaagaattcatactggagaaaaaccctatgaatgtaagaaatgcggtaaagcctacactcgttccagtcaccttactcgccatgaaagaagtcatgatatagaggctgggtgtagtgactcagcctataatcccagcactttgggaggccaaggcgtgtggattgcttgagcccaggagttcataaccagcctggattaaaacaatgtgaaacaacctgggcaacatggtgaaaccctgtctttacaaaaaataaaataatgccgggcacggtggcttacgcctgtaatcccagcactttgggaggccgaggcgggtggatcacgaggtcaggagatcgagaccatcctggccaacacggtgaaaccccgtctctactaaaaatacaaaaaattagctgggcgtggtggcgggcgcctgtggtcccagttactcggggggctgaggcaggagaatggcatgaacccgggaggcggaacttgcggtgagccgagatcgcaccactgcacttcagcctgggtgacagagtgagactctgtctcaaaaaataagat

SEQ ID NO: 125 - protein, 464 aa, Homo sapiens
MVSGLRLASRSGEEGWLKPAVARLGPPRHRLRNLRTESPWRSRGSVLFCSGPGRAGRAAEPLHPVCTCGRHFRRPDPCREPLASPIQDSVAFEDVAVNFTQEEWALLDSSQKNLYREVMQETCRNLASVGSQWKDQNIEDHFEKPGKDIRNHIVQRLCESKEDGQYGEVVSQIPNLDLNENISTGLKPCECSICGKVFVRHSLFNRHILAHSGYKPYGEKQYKCEQCGKFFVSVPGVRRHMIMHSGNPAYKCTICGKAFYFLNSVERHQRTHTGEKPYKCKQCGKAFTVSGSCLIHERTHTGEKPYECKECGKTFRFSCSFKTHERTHTGERPYKCTKCDKAFSCSTSLRYHGSIHTGERPYECKQCGKAFSRLSSLCNHRSTHTGEKPYECKQCDQAFSRLSSLHLHERIHTGEKPYECKKCGKAYTRSSHLTRHERSHDIEAGCSDSAYNPSTLGGQGVWIA

SEQ ID NO: 126 - DNA, 1114 bp, Homo sapiens
ggagcaggatcggggaggacacacaggtgggcgtctcaagaactgtggtgtacacagctgagcccctgcagctctgctttgccgggcctcaccctcggtgctgggtgcaagacgtgacaagatggcatgggaagcttcccggggaacgctggaactgggtgtttgaaggaggacctcatggcggcagctccagcccaagtactgcaactgtggggccgtgccaggagcaggtgctgcggagcctgtgtgggtccaggacaagaggagcaccagaagctcctggagggcggtgcagacgacactgtcgggccggcccagcccaggccccagcagttgactcctctgtgatcagaggatgtggctgaggatgtgcatttccgtcaagttcccaggagaacctggtgctgctgcttcggggaccccactttgaggaccactgatctaacactgcccctcgtggcaaacgcggaatgactcaagattcagctggatggatcattcagggagcaaatccacccttgccgcctggcacaccctggccattcggtaacgatgccatcagggttactggcttcttcattctccactgtgcattccagggtgggcatttccacagttgtgagcccatcatcaactcagcgagttcccattttccagttagaaaataagctttctgatcgttagccattcacttcaattggctctagaaaagatttctgggatgtataatttatttttaacataaagaaaagctaagtgtaaactagataagctacaattgtcccagacgttatagacactcacagcaccgttttcctcttctagcaaaacaaaacaaaaaattctgcaatcatacaggcagtaggaaaaaaaaattagctggacaccatggctcacacctgtaaccccagcactttgggaggccgaggtgggaggatcacttgaggccaggagttagggactggcctgggcaacatagtgagatcccatctttataaaaataaaaaaaatctgggcgtggtggagcacacttgtggtcctagctactcaggaggctgagagtggggaatcgtttgatcccaggaggttgaggctggagtgaaccatgtttgca

SEQ ID NO: 127 - protein, 56 aa, Homo sapiens
MAAAPAQVLQLWGRARSRCCGACVGPGQEEHQKLLEGGADDTVGPAQPRPQQLTPL

SEQ ID NO: 128 - DNA, 1628 bp, Homo sapiens
gagcgcggcccctgggttcgaacacggcacccgcactgcgcgtcatggtgctggcctggtatatggacgacgccccgggcgacccgcggcaaccccaccgccccgaccccggccgcccagtgggcctggagcagctgcggcggctcggggtgctctactggaagctggatgctgacaaatatgagaatgatccagaattagaaaagatccgaagagagaggaactactcctggatggacatcataaccatatgcaaagataaactaccaaattatgaagaaaagattaagatgttctacgaggagcatttgcacttggacgatgagatccgctacatcctggatggcagtgggtacttcgacgtgagggacaaggaggaccagtggatccggatcttcatggagaagggagacatggtgacgctccccgcggggatctatcaccgcttcacggtggacgagaagaactacacgaaggccatgcggctgtttgtgggagaaccggtgtggacagcgtacaaccggcccgctgaccattttgaagcccgcgggcagtacgtgaaatttctggcacagaccgcctagcagtgctgcctgggaactaacacgtgcctcgtaaaggtccccaatgtaatgactgagcagaaaatcaatcactttctctttgcttttagaggatagccttgaggctagattatctttcctttgtaagattatttgatcagaatattttgtaatgaaaggatctagaaagcaacttggaagtgtaaagagtcaccttcattttctgtaactcaatcaagactggtgggtccatggccctgtgttagttcatgcattcagttgagtcccaaatgaaagtttcatctcccgaaatgcagttccttagatgcccatctggacgtgatgccgcgcctgccgtgtaagaaggtgcaatcctagataacacagctagccagatagaagacacttttttctccaaaatgatgccttggggtggggagtggtagtgggaagagctcccaccctaaggggcacacactgagttgcttatgccacttccttgttcaaaataaagtaactgccttaatcttatactcatggcttggagttaccttatattcaggtatatgtgatattttgcctggtttgttaaaattgccccatttagattccttctataattgttcttatagataagtaatttatatatgagctgtgttagtatttttttcagtgtgagatctctggattctttcacaataaagctgttgaattttaacaggagtattagtacataaattttctactcaacaattccgagataggattatgcctagtttgtcatatcacagaaaaactccaagttaacttcatgttttggaagggcaggtcgtttttaaagtatttctttttttaactggatgaaaaatcttcatgttaggattaattttcttaatcacctccacactgtacagaggaaactcaagccttaaatgtttaagtaaactctgtctcagttttaggattaaaatacccaccggtggtgtgatgatgccatataccgcagggcttgcttctgtcaagtgtgactctatctcagtaattaaaataagtgctgatctactg

SEQ ID NO: 129 - protein, 179 aa, Homo sapiens
MVLAWYMDDAPGDPRQPHRPDPGRPVGLEQLRRLGVLYWKLDADKYENDPELEKIRRERNYSWMDIITICKDKLPNYEEKIKMFYEEHLHLDDEIRYILDGSGYFDVRDKEDQWIRIFMEKGDMVTLPAGIYHRFTVDEKNYTKAMRLFVGEPVWTAYNRPADHFEARGQYVKFLAQTA

SEQ ID NO: 130 - DNA, 676 bp, Homo sapiens
ccagagagtgagcagggcagaaaaaaacttctattgcatgatggaacagctcccagcgttgaggggacctgagagtgggcagccactacctgaagctcttggaacagaaccagacttctggccggggctcagtcagtgcttgcaagatgtttgttggcaccaggctgtgccaggagagcatcattataaactgctgatctactgtttctttgtcaaacgggaggagataacatgagggtcatgagaaatgtttgcagacggagtgaatgccttgaaagtgctgcgaccaggtgctgacacccggaggtctggctgctcaaagtgttagctgacacggaagacacacggactttccctccattccccaaaactccccttccctgactcgtcagctgcataaaaaccctctccttatctctttgtcaaggggatttgagaaatcttgctgtcttgtcttcttgctttggccaaatggaataaacctttctctgtctccagacacctatgtcgcagtgttcggcctcagctatacggcaggtacatgaacctggtatttgggcttctacaacaattgtacttatagcacaaataaagtacaaagtgttagggaagaccaaagaccataggtagaaaacttggatacaacttccaaataaacactcttcaaaacatttaa

SEQ ID NO: 131 - protein, 64 aa, Homo sapiens
MEQLPALRGPESGQPLPEALGTEPDFWPGLSQCLQDVCWHQAVPGEHHYKLLIYCFFVKREEIT

SEQ ID NO: 132 - DNA, 979 bp, Homo sapiens
tctttcctccccttctgcgcggtcacgccgagccagcgcctgggcctggaaccaggccacagccccccagcttcacccaccacctccctaccatggacccccgcaaagtgaatgagcttcgggcctttgtgaacatgtgtaagcaggatctgagtgttctgcacaccgaggaaatgtgcttcctgagggagtgggtggagagcctgcgggtaaagtaccacctgctactcagaaagctaaatcagaagaaaatgccaaggaagaaaaacctaatagtaagaaggtggaggaagacttaaaggcagacgaaccatcaagtgaggaaagtgatctagaaattgacaaagaaggtgtgattgaaccagacactgatgcccctcaagaaatgggaggtgaaaatgcagagataacggaggagatgatggatcaggcaaatgataagaaagtggctgctattgaagccctaaatgatggtgaactccagaaagccattgacttattcacagatgccatcaagctgaatcctcgcttggctgttttgtatgccaagagggccagtgtcttcgtcaaattacagaagccaaatgctgccatccgagactgtgacagagccattgaaataaatcctgattcagctcagcctcacaagtggcgagggaaagcacatagacttctaggccactgggaagaagcagcccatgatcttgcccttgcctgtaaattggattatgatgaagatgctagtgtaatgctgaaagaagttcaacttagggcacagaaaattgcagaacatcagagaaagtatgagcaaaaacgtgaagagtgagagatcaaagcaagaatagaatgagttaagaaggctcgagaagagcatgagagggaggaagaagccagaccgcagtcaggagctcagtatggctcttttccaggtggctttcctgggggaatgcctggcaattttcccagaggaatgcctgga

SEQ ID NO: 133 - DNA, 5063 bp, Homo sapiens
atggggctgcggccaggcattttcctcctggagctgctgctgcttctggggcaagggacccctcagatccatacctctcctagaaagagtacattggaagggcagctatggccagagaccctgaagaattctccattcccatgcaacccaaataaattaggagtgaatatgccttctaaatcagttcactctctgaagccttctgatattaaatttgtggcagccattggcaatctggaaattcctccagacccagggacgggcgatctggagaagcaagactggactgaaaggccacagcaggtgtgcatgggagtgatgacagtcctttcagacatcatcagatatttcagtccttctgttccaatgcctgtgtgccacactggaaagagagtcataccccacgatggtgctgaagacttgtggattcaggctcaagaactggtgagaaacatgaaagagaacctgcaacttgactttcaatttgactggaagctcatcaatgtgttcttcagtaatgcaagccagtgttacctgtgcccctctgctcaacagaatgggcttgcggcgggcggcgtggatgagctgatgggggtgctggactacctgcagcaggaggtccccagagcatttgtaaacctggtggacctctctgaggttgcagaggtctctcgtcagtatcacggcacttggctcagccctgcaccagagccctgtaattgctcagaggagaccacccggctggccaaggtggtgatgcagtggtcttatcaggaagcctggaacagcctcctggcctccagcaggtacagtgagcaggagtccttcaccgtggttttccagcctttcttctatgagaccaccccatctctacactcggaggacccccgactccaggattctaccacgctggcctggcatctctggaataggatgatggagccagcaggagagaaagatgagccattgagtgtaaaacacgggaggccaatgaagtgtccctctcaggagagcccctatctgttcagctacagaaacagcaactacctgaccagactgcagaaaccccaagacaagcttgaggtaagagaaggagcggaaatcagatgtcctgacaaagacccctccgatacggttcccacctcagttcataggctgaagccggctgacatcaacgtaattggagccctgggtgactctctcacggcaggcaatggggccgggtccacacctgggaacgtcttggacgtcttgactcagtaccgaggcctgtcctggagcgtcggcggagatgagaacatcggcaccgttaccaccctggcgaacatcctccgggaattcaacccttccctgaagggcttctctgttggcactgggaaagaaaccagtcctaatgccttcttaaaccaggctgtggcaggaggccgagctgaggatctacctgtccaggccaggaggctggtggacctgatgaagaatgacacgaggatacactttcaggaagactggaagataataaccctgtttataggcggcaatgacctctgtgatttctgcaatgatctggtccactattctccccagaacttcacagacaacattggaaaggccctggacatcctccatgctgaggttcctcgggcatttgtgaacctggtgacggtgcttgagatcgtcaacctgagggagctgtaccaggagaaaaaagtctactgcccaaggatgatcctcaggtctctgtgtccctgtgtcctgaagtttgatgataactcaacagaacttgctaccctcatcgaattcaacaagaagtttcaggagaagacccaccaactgattgagagtgggcgatatgacacaagggaagattttactgtggttgtgcagccgttctttgaaaacgtggacatgccaaagacctcggaaggattgcctgacaactctttcttcgctcctgactgtttccacttcagcagcaagtctcactcccgagcagccagtgctctctggaacaatatgctggagcctgttggccagaagacgactcgtcataagtttgaaaacaagatcaatatcacatgtccgaaccaggtccagccgtttctgaggacctacaagaacagcatgcagggtcatgggacctggctgccatgcagggacagagccccttctgccttgcaccctacctcagtgcatgccctgagacctgcagacatccaagttgtggctgctctgggggattctctgaccgctggcaatggaattggctccaaaccagacgacctccccgatgtcaccacacagtatcggggactgtcatacagtgcaggaggggacggctccctggagaatgtgaccaccttacctaatatccttcgggagtttaacagaaacctcacaggctacgccgtgggcacgggtgatgccaatgacacgaatgcattcctcaatcaagctgttcccggagcaaaggctgaggatcttatgagccaagtccaaactctgatgcagaagatgaaagatgatcatagagtaaatttccatgaagactggaaggtcatcacagtgctgatcggaggcagcgatttatgtgactactgcacagattcgaatctgtattctgcagccaactttgttgaccatctccgcaatgccttggacgtcctgcatagagaggtgcccagagtcctggtcaacctcgtggacttcctgaaccccactatcatgcggcaggtgttcctgggaaacccagacaagtgcccagtgcagcaggccagcgttttgtgtaactgcgttctgaccctgcgggagaactcccaagagctagccaggctggaggccttcagccgagcctaccggagcagcatgcgcgagctggtggggtcaggccgctatgacacgcaggaggacttctctgtggtgctgcagcccttcttccagaacatccagctccctgtcctggcggatgggctcccagatacgtccttctttgccccagactgcatccacccaaatcagaaattccactcccagctggccagagccctttggaccaatatgcttgaaccacttggaagcaaaacagagaccctggacctgagagcagagatgcccatcacctgtcccactcagaatgagcccttcctgagaacccctcggaatagtaactacacgtaccccatcaagccagccattgagaactggggcagtgacttcctgtgtacagagtggaaggcttccaatagtgttccaacctctgtccaccagctccgaccagcagacatcaaagtggtggccgccctgggtgactctctgactacagcagtgggagctcgaccaaacaactccagtgacctacccacatcttggaggggactctcttggagcattggaggggatgggaacttggagactcacaccacactgcccaacattctgaagaagttcaacccttacctccttggcttctctaccagcacctgggaggggacagcaggactaaatgtggcagcggaaggggccagagctagggacatgccagcccaggcctgggacctggtagagcgaatgaaaaacagccccgacatcaacctggagaaagactggaagctggtcacactcttcattggggtcaacgacttgtgtcattactgtgagaatccggaggcccacttggccacggaatatgttcagcacatccaacaggccctggacatcctctctgaggagctcccaagggctttcgtcaacgtggtggaggtcatggagctggctagcctgtaccagggccaaggcgggaaatgtgccatgctggcagctcagaacaactgcacttgcctcagacactcgcaaagctccctggagaagcaagaactgaagaaagtgaactggaacctccagcatggcatctccagtttctcctactggcaccaatacacacagcgtgaggactttgcggttgtggtgcagcctttcttccaaaacacactcaccccactgaacgagagaggggacactgacctcaccttcttctccgaggactgttttcacttctcagaccgcgggcatgccgagatggccatcgcactctggaacaacatgctggaaccagtgggccgcaagactacctccaacaacttcacccacagccgagccaaactcaagtgcccctctcctgagagcccttacctctacaccctgcggaacagccgattgctcccagaccaggctgaagaagcccccgaggtgctctactgggctgtcccagtggcagcgggagtcggccttgtggtgggcatcatcgggacagtggtctggaggtgcaggagaggtggccggagggaagatcctccaatgagcctgcgcactgtggccctctaggcccgggggtgggtcctcaccctaaactccctatagccactctcttcaccgccctctgccccagccactcccggccaccaggacatgcttcaatgcctggtgccataggaagcccaggggacagtcacaacttcttggggcctgggcttcttccaggcctatgctcctggaatggatacatttaaataaagtccaaagctattttattcctgggtttgcctgcgtgaagcactcaccttccatctcttgtgcagcccaggtgtgggagctgccactttttgtggcctgcctccagcagggctgcccaagccacgaccaaccagagcccaaactgcctgccaccacgagcatatcctcaagtcaccaaacccactatttcaaaggcagaaaaaatgctggtcaccaggtggtggctggaattttggagctggctggttgccattcagtccaatccaacacatacctattaagcaactgttttgtatccaggacaatgcgaagcactgaggtgcctcctaggctgtgcatgtcgcagcctggcagagaggtcaaactccttcaataaccaagaagccacgtgatgatgtgtaactactagggcatcagtaggtaaatgtgtctgattgttttaaagaatagaaagggttcttcggggaaagtttcttgggggagagcaaccttcacat

SEQ ID NO: 134 - protein, 1458 aa, Homo sapiens
MGLRPGIFLLELLLLLGQGTPQIHTSPRKSTLEGQLWPETLKNSPFPCNPNKLGVNMPSKSVHSLKPSDIKFVAAIGNLEIPPDPGTGDLEKQDWTERPQQVCMGVMTVLSDIIRYFSPSVPMPVCHTGKRVIPHDGAEDLWIQAQELVRNMKENLQLDFQFDWKLINVFFSNASQCYLCPSAQQNGLAAGGVDELMGVLDYLQQEVPRAFVNLVDLSEVAEVSRQYHGTWLSPAPEPCNCSEETTRLAKVVMQWSYQEAWNSLLASSRYSEQESFTVVFQPFFYETTPSLHSEDPRLQDSTTLAWHLWNRMMEPAGEKDEPLSVKHGRPMKCPSQESPYLFSYRNSNYLTRLQKPQDKLEVREGAEIRCPDKDPSDTVPTSVHRLKPADINVIGALGDSLTAGNGAGSTPGNVLDVLTQYRGLSWSVGGDENIGTVTTLANILREFNPSLKGFSVGTGKETSPNAFLNQAVAGGRAEDLPVQARRLVDLMKNDTRIHFQEDWKIITLFIGGNDLCDFCNDLVHYSPQNFTDNIGKALDILHAEVPRAFVNLVTVLEIVNLRELYQEKKVYCPRMILRSLCPCVLKFDDNSTELATLIEFNKKFQEKTHQLIESGRYDTREDFTVVVQPFFENVDMPKTSEGLPDNSFFAPDCFHFSSKSHSRAASALWNNMLEPVGQKTTRHKFENKINITCPNQVQPFLRTYKNSMQGHGTWLPCRDRAPSALHPTSVHALRPADIQVVAALGDSLTAGNGIGSKPDDLPDVTTQYRGLSYSAGGDGSLENVTTLPNILREFNRNLTGYAVGTGDANDTNAFLNQAVPGAKAEDLMSQVQTLMQKMKDDHRVNFHEDWKVITVLIGGSDLCDYCTDSNLYSAANFVDHLRNALDVLHREVPRVLVNLVDFLNPTIMRQVFLGNPDKCPVQQASVLCNCVLTLRENSQELARLEAFSRAYRSSMRELVGSGRYDTQEDFSVVLQPFFQNIQLPVLADGLPDTSFFAPDCIHPNQKFHSQLARALWTNMLEPLGSKTETLDLRAEMPITCPTQNEPFLRTPRNSNYTYPIKPAIENWGSDFLCTEWKASNSVPTSVHQLRPADIKVVAALGDSLTTAVGARPNNSSDLPTSWRGLSWSIGGDGNLETHTTLPNILKKFNPYLLGFSTSTWEGTAGLNVAAEGARARDMPAQAWDLVERMKNSPDINLEKDWKLVTLFIGVNDLCHYCENPEAHLATEYVQHIQQALDILSEELPRAFVNVVEVMELASLYQGQGGKCAMLAAQNNCTCLRHSQSSLEKQELKKVNWNLQHGISSFSYWHQYTQREDFAVVVQPFFQNTLTPLNERGDTDLTFFSEDCFHFSDRGHAEMAIALWNNMLEPVGRKTTSNNFTHSRAKLKCPSPESPYLYTLRNSRLLPDQAEEAPEVLYWAVPVAAGVGLVVGIIGTVVWRCRRGGRREDPPMSLRTVAL

SEQ ID NO: 135 - DNA, 5298 bp, Homo sapiens
atacagagcagcgagcactgaaggcttccctctttccttaaacctgtcgggttgtgggctctctcttttcccctcttgctcctttcttttctttttttctgtttttttaaaccttccaaggcaagttcatggatactaagctgatgtgtttgttgttctttttctccctgcctccgctcctagtgagtaaccacactggccgcatcaaggtggtctttactccgagcatctgtaaagtgacctgcaccaagggcagctgtcagaacagctgtgagaaggggaacaccaccactctcattagtgagaatggtcatgctgccgacaccctgacggccacgaacttccgagtggtaatttgccatcttccatgtatgaatggtggccagtgcagttcaagggacaaatgtcagtgccctccaaatttcacaggaaaactttgtcagatcccagtccatggtgccagcgtgcctaaactttatcagcattcccagcagccaggcaaggcgttggggacgcatgtcatccattcaacacataccttgcctctgaccgtgactagccagcaaggagtcaaagtgaaatttcctcctaacatagtcaatatccatgtgaaacatcctcctgaagcttccgtccagatacatcaggtttcaagaattgatggcccaacaggccagaagacaaaagaagctcaaccaggccaatcccaagtctcgtaccaagggcttcctgtccagaagacccagaccatacattccacatactcccaccagcaggtcattcctcacgtctaccccgtggctgctaagacacagcttggccggtgcttccaggaaaccattgggtcacagtgtggcaaagcgctccctggcctttcaaagcaagaggactgctgtggaactgtgggtacctcctggggctttaacaaatgccagaaatgccccaagaaaccatcttatcatggatacaaccaaatgatggaatgcctaccgggttataagcgggttaacaacaccttttgccaagatattaatgaatgtcagctacaaggtgtatgccctaatggtgagtgtttgaataccatgggcagctatcgatgtacctgcaaaataggatttgggccggatcctaccttttcaagttgtgttcctgatccccctgtgatctcggaagagaaagggccctgttaccgacttgtcagttctggaagacagtgtatgcaccctctgtctgttcacctcaccaagcagctctgctgttgtagtgtgggcaaggcctggggcccacactgtgagaaatgtccccttccaggcacagctgcttttaaggaaatctgtcctggtggaatgggttatacggtttctggcgttcatagacgcaggccaatccatcaccatgtaggtaaaggacctgtatttgtcaagccaaagaacactcaacctgttgctaaaagtactcatcctccacctctcccagccaaggaagagccagtggaggccctgaccttctcccgggaacacgggccaggagtggcggagccagaagtggcaactgcaccccctgaaaaggaaataccttcattggatcaagagaaaaccaaacttgagcctggtcaaccccagctgtctccaggcatttccactattcatctgcatccacagtttccaggtatagtgattgaaaaaacatcacctcctgtgcctgttgaagtagctcctgaagcttctacgtctagtgccagccaagtgattgctcctactcaagtgacagaaatcaatgaatgtactgtgaaccctgatatctgtggagcaggacactgcattaacctaccagtgagatatacctgtatatgctacgagggctacaggttcagtgaacaacagaggaaatgtgtggatattgatgagtgtactcaggtccaacacctctgctcccagggccgctgtgaaaacaccgagggaagtttcttgtgcatttgcccagcaggatttatggccagtgaggagggtactaactgcatagatgttgacgaatgcctgaggccggacgtctgtggggaggggcactgtgtcaatactgtgggggccttccggtgtgaatactgtgacagcgggtaccgcatgactcagagaggccgttgtgaggatattgatgaatgtttgaatccaagcacttgtccagatgagcagtgtgtgaattctcctggatcttaccagtgcgttccctgcacagaaggattccgaggctggaatggacagtgccttgatgtggacgagtgcctggaaccaaacgtctgcgcaaatggtgattgttccaaccttgaaggctcctacatgtgttcatgccacaaaggctatacccggactccggaccacaagcactgtagagatattgatgaatgtcagcaagggaatctatgtgtaaacgggcagtgcaaaaataccgagggctccttcaggtgcacctgtggacaggggtaccagctgtcggcagctaaagaccagtgtgaagacattgatgaatgccagcaccgtcatctctgtgctcatgggcagtgcaggaacactgagggctcttttcaatgtgtgtgtgaccagggttacagagcatctgggcttggagaccactgtgaagatatcaatgaatgcttggaggacaagagtgtttgccagagaggagactgcattaatactgcagggtcctatgattgtacttgtccggatggatttcagctagatgacaataaaacatgtcaagatattaatgaatgtgaacatccagggctctgtggtccgcaaggggagtgcctaaacacagagggttctttccattgtgtctgccagcagggtttctcaatctctgcagatggccgtacgtgtgaagatattgatgaatgtgtaaacaacactgtttgtgacagtcacgggttttgtgacaatacagctggctccttccgctgcctctgttatcagggctttcaagccccacaggatgggcaagggtgtgtggatgtgaatgaatgtgaactgctcagtggggtgtgtggtgaagccttctgtgaaaacgtggaagggtccttcctgtgcgtgtgtgctgatgaaaaccaagagtacagccccatgactgggcagtgccgctcccggacctccacagatttagatgtagatgtagatcaacccaaagaagaaaagaaagaatgctactataatctcaatgacgccagtctctgtgataatgtgttggcccccaatgtcacgaaacaagaatgctgctgtacatcaggcgcgggatggggagataactgcgaaatcttcccctgcccggtcttgggaactgctgagttcactgaaatgtgtcccaaagggaaaggttttgtgcctgctggagaatcatcttctgaagctggtggtgagaactataaagatgcagatgaatgcctactttttggacaagaaatctgcaaaaatggtttctgtttgaacactcggcctgggtatgaatgctactgtaagcaagggacgtactatgatcctgtgaaactgcagtgctttgatatggatgaatgtcaagaccccagtagttgtattgatggccagtgtgttaatacagagggctcttacaactgcttctgtactcaccccatggtcctggatgcgtcagaaaaaagatgtatacgaccggctgagtcaaacgaacaaatagaagaaactgatgtctaccaagatttgtgctgggaacatctgagtgatgaatacgtgtgtagccggcctcttgtgggcaagcagacaacgtacactgagtgctgctgtctgtatggagaggcctggggcatgcagtgtgccctctgccccctgaaggattcagatgactatgctcagctgtgtaacatccccgtgacgggacgccggcagccatatggacgggacgccttggttgacttcagtgaacagtatactccagaagccgatccctacttcatccaagaccgttttctaaatagctttgaggagttacaggctgaggaatgcggcatcctcaatggatgtgaaaatggtcgctgtgtgagggtccaggaaggttacacctgcgattgctttgatgggtatcacttggatacggccaagatgacctgtgtcgatgtaaatgaatgcgatgagttgaacaaccggatgtctctctgcaagaatgccaagtgcattaacaccgatggttcctacaagtgtttgtgtctgccaggctacgtgccttctgacaagccaaactactgcactccgttgaataccgccttgaatttagagaaagacagtgacctggagtgaaacagaatctacataacctaagcccatatactctgcactgtgtaaaggaaaagggagaaatgtattatacttgagacattgcacctaccccggaaggctggaaatacagaaacagcatggagttgcaagtcctctgaagacaatgagaggatttaggatgagcccgataggtgtggcagaccaaatggacatttctctaaaaaaccagtatatatagtctgttcatatgtaaaattcaatggaagagaggtggaacagtgctgttattttaaacagaaggttgtattattatgttgttttgtttttttactattgcttgattaaatttggcatttaaatagtggtggaaatattttatataattttcattttttggttgtgcagttccttggctactgtttttcttttacttcagttttttaaaaatctcaaatgaaaaagtcttcgatacaatattgttaagctgtattataagtattgttacacagggttatgcaattcccggcctggagcatttttgaaattcaaattgtctgtcctgtggagcaggcagtgattttgttccaaaactttgtatacacatttggagaaaagtactttatattttcagtgttttgtctgattttaatgtccgttcttagccaagctgctagcaggtgttaattggatccctttccttcactgaaatggaagagtttataagcttacgttagtattgtaatatgtaaagtaagcccaacaaaaatttttaaaaatttgatgatccccaatatatctaccattgtatgttaaataaatcaccatttttgtagaaaaaattctacctgagagtaattgtcaatgagtacatgtgtataagttgtatcccactctccccacttttatcttttccagtggtcttctgttaatgtagtgtcttttacaagttaatcattaaatttgttagatcttgttatgggctaaaaaaaaaaaaaaaaaa

SEQ ID NO: 136 - protein, 1396 aa, Homo sapiens
MDTKLMCLLFFFSLPPLLVSNHTGRIKVVFTPSICKVTCTKGSCQNSCEKGNTTTLISENGHAADTLTATNFRVVICHLPCMNGGQCSSRDKCQCPPNFTGKLCQIPVHGASVPKLYQHSQQPGKALGTHVIHSTHTLPLTVTSQQGVKVKFPPNIVNIHVKHPPEASVQIHQVSRIDGPTGQKTKEAQPGQSQVSYQGLPVQKTQTIHSTYSHQQVIPHVYPVAAKTQLGRCFQETIGSQCGKALPGLSKQEDCCGTVGTSWGFNKCQKCPKKPSYHGYNQMMECLPGYKRVNNTFCQDINECQLQGVCPNGECLNTMGSYRCTCKIGFGPDPTFSSCVPDPPVISEEKGPCYRLVSSGRQCMHPLSVHLTKQLCCCSVGKAWGPHCEKCPLPGTAAFKEICPGGMGYTVSGVHRRRPIHHHVGKGPVFVKPKNTQPVAKSTHPPPLPAKEEPVEALTFSREHGPGVAEPEVATAPPEKEIPSLDQEKTKLEPGQPQLSPGISTIHLHPQFPGIVIEKTSPPVPVEVAPEASTSSASQVIAPTQVTEINECTVNPDICGAGHCINLPVRYTCICYEGYRFSEQQRKCVDIDECTQVQHLCSQGRCENTEGSFLCICPAGFMASEEGTNCIDVDECLRPDVCGEGHCVNTVGAFRCEYCDSGYRMTQRGRCEDIDECLNPSTCPDEQCVNSPGSYQCVPCTEGFRGWNGQCLDVDECLEPNVCANGDCSNLEGSYMCSCHKGYTRTPDHKHCRDIDECQQGNLCVNGQCKNTEGSFRCTCGQGYQLSAAKDQCEDIDECQHRHLCAHGQCRNTEGSFQCVCDQGYRASGLGDHCEDINECLEDKSVCQRGDCINTAGSYDCTCPDGFQLDDNKTCQDINECEHPGLCGPQGECLNTEGSFHCVCQQGFSISADGRTCEDIDECVNNTVCDSHGFCDNTAGSFRCLCYQGFQAPQDGQGCVDVNECELLSGVCGEAFCENVEGSFLCVCADENQEYSPMTGQCRSRTSTDLDVDVDQPKEEKKECYYNLNDASLCDNVLAPNVTKQECCCTSGAGWGDNCEIFPCPVLGTAEFTEMCPKGKGFVPAGESSSEAGGENYKDADECLLFGQEICKNGFCLNTRPGYECYCKQGTYYDPVKLQCFDMDECQDPSSCIDGQCVNTEGSYNCFCTHPMVLDASEKRCIRPAESNEQIEETDVYQDLCWEHLSDEYVCSRPLVGKQTTYTECCCLYGEAWGMQCALCPLKDSDDYAQLCNIPVTGRRQPYGRDALVDFSEQYTPEADPYFIQDRFLNSFEELQAEECGILNGCENGRCVRVQEGYTCDCFDGYHLDTAKMTCVDVNECDELNNRMSLCKNAKCINTDGSYKCLCLPGYVPSDKPNYCTPLNTALNLEKDSDLE

SEQ ID NO: 137 - DNA, 6148 bp, Homo sapiens
atggcgggggcctggctcaggtgggggctcctgctctgggcagggctcctcgcgtcctcggcgcacggccggctgcggaggatcacctacgtggtgcacccgggccccggcctggcagccggcgccttgcccctgagcgggcccccgcgttcgcggacattcaacgtcgcgctcaacgccaggtacagccgcagctcggcggctgccggcgcccccagccgtgcctcccccggggtcccctcggagaggacccggcgcacgagcaagccgggcggcgcggccctgcaggggctcagaccgccgccgccgccgccgccggagcctgcgcgtcccgcggtccccggcgggcagctccaccccaatcccggcggccacccggcagccgccccgttcaccaaacaaggcaggcaagttgtgcgctccaaggtgccgcaggagacccagagcggcggaggctctaggctgcaggttcaccagaagcagcagctgcagggggtcaatgtctgtggagggcggtgctgtcatggctggagtaaggcccctggctcccagaggtgcaccaaacctagctgtgttccgccatgtcagaatggagggatgtgtctccggccacaactctgtgtgtgtaaaccagggaccaagggcaaagcctgtgaaacaatagctgcccaggacacctcgtcaccagtctttggagggcagagtcctggggctgcttcctcgtggggccctcctgagcaagcagcaaagcatacttcatctaagaaggcagacactctaccaagagtcagccctgtggcccagatgaccttaaccctcaagccgaagccttcagtgggactcccccagcagatacattctcaagtgactcctctttcttcccagagtgtggtgattcaccatggccagacccaggaatacgtgctcaagcccaagtactttccagcccagaaggggatttcaggagagcagtccactgaaggttctttccctttaagatatgtgcaggatcaagttgcggcaccttttcagctgagtaaccacactggccgcatcaaggtggtctttactccgagcatctgtaaagtgacctgcaccaagggcagctgtcagaacagctgtgagaaggggaacaccaccactctcattagtgagaatggtcatgctgccgacaccctgacggccacgaacttccgagtggtaatttgccatcttccatgtatgaatggtggccagtgcagttcaagggacaaatgtcagtgccctccaaatttcacaggaaaactttgtcagatcccagtccatggtgccagcgtgcctaaactttatcagcattcccagcagccaggcaaggcgttggggacgcatgtcatccattcaacacataccttgcctctgaccgtgactagccagcaaggagtcaaagtgaaatttcctcctaacatagtcaatatccatgtgaaacatcctcctgaagcttccgtccagatacatcaggtttcaagaattgatggcccaacaggccagaagacaaaagaagctcaaccaggccaatcccaagtctcgtaccaagggcttcctgtccagaagacccagaccatacattccacatactcccaccagcaggtcattcctcacgtctaccccgtggctgctaagacacagcttggccggtgcttccaggaaaccattgggtcacagtgtggcaaagcgctccctggcctttcaaagcaagaggactgctgtggaactgtgggtacctcctggggctttaacaaatgccagaaatgccccaagaaaccatcttatcatggatacaaccaaatgatggaatgcctaccgggttataagcgggttaacaacaccttttgccaagatattaatgaatgtcagctacaaggtgtatgccctaatggtgagtgtttgaataccatgggcagctatcgatgtacctgcaaaataggatttgggccggatcctaccttttcaagttgtgttcctgatccccctgtgatctcggaagagaaagggccctgttaccgacttgtcagttctggaagacagtgtatgcaccctctgtctgttcacctcaccaagcagctctgctgttgtagtgtgggcaaggcctggggcccacactgtgagaaatgtccccttccaggcacagctgcttttaaggaaatctgtcctggtggaatgggttatacggtttctggcgttcatagacgcaggccaatccatcaccatgtaggtaaaggacctgtatttgtcaagccaaagaacactcaacctgttgctaaaagtactcatcctccacctctcccagccaaggaagagccagtggaggccctgaccttctcccgggaacacgggccaggagtggcggagccagaagtggcaactgcaccccctgaaaaggaaataccttcattggatcaagagaaaaccaaacttgagcctggtcaaccccagctgtctccaggcatttccactattcatctgcatccacagtttccaggtatagtgattgaaaaaacatcacctcctgtgcctgttgaagtagctcctgaagcttctacgtctagtgccagccaagtgattgctcctactcaagtgacagaaatcaatgaatgtactgtgaaccctgatatctgtggagcaggacactgcattaacctaccagtgagatatacctgtatatgctacgagggctacaggttcagtgaacaacagaggaaatgtgtggatattgatgagtgtactcaggtccaacacctctgctcccagggccgctgtgaaaacaccgagggaagtttcttgtgcatttgcccagcaggatttatggccagtgaggagggtactaactgcatagatgttgacgaatgcctgaggccggacgtctgtggggaggggcactgtgtcaatactgtgggggccttccggtgtgaatactgtgacagcgggtaccgcatgactcagagaggccgttgtgaggatattgatgaatgtttgaatccaagcacttgtccagatgagcagtgtgtgaattctcctggatcttaccagtgcgttccctgcacagaaggattccgaggctggaatggacagtgccttgatgtggacgagtgcctggaaccaaacgtctgcgcaaatggtgattgttccaaccttgaaggctcctacatgtgttcatgccacaaaggctatacccggactccggaccacaagcactgtagagatattgatgaatgtcagcaagggaatctatgtgtaaacgggcagtgcaaaaataccgagggctccttcaggtgcacctgtggacaggggtaccagctgtcggcagctaaagaccagtgtgaagacattgatgaatgccagcaccgtcatctctgtgctcatgggcagtgcaggaacactgagggctcttttcaatgtgtgtgtgaccagggttacagagcatctgggcttggagaccactgtgaagatatcaatgaatgcttggaggacaagagtgtttgccagagaggagactgcattaatactgcagggtcctatgattgtacttgtccggatggatttcagctagatgacaataaaacatgtcaagatattaatgaatgtgaacatccagggctctgtggtccgcaaggggagtgcctaaacacagagggttctttccattgtgtctgccagcagggtttctcaatctctgcagatggccgtacgtgtgaagatattgatgaatgtgtaaacaacactgtttgtgacagtcacgggttttgtgacaatacagctggctccttccgctgcctctgttatcagggctttcaagccccacaggatgggcaagggtgtgtggatgtgaatgaatgtgaactgctcagtggggtgtgtggtgaagccttctgtgaaaacgtggaagggtccttcctgtgcgtgtgtgctgatgaaaaccaagagtacagccccatgactgggcagtgccgctcccggacctccacagatttagatgtagatgtagatcaacccaaagaagaaaagaaagaatgctactataatctcaatgacgccagtctctgtgataatgtgttggcccccaatgtcacgaaacaagaatgctgctgtacatcaggcgcgggatggggagataactgcgaaatcttcccctgcccggtcttgggaactgctgagttcactgaaatgtgtcccaaagggaaaggttttgtgcctgctggagaatcatcttctgaagctggtggtgagaactataaagatgcagatgaatgcctactttttggacaagaaatctgcaaaaatggtttctgtttgaacactcggcctgggtatgaatgctactgtaagcaagggacgtactatgatcctgtgaaactgcagtgctttgatatggatgaatgtcaagaccccagtagttgtattgatggccagtgtgttaatacagagggctcttacaactgcttctgtactcaccccatggtcctggatgcgtcagaaaaaagatgtatacgaccggctgagtcaaacgaacaaatagaagaaactgatgtctaccaagatttgtgctgggaacatctgagtgatgaatacgtgtgtagccggcctcttgtgggcaagcagacaacgtacactgagtgctgctgtctgtatggagaggcctggggcatgcagtgtgccctctgccccctgaaggattcagatgactatgctcagctgtgtaacatccccgtgacgggacgccggcagccatatggacgggacgccttggttgacttcagtgaacagtatactccagaagccgatccctacttcatccaagaccgttttctaaatagctttgaggagttacaggctgaggaatgcggcatcctcaatggatgtgaaaatggtcgctgtgtgagggtccaggaaggttacacctgcgattgctttgatgggtatcacttggatacggccaagatgacctgtgtcgatgtaaatgaatgcgatgagttgaacaaccggatgtctctctgcaagaatgccaagtgcattaacaccgatggttcctacaagtgtttgtgtctgccaggctacgtgccttctgacaagccaaactactgcactccgttgaataccgccttgaatttagagaaagacagtgacctggagtgaaacagaatctacataacctaagcccatatactctgcactgtgtaaaggaaaagggagaaatgtattatacttgagacattgcacctaccccggaaggctggaaatacagaaacagcatggagttgcaagtcctctgaagacaatgagaggatttaggatgagcccgataggtgtggcagaccaaatggacatttctctaaaaaaccagtatatatagtctgttcatatgtaaaattcaatggaagagaggtggaacagtgctgttattttaaacagaaggttgtattattatgttgttttgtttttttactattgcttgattaaatttggcatttaaatagtggtggaaatattttatataattttcattttttggttgtgcagttccttggctactgtttttcttttacttcagttttttaaaaatctcaaatgaaaaagtcttcgatacaatattgttaagctgtattataagtattgttacacagggttatgcaattcccggcctggagcatttttgaaattcaaattgtctgtcctgtggagcaggcagtgattttgttccaaaactttgtatacacatttggagaaaagtactttatattttcagtgttttgtctgattttaatgtccgttcttagccaagctgctagcaggtgttaattggatccctttccttcactgaaatggaagagtttataagcttacgttagtattgtaatatgtaaagtaagcccaacaaaaatttttaaaaatttgatgatccccaatatatctaccattgtatgttaaataaatcaccatttttgtagaaaaaattctacctgagagtaattgtcaatgagtacatgtgtataagttgtatcccactctccccacttttatcttttccagtggtcttctgttaatgtagtgtcttttacaagttaatcattaaatttgttagatcttgttatgggctaaaaaaaaaaaaaaaaaa

SEQ ID NO: 138 - protein, 1722 aa, Homo sapiens
MAGAWLRWGLLLWAGLLASSAHGRLRRITYVVHPGPGLAAGALPLSGPPRSRTFNVALNARYSRSSAAAGAPSRASPGVPSERTRRTSKPGGAALQGLRPPPPPPPEPARPAVPGGQLHPNPGGHPAAAPFTKQGRQVVRSKVPQETQSGGGSRLQVHQKQQLQGVNVCGGRCCHGWSKAPGSQRCTKPSCVPPCQNGGMCLRPQLCVCKPGTKGKACETIAAQDTSSPVFGGQSPGAASSWGPPEQAAKHTSSKKADTLPRVSPVAQMTLTLKPKPSVGLPQQIHSQVTPLSSQSVVIHHGQTQEYVLKPKYFPAQKGISGEQSTEGSFPLRYVQDQVAAPFQLSNHTGRIKVVFTPSICKVTCTKGSCQNSCEKGNTTTLISENGHAADTLTATNFRVVICHLPCMNGGQCSSRDKCQCPPNFTGKLCQIPVHGASVPKLYQHSQQPGKALGTHVIHSTHTLPLTVTSQQGVKVKFPPNIVNIHVKHPPEASVQIHQVSRIDGPTGQKTKEAQPGQSQVSYQGLPVQKTQTIHSTYSHQQVIPHVYPVAAKTQLGRCFQETIGSQCGKALPGLSKQEDCCGTVGTSWGFNKCQKCPKKPSYHGYNQMMECLPGYKRVNNTFCQDINECQLQGVCPNGECLNTMGSYRCTCKIGFGPDPTFSSCVPDPPVISEEKGPCYRLVSSGRQCMHPLSVHLTKQLCCCSVGKAWGPHCEKCPLPGTAAFKEICPGGMGYTVSGVHRRRPIHHHVGKGPVFVKPKNTQPVAKSTHPPPLPAKEEPVEALTFSREHGPGVAEPEVATAPPEKEIPSLDQEKTKLEPGQPQLSPGISTIHLHPQFPGIVIEKTSPPVPVEVAPEASTSSASQVIAPTQVTEINECTVNPDICGAGHCINLPVRYTCICYEGYRFSEQQRKCVDIDECTQVQHLCSQGRCENTEGSFLCICPAGFMASEEGTNCIDVDECLRPDVCGEGHCVNTVGAFRCEYCDSGYRMTQRGRCEDIDECLNPSTCPDEQCVNSPGSYQCVPCTEGFRGWNGQCLDVDECLEPNVCANGDCSNLEGSYMCSCHKGYTRTPDHKHCRDIDECQQGNLCVNGQCKNTEGSFRCTCGQGYQLSAAKDQCEDIDECQHRHLCAHGQCRNTEGSFQCVCDQGYRASGLGDHCEDINECLEDKSVCQRGDCINTAGSYDCTCPDGFQLDDNKTCQDINECEHPGLCGPQGECLNTEGSFHCVCQQGFSISADGRTCEDIDECVNNTVCDSHGFCDNTAGSFRCLCYQGFQAPQDGQGCVDVNECELLSGVCGEAFCENVEGSFLCVCADENQEYSPMTGQCRSRTSTDLDVDVDQPKEEKKECYYNLNDASLCDNVLAPNVTKQECCCTSGAGWGDNCEIFPCPVLGTAEFTEMCPKGKGFVPAGESSSEAGGENYKDADECLLFGQEICKNGFCLNTRPGYECYCKQGTYYDPVKLQCFDMDECQDPSSCIDGQCVNTEGSYNCFCTHPMVLDASEKRCIRPAESNEQIEETDVYQDLCWEHLSDEYVCSRPLVGKQTTYTECCCLYGEAWGMQCALCPLKDSDDYAQLCNIPVTGRRQPYGRDALVDFSEQYTPEADPYFIQDRFLNSFEELQAEECGILNGCENGRCVRVQEGYTCDCFDGYHLDTAKMTCVDVNECDELNNRMSLCKNAKCINTDGSYKCLCLPGYVPSDKPNYCTPLNTALNLEKDSDLE

SEQ ID NO: 139 - DNA, 1719 bp, Homo sapiens
ggcgatgggaaggcgggcgcagtcgacccaagggtggagaagagggaaggcgaaggacgcgcgttcccgggctcgtgaccgccagcggcccggggaacccgctcccagacagactcggagagatggcaggcggaagacaccggcgcgtcgtgggcaccctccacctgctgctgctggtggccgccctgccctgggcatccaggggggtcagtccgagtgcctcagcctggccagaggagaagaattaccaccagccagccattttgaattcatcggctcttcggcaaattgcagaaggcaccagtatctctgaaatgtggcaaaatgacttacagccattgctgatagagcgatacccgggatcccctggaagctatgctgctcgtcagcacatcatgcagcgaattcagaggcttcaggctgactgggtcttggaaatagacaccttcttgagtcagacaccctatgggtaccggtctttctcaaatatcatcagcaccctcaatcccactgctaaacgacatttggtcctcgcctgccactatgactccaagtatttttcccactggaacaacagagtgtttgtaggagccactgattcagccgtgccatgtgcaatgatgttggaacttgctcgtgccttagacaagaaactcctttccttaaagactgtttcagactccaagccagatttgtcactccagctgatcttctttgatggtgaagaggcttttcttcactggtctcctcaagattctctctatgggtctcgacacttagctgcaaagatggcatcgaccccgcacccacctggagcgagaggcaccagccaactgcatggcatggatttattggtcttattggatttgattggagctccaaacccaacgtttcccaatttttttccaaactcagccaggtggttcgaaagacttcaagcaattgaacatgaacttcatgaattgggtttgctcaaggatcactctttggaggggcggtatttccagaattacagttatggaggtgtgattcaggatgaccatattccatttttaagaagaggtgttccagttctgcatctgataccgtctcctttccctgaagtctggcacaccatggatgacaatgaagaaaatttggatgaatcaaccattgacaatctaaacaaaatcctacaagtctttgtgttggaatatcttcatttgtaatactctgatttagtttaggataattggttctagaattgaattcaaaagtcaaggcatcatttaaaataatctgatttcagacaaatgctgtgtggaaacatctatcctatagatcatcctattcttatgtgtctttggttatcagatcaattacagaataattgtgttgtgatattgtgtcctaaattgctcattaatttttatttacagattgaaaaagagggaccgtgtaaagaaaatggaaaataaatatctttcaaagactcttttagataaacacgatgaggcaaaatcaggttcattcattcaacgatagtttctcaacagtacttaaatagcggttggaaaacgtagccttcattttatgattttttcatatgtggaaatctattacatgtaatacaaaacaaacatgtagtttgaaggcggtcagatttctttgagaaatctttgtagagttaattttatggaaattaaaatcagaattaaatgctaaaaaaaaaaaaaaaaa

SEQ ID NO: 140 - protein, 361 aa, Homo sapiens
MAGGRHRRVVGTLHLLLLVAALPWASRGVSPSASAWPEEKNYHQPAILNSSALRQIAEGTSISEMWQNDLQPLLIERYPGSPGSYAARQHIMQRIQRLQADWVLEIDTFLSQTPYGYRSFSNIISTLNPTAKRHLVLACHYDSKYFSHWNNRVFVGATDSAVPCAMMLELARALDKKLLSLKTVSDSKPDLSLQLIFFDGEEAFLHWSPQDSLYGSRHLAAKMASTPHPPGARGTSQLHGMDLLVLLDLIGAPNPTFPNFFPNSARWFERLQAIEHELHELGLLKDHSLEGRYFQNYSYGGVIQDDHIPFLRRGVPVLHLIPSPFPEVWHTMDDNEENLDESTIDNLNKILQVFVLEYLHL

SEQ ID NO: 141 - DNA, 1697 bp, Homo sapiens
gcgggtgtgtgtgtgtgtggatgtgtgtggggtgtgggtgtcccttacgcccttcctcctctccctcctcctcctgctcccccctcctttccttctcctcctcccccctctcctctccctcctcctggtcctcatcgcccctctcctcctcttcctcccctctctcttcctctccctgaattttctcctctcctctcaggtcagtccatggtattccgctcccccctagacctctattcctcccacttcttgttgccaaacttcgccgattctcaccaccgctccatacttctggcgagtagcggcggcgggaacggtgcgggaggcggcggcggcgcgggaggcggcagcggcggcgggaacggtgcgggaggcggcggtgctggcggagcaggcggcggcggcggcggcggctccagggcccccccggaagagttgtccatgttccagctgcccaccctcaacttctcgccggagcaggtggccagcgtctgtgagacgctggaggagacgggcgacatcgagcggctgggccgcttcctctggtcgctgcccgtggcccccggggcgtgcgaggccatcaacaaacacgagtcgatcctgcgcgcgcgcgccgtggtcgccttccacacgggcaacttccgcgacctctaccacatccttgagaaccacaagttcaccaaggagtctcacggcaagctgcaggccatgtggctcgaggcgcactaccaggaggccgagaagctgcgcggccgcccactcggcccggtggacaagtaccgcgtgcgcaagaagttcccgctgccacgcaccatctgggacggcgagcagaagacgcattgcttcaaggagcggactcggagcctgttgcgggagtggtacctacaggacccctaccccaaccccagcaagaaacgcgaactggcgcaggccaccggcctcactcccacacaagtaggcaactggtttaagaaccggcggcagcgcgaccgcgccgcggcggccaagaacaggctccagcaccaggccattggaccgagcggcatgcgctcgctggccgagcccggctgccccacgcacggctcggcagagtcgccgtccacggcggccagcccgaccaccagcgtgtccagcctgacggagcgcgcagacaccggcacctccatcctctcggtaacctccagcgactcggaatgtgatgtatgatagccaaggccgccctcctccctctccttcccctcctcccccactccttcccctccgcctcctagccctcctcctcttcctcctcttccttctcctcctccatccccagaacaaaccgaaatcaggatacccaaccatacacacatacaagtccacacacactcccaccccagccaaaaatatataaaaaacaagaaaataacaaattaaccgcaaactatcaacaacccccaaccaccatctaccactacggccaccccaaaggaccccgacgccaacagacagtcaaacgctgatgttgcgggcagaaaacataaaagaggtgacaattgtatactttctaggacaagcacggcttctcctttcggttcccatggacccggcaccccacctgcatgacgatttatttgtatctgggaaaatattctctctagttaaaaatgatttaaagagtcgactatacaaaaatcaatcaccaccacgaggacaag

SEQ ID NO: 142 - protein, 332 aa, Homo sapiens
MVFRSPLDLYSSHFLLPNFADSHHRSILLASSGGGNGAGGGGGAGGGSGGGNGAGGGGAGGAGGGGGGGSRAPPEELSMFQLPTLNFSPEQVASVCETLEETGDIERLGRFLWSLPVAPGACEAINKHESILRARAVVAFHTGNFRDLYHILENHKFTKESHGKLQAMWLEAHYQEAEKLRGRPLGPVDKYRVRKKFPLPRTIWDGEQKTHCFKERTRSLLREWYLQDPYPNPSKKRELAQATGLTPTQVGNWFKNRRQRDRAAAAKNRLQHQAIGPSGMRSLAEPGCPTHGSAESPSTAASPTTSVSSLTERADTGTSILSVTSSDSECDV

SEQ ID NO: 143 - DNA, 737 bp, Homo sapiens
atgcagcccccagccctggctaagccccgcctctcaggccctggaggcagaaagctcctcagcctggcccctccgggattctggatccagctgtcctggttgctgcctaactttcagccgtgtgtccagcatatctgtgaactgatctggggccagagctcagggaaaaacagagacactcaggaaaatgaagcaaccatttcctccctccaccaggatatgttgatcctaagcccagaaagctccagccaattgaataagagtaaaagtgccgttttcttggtcagaggcgccaatttgactcacaggcagggcatgatggtggtgggtacagacacctcactggcgatctcctccctcctgtccctgctgctcttcactgggatgcagatgtagatccatcagctggcctccaccgagtggcttaccatccagggtggcctgcatggctcaggtctcttcgtgctctccctcactgccttcaagattctggagaatcttgtgtttggcaaaggatcccaagcaaagaccttccctgagattctcctgtgcctcctgttggctctctttgcatctggcctcatccaccgagtctgtgtcaccacctgcttcatcttctccgtggttggtctgtgctacatcaacaagatctccactctgtatcaggcagcagctgcagtcctcacaggaccttggctcttgccaaggtcacaggcaagagcaagaagagaaattga

SEQ ID NO: 144 - DNA, 2132 bp, Homo sapiens
cgcggagcatgcggagcggcgccccgggcggcccccgggcttgggcgagggcttgggccaggcgcgcgggccgttggggttcggagcttcgtgggacccgcggccggcgcggggacgtacggcagtgactcggggctcaccgggggccagtgccgggccagggggccagccccgcccgcgtctcggcccggacggcccggcgaggaagctcccatgcgggaccgcgcggcccggtgagggcgcgcgcgggcgggcggggacgcagccggcaccatgtccatgctgcccaccttcggcttcacgcaggagcaagtggcgtgcgtgtgcgaggtgctgcagcagggcggcaacatcgagcggctgggccgcttcctgtggtcgctgcccgcctgcgagcaccttcacaagaatgaaagcgtgctcaaggccaaggccgtggtggccttccaccgcggcaacttccgcgagctctacaagatcctggagagccaccagttctcgccgcacaaccacgccaagctgcagcagctgtggctcaaggcacactacatcgaggcggagaagctgcgcggccgacccctgggcgccgtgggcaaataccgcgtgcgccgcaaattcccgctgccgcgctccatctgggacggcgaggagaccagctactgcttcaaggaaaagagtcgcagcgtgctgcgcgagtggtacgcgcacaacccctacccttcaccccgcgagaagcgtgagctgacggaggccacgggcctcaccaccacacaggtcagcaactggttcaagaaccggcggcagcgcgaccgggcggccgaggccaaggaaagggagaacaacgagaactccaattctaacagccacaacccgctgaatggcagcggcaagtcggtgttaggcagctcggaggatgagaagactccatcggggacgccagaccactcatcatccagccccgcactgctcctcagcccgccgccccctgggctgccgtccctgcacagcctgggccaccctccgggccccagcgcagtgccagtgccggtgccaggcggaggtggagcggacccactgcaacaccaccatggcctgcaggactccatcctcaaccccatgtcagccaacctcgtggacctgggctcctagaacccatttgccttgatgagcttgccttttgtgacttgacactggggacgtggagtggcggtgtccaggggcgccccgcccctgcggccccaccaggtactgaaagacccgcaggctgagcgggtagaacagccgggtagggcagatagctgtctatgttggttcttgtttgggatttattttcaacaagttacttttaggatccttttggggctggagactgagtcttgaaccacagaagggaataaattatacaccactgtcattctctctctccctctgtctcttccttttaccctctcttgtcttgccttttccccctttcctcttcctttcccttccttctcttttcttttttctgctttctgtctttctccctctccttgtattgctttccttctagatttctagcttgccaccgttcattctctccttctgtctctccctttctctctccttctctgtttctcctctcttctctcctgccagtctcttgtactctgtgtcctggtccctccgtatgtacccctgtctttctcctcctgactggtggtctatctgcccctacctctggccctcgctttaccggagtagggggtgggagagggaagaggagagaaaagacagggactttgaacctaggccatctcctgaggccttttccctcgcccatgtgggtcagtgggagctgcaggtgtcagcttttcgtctagtaacttaagtgagagagaaagggcagcgccacagaagcccctaaacgccgcctcgtcatacgcccctcctccttctctcttggcgaggccccgccacaccgcgctcttcctcccgggactgtgactacagcgctcccggctgagcgcgccccccgagccgccgacttgccgtctccccgtaatgccctcatgtgaatgttcttcgggaaatatttctgcttttattttataataaaattagaaatcataaataaaaaaaaaaaaaaaaaa

SEQ ID NO: 145 - protein, 291 aa, Homo sapiens
MSMLPTFGFTQEQVACVCEVLQQGGNIERLGRFLWSLPACEHLHKNESVLKAKAVVAFHRGNFRELYKILESHQFSPHNHAKLQQLWLKAHYIEAEKLRGRPLGAVGKYRVRRKFPLPRSIWDGEETSYCFKEKSRSVLREWYAHNPYPSPREKRELTEATGLTTTQVSNWFKNRRQRDRAAEAKERENNENSNSNSHNPLNGSGKSVLGSSEDEKTPSGTPDHSSSSPALLLSPPPPGLPSLHSLGHPPGPSAVPVPVPGGGGADPLQHHHGLQDSILNPMSANLVDLGS

SEQ ID NO: 146 - DNA, 1449 bp, Homo sapiens
atgtcctcccgcagcccccggcccccgccccgccgtagccgccgccgcctgccgcgcccctcctgctgctgctgctgctgccgccgttcgcacctcaacgaggacaccggccgcttcgtgctgctggcggcgctcatcggcctctacctggtggcgggtgccacagtcttctcggcgctcgagagccccggcgaggcggaggcgcgggcgcgctggggcgccacgctgcgcaacttcagcgctgcgcacggcgtggccgagccagagctgcgcgccttcctccggcactacgaggccgcgctggccgccggcgtccgcgccgacgcgctgcgcccgcgctgggacttccccggcgccttctacttcgtgggcaccgtggtgtcaaccataggtttcggcatgaccacccccgcgacggtgggcgggaaggccttcctcatcgcctacgggctgttcggctgcgctgggaccatcctgttcttcaacctcttcctggagcgcatcatctcgctgctggccttcatcatgcgcgcctgccgggagcgccagctgcgccgcagcggcctgctgcccgccaccttccgccgcggctccgcgctctcggaggccgacagcctggcgggctggaagccctcggtgtaccacgtgctgctcatcctgggcctgttcgccgtgctgctgtcctgctgcgcctcggccatgtacaccagcgtggagggctgggactacgtggactcgctctacttctgcttcgtcaccttcagcaccatcggcttcggggacctggtgagcagccagcacgccgcctaccggaaccaggggctctaccgcctgggcaacttcctcttcatcctgctcggcgtgtgctgcatttactcgctcttcaacgtcatctccatcctcatcaagcaggtgctcaactggatgctgcgcaagctgagctgccgctgctgcgcgcgctgctgcccggctcctggcgcgcccctggcccggcgcaatgccatcaccccaggctcccggctgcgccgccgcctggccgcgctcggtgccgaccccgcggcccgcgacagcgacgccgagggccgccgcctctcgggcgagctcatctccatgcgcgacctcacggcctccaacaaggtgtcgctggcgctgctgcagaagcagctgtcggagacggccaacggctacccgcgcagcgtgtgcgtcaacacgcgccagaacggcttctcgggcggcgtgggcgcgctgggcatcatgaacaaccggctggccgagaccagcgcctccaggtagaccgcccgtccgcccgcgccggggaccctctccaggccgcggggccgccgggcgtggtttgcttctctcagtcactgctggcgctttcttaatctttatccaataaaatgaaacaaaaaaaatttttttaaaaaaaaaaaaaaaaaaaaaaaaaaa

SEQ ID NO: 147 - protein, 430 aa, Homo sapiens
MSSRSPRPPPRRSRRRLPRPSCCCCCCRRSHLNEDTGRFVLLAALIGLYLVAGATVFSALESPGEAEARARWGATLRNFSAAHGVAEPELRAFLRHYEAALAAGVRADALRPRWDFPGAFYFVGTVVSTIGFGMTTPATVGGKAFLIAYGLFGCAGTILFFNLFLERIISLLAFIMRACRERQLRRSGLLPATFRRGSALSEADSLAGWKPSVYHVLLILGLFAVLLSCCASAMYTSVEGWDYVDSLYFCFVTFSTIGFGDLVSSQHAAYRNQGLYRLGNFLFILLGVCCIYSLFNVISILIKQVLNWMLRKLSCRCCARCCPAPGAPLARRNAITPGSRLRRRLAALGADPAARDSDAEGRRLSGELISMRDLTASNKVSLALLQKQLSETANGYPRSVCVNTRQNGFSGGVGALGIMNNRLAETSASR

SEQ ID NO: 148 - DNA, 977 bp, Homo sapiens
cattcaacagatgcagaaactgcaggttaaagggtgaaaagcagttgcgaagtccccacagcttggaaatggtggagccgagactgaaacccaggtgtgctagcatctaaagttcatgctctttccaccacattagactgtattctgagggcaccaaggaagctccatttttcttaagaaaccaaattgcagtcctccaggaccacagccaggggagcatcttcgtgggagagtggctgctgctcagagttgtgactcccatccttaagagtcctctgtcctctctggcctcctttctactgatcattgctgtccccttcacaggggagaggggccatggcctatcccctaaagagtctgccaaggtagactcataacctccccgtggcacagctcagacaagctgggctatttacataagacttgacccagggcttgaggacagcgcgaggaatgaggtgcagaggagactgctgcttctgggtgacagtctgcctggctgaccacagctggggtactcattggcctcttgaggccccccacaggcctgccctgcctgacctactcttgtgaggccaaggccatctcctccactctctgggggcctcttctgactcctccaaactcttccatgtctggactcctggcttctgcccaaggccatctattggagtttgggtttccagttgaggatctgcctttttcctggatgaccaaacctagaatgtgaccggcctcatgctccctcctcacaagggtgtggctttatccgagggcctcagcaaggcaaccaacaccagacatgaagctgagcacactcagctcatcctgggagacaaggtgggggtggaggatggtccatccttcttccgcatcaagatgggaagtcttgactcattacccgctggagacttttcctgctgggctctgcactgtcaactgtgagagagggaaataaaacgtactgtacagtccaa

SEQ ID NO: 149 - protein, 68 aa, Homo sapiens
MLPPHKGVALSEGLSKATNTRHEAEHTQLILGDKVGVEDGPSFFRIKMGSLDSLPAGDFSCWALHCQL

SEQ ID NO: 150 - DNA, 467 bp, Homo sapiens
tgactggctattcaaccaaaccatacaaatgaccaattcggtaagaaagcatgaacttcagtgttgaaccaaatcaaccaacctcctcaatccaaatggagatgcctgtgaaagaggatgggccagggtcagctttcaccttcatatcctcccatgcaaaaaacggaagcatgtttgggctgagaggacaggttgccagttgtctgaaccagtcattccaaccaggcttcacacttctgcaaagaagagagggctagaatgcccagtaggagtgcagactggaggatcggctgttttttgaactggagacatcacaggaaactggggaggctccaaattgctaacctgaggccggagcaaaaactttttttttgtcgaagggactgctttttttatttccccttcaacggatggcatcccaagtcctgctggattgcatctgtctttgttcctgcagccaagcctta

SEQ ID NO: 151 - protein, 68 aa, Homo sapiens
MNFSVEPNQPTSSIQMEMPVKEDGPGSAFTFISSHAKNGSMFGLRGQVASCLNQSFQPGFTLLQRREG

SEQ ID NO: 152 - DNA, 437 bp, Homo sapiens
atgaagtacaatccctttgtgacttctgaccgaagcaagaactgcaaaaggcatttcaatgcaccttcccacactcgcagaaagattatgtcttcccctctttccaaagagctgagacaaaagtacaatgttcgatcgaagaccatccaaaaggatgacgaagttcaggttgcgcgaggacactgtaagggtcagcaaattggccaaataatccaggtttacaggaagaaatatgccatctacattgaacgggtgcagtgggaaaaggctaacagcatagctgtccctgtgggcattcacccagcaaggtggttatcactagactaaaacttgacaaaggccacaaaaagatccttgaacggaaagccaaatctcgccaagtaggaaaggaaaatggcaaatacaagaaagaaacaatagggaaggtgcaggaataa

SEQ ID NO: 153 - DNA, 4252 bp, Homo sapiens
aggctgggaagcggcgccatattggcgtcggccgcgctgtattgtcataaatagagccggttttgtggtgttttcactactcggttggatgcctcagccatagtaagtgggaaagtgagcgagcaagcgagctactagcgaccggaggaaagtgaacagggggagaagggaacagcaagaacaggactccagagcgataaacactcgctggagagggagacgcaggaagcgatgaaagagatgtctgcaaacaccgtgctggacagccagcgtcaacaaaagcattatggaattacctccccaattagtttggcatctcctaaagaaattgatcatatttacacacagaaattaattgacgccatgaaaccatttggagtgtttgaagatgaggaagaattgaaccacaggctggtggttcttggtaaattgaacaatttagtaaaagaatggatttctgatgtcagcgagagtaagaacctcccaccttctgttgtggctactgttggtggtaaaattttcacatttggatcctataggcttggagtacacaccaaaggagctgacattgatgcactttgtgtagctccaagacatgtggaaagatctgatttttttcagtctttttttgaaaaattgaaacatcaagatggcattagaaacttaagagctgtagaagatgcctttgtacctgttataaaatttgaatttgatggtattgaaattgatctagtctttgcaagactggcaatacaaaccatatcagataatttagatctaagagacgactctcgcctgagaagccttgatataaggtgtattcgcagcttaaatggttgtagagttactgatgaaattttgcatttagtgccaaataaagaaacttttagactcaccctaagagctgtcaaattatgggcaaaacgacgtggtatttattccaacatgctaggattccttggtggtgtctcctgggcaatgctagttgcaagaacttgccaattgtatccaaatgcagcagcatctactttagttcataagttctttttagttttttccaagtgggaatggccaaatcctgtgctgctgaagcaaccagaagaaagcaatttgaatttgcctgtctgggatcctcgggtaaatccatcagataggtatcatctcatgcccataatcacccctgcctacccacaacagaattctacgtataatgtgtccacatcaactcgaacagtaatggtagaagaatttaaacaaggtcttgcagtcacagatgaaattcttcaaggaaagtcagattggtccaaactacttgagccaccgaatttctttcaaaagtatagacattatatagtattgactgccagcgcatcaacagaagaaaaccatctagagtgggttggattagtagaatctaaaatccgtgtacttgttggaaacttggaacggaatgaatttattactcttgcccatgtgaatccccagtcattcccagggaataaggaacatcataaagacaacaattacgtatcaatgtggttccttgggataatttttcggagagtagaaaatgcagaaagtgtcaacatagacttgacatatgatatacagtcatttactgatacagtgtacagacaggcaaacaatataaatatgctaaaggagggaatgaaaattgaagcaactcatgtaaagaaaaaacaacttcaccactaccttcctgcagaaattcttcaaaagaagaaaaagcaaagtctctctgatgtcaatcgaagctcgggcggacttcaatccaaaagattgtctctggatagcagttgtctggatagctccagagacactgataatggaacaccttttaattctccagcgtccaagtctgatagcccttctgtaggagaaacagaaaggaatagtgctgagcctgctgctgtaattgtggagaagccactgagtgtaccaccagcccaaggactttccattccagtgattggcgcaaaagttgactctacagtaaaaactgtatcaccccccactgtgtgtaccattcctaccgtagtaggacgaaatgtcattcctagaatcacaacacctcacaaccctgcccagggacaaccgcatctgaatggaatgtcaaatataactaagactgttacacctaagagatcccattccccatccatagatgggactcctaagaggttgaaagacgtagaaaagtttattcgacttgaatcaacatttaaggacccccgcactgctgaagaaagaaaaagaaaatcagtggatgccattggaggagaatctatgcctattccaactattgatacatcacgcaaaaagagactacccagtaaagaactaccagattcatcatctccagttccagcaaacaacatccgtgtcatcaaaaattccattcgactgacccttaatcggtaaaagcagtgcctcctcacttaagtgaacaagcaatcatttagtggcatagatgcagccacttgttttttaaatagaagtggctgtcatacgtgaaataaggtgaaagtgacagccttcagtctaataaccttgaagtggtttttgaactgtcaaactttgacctgtagatgctgtagcattctctcactgattgctacatacacttctctgaggatcacctgctgtcaaattgccatctacagtattacagctttgcatttgggggttttactgccttaactttcaatgcttgttatgggaaccagttcttagccacttggacactgataacaagtcctgaactccttttttgttttgttttttgtgtttttctttttttgtcttatgttgtaatcattgtatagagctaaaaaaattgaaaacaaacaaaaaaattgtcttgtattttccaaatgttaatacatttactttagcattgaagccactttgaaacctgagataaatgaatgtgaggtatcttttctgctttcctcatttgtgtagatgtactgtctgttctgttgatttaaattatttttttccagattggcacatgaaatatttaaacttttttgtgtgcctttctgtccaaatgttgcatagttaccagggaagattagtccagtgattacataagagttgggcaccataaattctctatattttgcctcccatggaggcctttgaaatgcatctttattaaaaatcaaaatataaccaggatactgaaagtcagtatatgaatggtaaaattgttacatatcctatttcatgccattcttgttagttgactggtattttttactgaggagcaactcattccagcatcaacaataagataacctttaagtatggcacacttgtatttttgaggtgtaaaattaacttggcatgataattcctgatcattatttaccccacaacttcaaatagtttcttcacggactaggcatgcagaaataagcagtggattttattgaaacctaaaggcattttgaatgacattgttaccaaccattaattggctcaggacctttgtaatttttatttaactatatgagttgtctttttttacgctgcttttttcaatgcatttcttaatattttttaagtttcatgaatgcatgctcagtttattaaaatccataaccatgtaattcttgtaatatgttgattcagtgttttgtaaatgaagtcgtatgtattttcagagtatttttgtatgtactgtaagataccatcttttcaaagagaaacgtttaaaacctttattgtctctccttagtctaattttttaaatatggattatgcttgaattactatatttaaaatgaaaatgtatagattacacagccaggaatgctagtatctaccaccttctttagatttcactcagcatttagtaggtccagtaggaaaaacccaaaatggtacattgagtagtgtggggaagacacctcgtgtattataggactcacgggatgccatctagcaagtggagaaatagcagtccattttctcttgcaagccctttaccattgagttgaaattcttgaattgccagagagccgtatcctccaggtcccactcctgttcattgccccttaggtctccaaaatgtaaattctaatgtttaccttgtaccatggaaaacatgaaaagagtcttagaagtaaagaacaacaaggaaaaaaatgtttgttctattattccctttttatatagcagcaaaagataagaataaaatcacataaccaagttgaaaaaaaaa

SEQ ID NO: 154 - protein, 736 aa, Homo sapiens
MKEMSANTVLDSQRQQKHYGITSPISLASPKEIDHIYTQKLIDAMKPFGVFEDEEELNHRLVVLGKLNNLVKEWISDVSESKNLPPSVVATVGGKIFTFGSYRLGVHTKGADIDALCVAPRHVERSDFFQSFFEKLKHQDGIRNLRAVEDAFVPVIKFEFDGIEIDLVFARLAIQTISDNLDLRDDSRLRSLDIRCIRSLNGCRVTDEILHLVPNKETFRLTLRAVKLWAKRRGIYSNMLGFLGGVSWAMLVARTCQLYPNAAASTLVHKFFLVFSKWEWPNPVLLKQPEESNLNLPVWDPRVNPSDRYHLMPIITPAYPQQNSTYNVSTSTRTVMVEEFKQGLAVTDEILQGKSDWSKLLEPPNFFQKYRHYIVLTASASTEENHLEWVGLVESKIRVLVGNLERNEFITLAHVNPQSFPGNKEHHKDNNYVSMWFLGIIFRRVENAESVNIDLTYDIQSFTDTVYRQANNINMLKEGMKIEATHVKKKQLHHYLPAEILQKKKKQSLSDVNRSSGGLQSKRLSLDSSCLDSSRDTDNGTPFNSPASKSDSPSVGETERNSAEPAAVIVEKPLSVPPAQGLSIPVIGAKVDSTVKTVSPPTVCTIPTVVGRNVIPRITTPHNPAQGQPHLNGMSNITKTVTPKRSHSPSIDGTPKRLKDVEKFIRLESTFKDPRTAEERKRKSVDAIGGESMPIPTIDTSRKKRLPSKELPDSSSPVPANNIRVIKNSIRLTLNR

SEQ ID NO: 155 - DNA, 5077 bp, Homo sapiens
ctatgctgcgagaagacgacagaagggggagcggctatgagaagggaacggggccagactcagcccgacagcgggattagagccctccagaatacccatcatatagcccctgaggtggcatggtgatgtctccatgagggaaccccttcccactcatcctgtcacgtatatcatagtgttcttgactgggccattcatctaagatgggatttaccctgtgaaacagggagaagacttatggaccccaagcatcatttcgagttgtagttgagtttttaaaagacatacatgcaaagttcctttgctttggaccctctgcattattaaagctgctgtattgctaacccagaactgctccagtgtcttgactgatcatcatggcttcagtttggaagagactgcagcgtgtgggaaaacatgcatccaagttccagtttgtggcctcctaccaggagctcatggttgagtgtacgaagaaatggcaaccagataaactggtggtagtttggaccagaagaagccgaaggaagtcttctaaggcacatagctggcaacctggaataaaaaatccctatcgtggtgttgttgtgtggcctgttcctgaaaacattgaaatcactgtaacactttttaaggatcctcatgcggaagaatttgaagacaaagagtggacatttgtcatagaaaatgaatccccttctggtcgaaggagagctcttgctactagcagcatcaatatgaaacagtatgcaagccctatgccaactcagactgatgtcaagttaaaattcaagccattatctaaaaaagttgtatctgccgctcttcagttttcattatcttgcatttttctgagggaaggaaaagccacagatgaagacatgcaaagtttggctagtttgatgagtatgaagcaggctgacattggcaatttagatgacttcgaagaagataatgaagatgatgatgagaacagagtgaaccaagaagaaaaggcagctaaaattacaggaattgtaaaccagttgaatgctctgagcagcttagatgaagatcaagatgactgcataaagcaagcaaatatgcgttcagctaaatcagccagttcctctgaagagcttatcaacaaacttaactttttggttgaagcagaaaaggacttggccaccgtgaattcaaatccatttgatgatcctgatgctgcagaattaaatccatttggagatcctgactcagaagaacctatcactgaaacagcttcacctagaaaaacagaagactctttttataataacagctataatccctttaaagaggtgcagactccacagtatttgaacccattcgatgagccagaagcatttgtgaccataaaggattctcctccccagtctacaaaaggaaaaaatataagacctgtggatatgagcaagtacctctatgctgatagttctaaaactgaagaagaagaattggatgaatcaaatcctttttatgaacctaaatcaactcctcctccaaataatttggtaaatcctgttcaagaactagaaactgaaaggcgagtgaaaagaaaggccccggctccaccagtcctctcaccaaaaacaggagtattaaatgaaaacacagtttctgcaggaaaagatctctctacttctcctaagccaagccctataccaagtcctgttttggggcgaaagccaaatgctagtcagtctttgcttgtatggtgtaaagaagttacaaagaactaccgaggagtaaaaatcaccaattttactacatcgtggagaaatggtttatctttttgtgcaatattacaccactttagaccagatttaattgactacaagtctctgaatcctcaagatattaaagagaacaacaaaaaggcatacgatggatttgccagcataggaatttcccgattattggaaccttctgatatggtattattagcaattcctgataaactgactgttatgacttatctctatcaaataagggcacatttcagtggccaagaactaaatgtcgttcagatagaggaaaacagcagtaaaagcacatataaagttggaaactatgaaacagatacaaacagttctgttgatcaagaaaaattctatgcagagcttagtgatctgaagcgggagcctgaactacaacagcctatcagcggagcagtagacttcttatcacaggatgactctgtatttgtaaatgatagcggggttggagagtcagaaagtgagcatcaaactcctgatgatcaccttagtccaagcacagcctccccttactgtcgcaggactaaaagtgacacagaaccccagaagtctcagcagagctctggaaggacttcaggatctgatgaccctggaatatgttccaatacagattcaacccaagcacaggttttgttaggcaaaaagagactattgaaagctgagactttagaattgagtgacttatatgttagtgataagaagaaggatatgtctccaccctttatttgtgaggagacagatgaacaaaagcttcaaactctagacatcggtagtaacttggagaaagaaaaattagagaattccagatccttagaatgcagatcagatccagaatctcctatcaaaaaaacaagtttatctcctacttctaaacttggatactcatatagtagagatctagaccttgctaagaaaaaacatgcttccctgaggcagacggagtctgatccagatgctgatagaaccactttaaatcatgcagatcattcatcaaaaatagtccagcatcgattgttatctagacaagaagaacttaaggaaagagcaagagttctgcttgagcaagcaagaagagatgcagccttaaaggcggggaataagcacaataccaacacagccaccccattctgcaacaggcagctaagtgatcagcaagatgaagagcgacgtcggcagctgagagagagagctcgtcagctaatagcagaagctcgatctggagtgaagatgtcagaacttcccagctatggtgaaatggctgcagaaaagttgaaagaaaggtcaaaggcatctggagatgaaaatgataatattgagatagatactaacgaggagatccctgaaggctttgttgtaggaggtggagatgaacttactaacttagaaaatgaccttgatactcccgaacaaaacagtaagttggtggacttgaagctgaagaagctcctagaagttcagccacaggtggcaaattcaccctccagtgctgcccagaaagctgtaactgagagctcagagcaggacatgaaaagtggcacagaagatctccggactgaacgattacaaaaaacaacagaacgttttagaaatcctgttgtgttcagcaaagattctacagtcagaaaaactcaacttcagtctttcagccaatatattgagaatagaccagagatgaaaaggcagagatcaatacaggaagatacaaagaaaggaaatgaggagaaggcagcgataactgaaactcagaggaagccatcagaagatgaagtgcttaataaagggttcaaagacaccagtcagtatgtagtaggagaattggcagcactagagaatgagcaaaagcaaattgacacccgtgccgcgctggtggagaagcgccttcgctatctcatggacacaggaaggaacacagaagaagaagaagctatgatgcaggaatggtttatgttagttaataagaaaaatgccttaataaggagaatgaatcagctctctcttctggaaaaagaacatgatttagaacgacggtatgagctgctgaaccgggaattgagggcaatgctagccattgaagactggcagaagaccgaggcccagaagcgacgcgaacagcttctgctagatgagctggtggccctggtgaacaagcgcgatgcgctcgtcagggacctggacgcgcaggagaagcaggccgaagaagaagatgagcatttggagcgaactctggagcaaaacaaaggcaagatggccaagaaagaggagaaatgtgttcttcagtagccatcagatcagaaagaatctctcccaacattttagagtcttgcttcccaaaccagaaaaagtcagactcattgttgatttaaaacttttaacattttgtttggctggattgtactactttacctctactttaccaccaccacccttttcctccctcctttccaaataatatacagaactccaaaatagcttcatttaaggatttttttgtgagttaacaatttccttgaaatcctgtgagatagatttgcacagacaccttgtgagtgattggtattggaggtgttcaagaaactgttcgaaaaagaacaaaaacacttccctcgttattttctctcattttttgatgagaggaaaatttgaaacattattcttgttgttgttggtaatagcataatgacagtgggaggggtacaaggggataagaaaaatgtcatgatttttttccggtcctgccacatgtaacacttactctgttacctaaattttatagttagatcatatccaatctacttattaaactgtgttctatttaccagtggagattttctgcagtggttgcgtttcactgtaaggataatggagttcctctcctctgctttcctcagaggatggtcctttaacatagccagaaacaagccctgtggtttgaaggtgagctgtgaggatgggactaattgatatgcaccagtttacaaagacagtcttaacatccgagaatacaccatctttttctctggataattatttcttacatcatgcttgattcctacattttgttgggtctcaacattggctcacgaatgctgttaatatttattctgtattgataaaaagtcagtcttgccactacaagtaaatcccccatttaatattttcttctttagcatagcactgtcattttttgtgaaaatggttatgtttatttattacaatactgagtcatatataaattttcaataaaagcagaaactttcttaccttaaaaaaaaaaaaaaaaaaaa

SEQ ID NO: 156 - protein, 1231 aa, Homo sapiens
MASVWKRLQRVGKHASKFQFVASYQELMVECTKKWQPDKLVVVWTRRSRRKSSKAHSWQPGIKNPYRGVVVWPVPENIEITVTLFKDPHAEEFEDKEWTFVIENESPSGRRRALATSSINMKQYASPMPTQTDVKLKFKPLSKKVVSAALQFSLSCIFLREGKATDEDMQSLASLMSMKQADIGNLDDFEEDNEDDDENRVNQEEKAAKITGIVNQLNALSSLDEDQDDCIKQANMRSAKSASSSEELINKLNFLVEAEKDLATVNSNPFDDPDAAELNPFGDPDSEEPITETASPRKTEDSFYNNSYNPFKEVQTPQYLNPFDEPEAFVTIKDSPPQSTKGKNIRPVDMSKYLYADSSKTEEEELDESNPFYEPKSTPPPNNLVNPVQELETERRVKRKAPAPPVLSPKTGVLNENTVSAGKDLSTSPKPSPIPSPVLGRKPNASQSLLVWCKEVTKNYRGVKITNFTTSWRNGLSFCAILHHFRPDLIDYKSLNPQDIKENNKKAYDGFASIGISRLLEPSDMVLLAIPDKLTVMTYLYQIRAHFSGQELNVVQIEENSSKSTYKVGNYETDTNSSVDQEKFYAELSDLKREPELQQPISGAVDFLSQDDSVFVNDSGVGESESEHQTPDDHLSPSTASPYCRRTKSDTEPQKSQQSSGRTSGSDDPGICSNTDSTQAQVLLGKKRLLKAETLELSDLYVSDKKKDMSPPFICEETDEQKLQTLDIGSNLEKEKLENSRSLECRSDPESPIKKTSLSPTSKLGYSYSRDLDLAKKKHASLRQTESDPDADRTTLNHADHSSKIVQHRLLSRQEELKERARVLLEQARRDAALKAGNKHNTNTATPFCNRQLSDQQDEERRRQLRERARQLIAEARSGVKMSELPSYGEMAAEKLKERSKASGDENDNIEIDTNEEIPEGFVVGGGDELTNLENDLDTPEQNSKLVDLKLKKLLEVQPQVANSPSSAAQKAVTESSEQDMKSGTEDLRTERLQKTTERFRNPVVFSKDSTVRKTQLQSFSQYIENRPEMKRQRSIQEDTKKGNEEKAAITETQRKPSEDEVLNKGFKDTSQYVVGELAALENEQKQIDTRAALVEKRLRYLMDTGRNTEEEEAMMQEWFMLVNKKNALIRRMNQLSLLEKEHDLERRYELLNRELRAMLAIEDWQKTEAQKRREQLLLDELVALVNKRDALVRDLDAQEKQAEEEDEHLERTLEQNKGKMAKKEEKCVLQ

SEQ ID NO: 157 - DNA, 636 bp, Homo sapiens
atgccgacgagcaagcaggtaagtggcggcgccctcccagtgggtgctcttcccaggcgcgagagtccggaggggccgaggagagatctgcacgcccggagctgctcccgcgctctgcaaagtagcctgcgccggcacgagcagcccgcggcgtcggtctcaggtggcggcgccggggaagaaaacgctggggcccgcggcgccgggagaggggccgaggcccgggctcctccagcccgccgcccccgggtcctggcgcccacacccgagcggctgagccctgtagcgcgcgggagagcgaaggaaccggttctccagcacctcgcctcctccctgccactccctccggagcgccgagagcgcgagaagggcgggggcgcccagggcaggcctggagacccacggccccctccgcggccaggactcgggctctccgctcgccttcctcgcctagctctgcgccgcttttgccagccgagtcccggagacttcccagtccccactgcctccacgttgcaccgggagtgccgcggcaacgccgagccacctcccaactctgcccctcgaattcccccccttgcggcccctcggcgcgatcccaggcgaggcaatgtcctgagaacgtgtggggcttag

SEQ ID NO: 158 - protein, 211 aa, Homo sapiens
MPTSKQVSGGALPVGALPRRESPEGPRRDLHARSCSRALQSSLRRHEQPAASVSGGGAGEENAGARGAGRGAEARAPPARRPRVLAPTPERLSPVARGRAKEPVLQHLASSLPLPPERREREKGGGAQGRPGDPRPPPRPGLGLSARLPRLALRRFCQPSPGDFPVPTASTLHRECRGNAEPPPNSAPRIPPLAAPRRDPRRGNVLRTCGA

SEQ ID NO: 159 - DNA, 2176 bp, Homo sapiens
gatcaatcttcatcaggctacatttccaatcacctaaacaaccgagcaagacaagccactccgacaaggttggctgcccggcgggtctctgtgagagatccaggtagatggtgaacggccccggcagctgagggcaggccaggcccccagacgcatcagaccctgaaggactgcgtggtgggagccctgcaccgctcctggccccgggccccctggatccgtcggggcgcctccacccagctgttagcatgatgtcttacctcaaacaacccccatacggcatgaacgggctgggcctggccgggcccgccatggacctcctgcacccatccgtgggctatccggccactccgcggaagcagcggcgggagcgcaccaccttcacgcgttcacagctggacgtgctcgaggcgctcttcgccaagactcgctaccctgacatcttcatgcgggaggaggtggcgctcaagatcaacctgccggagtctagagtccaggtctggttcaagaaccgccgcgccaaatgccgccagcagcagcagagcgggagcggaaccaagagccgcccagccaagaagaagtcctctccagtgcgggagagctcgggctccgaaagcagtggccaattcacgccgccagctgtgtccagctctgcctcgtcctctagctcggcgtccagctcttccgccaacccagcggctgcagcggctgcgggactaggtgggaacccggtggcggccgcgtcgtcgctgagtacaccagctgcctcatctatctggagcccggcctccatctcgccaggctcagcgcccgcgtccgtgtcggtgccggagccattggccgcgcctagcaacacctcgtgtatgcagcgctccgtagctgcaggcgccgccaccgcagcagcctcttatcccatgtcctacggccagggcggcagctacggccaaggctaccctacgccctcctcttcctactttggcggcgtggactgcagctcatacctagcgcccatgcactcacatcaccacccgcaccagctcagccccatggcaccctcctccatggcgggccaccatcatcaccacccacatgcgcaccacccgttgagccagtcctcaggccaccaccaccaccatcaccaccaccaccaccaaggctacggtggctctgggcttgccttcaactctgccgactgcttggattacaaggagcctggcgccgctgctgcttcctccgcctggaaactcaacttcaactcccccgactgtctggactataaggaccaagcctcatggcggttccaggtcttgtgagcccaggaatgaaagaggagaagaaacgcaactacctgcgccctccgtggtcccgatcctgttgctgctgctgcaccgcccgcctttgcctcgtcttctccaaaactgaattttcaccccccaaaaagatgtccattgcctgcactgccgcccccatttttgtgccacttgcttggggggatgtgcaaacccaccctgccccttggatggggggaccggtgcttcggcttggcctacacattctatacaggagagatgtattatttccccccttcagcccctactaaactcttaagcctccccttccagtctttctggacagctattaagcacttgcagccttcggaggctctgcgctctgatccgctgtttgagcccaacactttaatttattctttctggacactggagtcactaactggcgtgtttctgcccattggagcacccgcacactactccaaatcaaaaccactaagagttcctcccgcgcagactgctgccccttcagctgccctcgattttgctccacgcctgccggccagagcctcccggcgtttcttccgccccagcggagtgcgctggggcgcgccagggctaggcccgccggaggagcgcgtccccagccttccgcgcacagagccgcatcccgccccgccctgcgctggactggttcaagcttccgcctcggcgggaacgctgtacatagtcaggtccgttccagggaccacttaaactttttagttgctgttggttggttgaactgaacatatcttgtcttagcacccaggaaacagaactttaagatatatacagcacatatatatatatatacatatatatatacacatatataaaaaacaaaa

SEQ ID NO: 160 - protein, 354 aa, Homo sapiens
MMSYLKQPPYGMNGLGLAGPAMDLLHPSVGYPATPRKQRRERTTFTRSQLDVLEALFAKTRYPDIFMREEVALKINLPESRVQVWFKNRRAKCRQQQQSGSGTKSRPAKKKSSPVRESSGSESSGQFTPPAVSSSASSSSSASSSSANPAAAAAAGLGGNPVAAASSLSTPAASSIWSPASISPGSAPASVSVPEPLAAPSNTSCMQRSVAAGAATAAASYPMSYGQGGSYGQGYPTPSSSYFGGVDCSSYLAPMHSHHHPHQLSPMAPSSMAGHHHHHPHAHHPLSQSSGHHHHHHHHHHQGYGGSGLAFNSADCLDYKEPGAAAASSAWKLNFNSPDCLDYKDQASWRFQVL

SEQ ID NO: 161 - DNA, 3310 bp, Homo sapiens
ctcaggaggaaaggacctgcctgatggagcccggcaattggcgggagagatagcgtgtgtaactctagggaggggagaatcaccccttagcgacatcacccccacgcgcgtgactgagactgcatcctcccatgagggtaaacgtgggaggtaaagagaccttccgctgcgtaaagctggatcgacccggaaacaaaatcttttaaaaaacgattgacactctggaggggcgggggaattgataagttgggacgaccggacagcttctcaggttgctaagcgacgaggcgggagcgcacgcacaccctggctgctttgtagcacctgaggaaactgtggcggcggcggcggcgtcctggagacccaagagaccaagcgagcgtgtcgctccctctcgggtccgaggacctagcctaggaaccttctgcccggggtagtgtctggtgatgaggcgagagttttgctgggacgcctactccaaagcggccgggagtcgcgcttcttccccactcccgagacaggatagagattccttctgccatcagatgtctttctgcttgactgaactgcacctgtggtctttgaagaataccttacacattgcggatagagacattgggatctaccagtattatgacaagaaagatccaccagcgacagagcatggtaacttagaaaagaagcagaagctggcagagtcacgagattatccttggacgctcaaaaacagacgcccagaaaaactccgagactcgctcaaagagttggaggagctgatgcaaaacagtcggtgtgtgctgagcaaatggaagaacaaatatgtctgtcagctcctttttggttcaggtgtgctggtgtctctaagcctttctgggccgcagctggagaaagtggtgattgacagaagcctggtggggaagctcatctcagacaccatcagtgatgctcttctcacagacagttttatcatcttatcatttttggcacaaaacaaactatgttttattcagtttaccaagaagatggagtcttctgatgtaaacaaaagactggaaaaactctcagccttggattataagattttctattatgaaatacccggcccaataaacaagacaacagagcgacatctagctatcaactgtgttcatgatagagttgtttgctggtggccactggtcaacgatgatgcttggccttgggcccccatttcttctgagaaggacagagccaatctactcctcctgggttatgctcaaggaagactagaggttctgagttctgtccgcacagaatgggacccactggatgttcgctttggcaccaaacagccttatcaggtgttcacagtggagcactccgtaagtgtagacaaagagcccatggctgacagctgcatctatgaatgcattcggaataaaatccagtgtgtgtcagtcaccagaataccactaaagtcaaaggccatcagctgctgcaggaatgttactgaagacaaactgattctgggctgtgaagattcttcgctaattctttatgaaactcaccgtagagtgactctcttagcacagactgaacttttgccttcattaataagctgccacccaagtggtgccattctgctagttggcagcaaccaaggggagttgcaaatttttgatatggctctatcccctattaacatccaactgttggctgaagaccgcttacccagggagactctgcaattcagtaaattatttgatgcctccagcagtcttgttcaaatgcaatggatagctcctcaggttgtttctcagaagggtgaaggtagtgatatctatgatctcctcttcctcaggtttgaaagaggacctttgggtgtgctgttgtttaaactaggcgtcttcactcgaggacagctgggcctgatagacatcatcttccagtacattcactgtgatgagatctatgaggcaataaacatcctgagcagcatgaactgggacactctgggccaccagtgctttatcagcatgagcgccattgtaaaccatcttcttagacagaagctcactccagagagagaagcacagcttgagacaagccttggaaccttctatgctccaacaagaccacttctggattccactatattggaatatagagatcaaatcagcaaatatgcaaggagattcttccatcacttgctcaggtaccagaggtttgaaaaggcatttctcctagctgttgacgttggtgctcgtgacctctttatggatattcattaccttgcactagataaaggtgaattggcactagctgaagtggcaagaaaaagagctagtgacattgatgcagaatcaataacctctggggttgaactcctgggacccttggacagaggggatatgctaaatgaagcatttattggcctgtctttagcacctcaaggagaagactcatttccagataacctccctccctcttgcccaacccacagacatattttacaacaaagaatactgaatggctcttctaacagacaaataattgacagaaggaatgaacttgaaaaagacatctgttctggatttttgatgactaatacctgtaatgcagaagacggagaactgagagaagacggcagagaacaggaaatcagagatggtggttctctcaaaatgattcactttggtctggtgtaaacattaagaaaaaaagaaaactgccttcttcatatctaaacttttcatggcctgatacagacttaaaatcccccgtgtggatttttaacaagagacagtatgaatcatataaattagttaagagttttgagttgagtgtttgttttcaaaataaagttttattatttcaaaaacatgcagcataacagcaaagtgatcgtaagtaaaagtcttcaacctacttattttcaataatgtaaaattttgaaagtgtcttaaattgtatgttaattaggtgctacaaaaatagaatatttaaactttgttctcccaggtactttaaaaaaggggcagtagggggcaggcatagtgctcatgcctgtagtcccagtgctttaggaggccaaggctgaaggatcacttgagcccaggagttcaagactagcctgtgcaacatagtgaaacgctgtctctagaaaaaattttaaaaattagccaggcatggtggtacatgcttgtgaagctgaggcagaagaattgcttgagcccaggagttcaaggctacagtgagctgtgatcgcgccactgcactctaacctgggcaacagagagtgaccctgtctccaaaaaaaaaaaaaaaaaaa

SEQ ID NO: 162 - protein, 746 aa, Homo sapiens
MRREFCWDAYSKAAGSRASSPLPRQDRDSFCHQMSFCLTELHLWSLKNTLHIADRDIGIYQYYDKKDPPATEHGNLEKKQKLAESRDYPWTLKNRRPEKLRDSLKELEELMQNSRCVLSKWKNKYVCQLLFGSGVLVSLSLSGPQLEKVVIDRSLVGKLISDTISDALLTDSFIILSFLAQNKLCFIQFTKKMESSDVNKRLEKLSALDYKIFYYEIPGPINKTTERHLAINCVHDRVVCWWPLVNDDAWPWAPISSEKDRANLLLLGYAQGRLEVLSSVRTEWDPLDVRFGTKQPYQVFTVEHSVSVDKEPMADSCIYECIRNKIQCVSVTRIPLKSKAISCCRNVTEDKLILGCEDSSLILYETHRRVTLLAQTELLPSLISCHPSGAILLVGSNQGELQIFDMALSPINIQLLAEDRLPRETLQFSKLFDASSSLVQMQWIAPQVVSQKGEGSDIYDLLFLRFERGPLGVLLFKLGVFTRGQLGLIDIIFQYIHCDEIYEAINILSSMNWDTLGHQCFISMSAIVNHLLRQKLTPEREAQLETSLGTFYAPTRPLLDSTILEYRDQISKYARRFFHHLLRYQRFEKAFLLAVDVGARDLFMDIHYLALDKGELALAEVARKRASDIDAESITSGVELLGPLDRGDMLNEAFIGLSLAPQGEDSFPDNLPPSCPTHRHILQQRILNGSSNRQIIDRRNELEKDICSGFLMTNTCNAEDGELREDGREQEIRDGGSLKMIHFGLV

SEQ ID NO: 163 - DNA, 6907 bp, Homo sapiens
ccgcccagccaggtgcaaaatgccgtgtcattgggagactccgcagccggagcattagattacagctcgacggagctcgggaagggcggcgggggtggaagatgagcagaagcccctgttctcggaacgccggctgacaagcggggtgagcgcagccggggcggggacccagcctagcccactggagcagccgggggtggcccgttcccctttaagagcaactgctctaagccaggagccagagattcgagccggcctcgcccagccagccctctccagcgaggggacccacaagcggcgcctcggccctcccgacctttccgagccctctttgcgccctgggcgcacggggccctacacgcgccaagcatgctgagggtcttcatcctctatgccgagaacgtccacacacccgacaccgacatcagcgatgcctactgctccgcggtgtttgcaggggtgaagaagagaaccaaagtcatcaagaacagcgtgaaccctgtatggaatgagggatttgaatgggacctcaagggcatccccctggaccagggctctgagcttcatgtggtggtcaaagaccatgagacgatggggaggaacaggttcctgggggaagccaaggtcccactccgagaggtcctcgccacccctagtctgtccgccagcttcaatgcccccctgctggacaccaagaagcagcccacaggggcctcgctggtcctgcaggtgtcctacacaccgctgcctggagctgtgcccctgttcccgccccctactcctctggagccctccccgactctgcctgacctggatgtagtggcagacacaggaggagaggaagacacagaggaccagggactcactggagatgaggcggagccattcctggatcaaagcggaggcccgggggctcccaccaccccaaggaaactaccttcacgtcctccgccccactaccccgggatcaaaagaaagcgaagtgcgcctacatctagaaagctgctgtcagacaaaccgcaggatttccagatcagggtccaggtgatcgaggggcgccagctgccgggggtgaacatcaagcctgtggtcaaggttaccgctgcagggcagaccaagcggacgcggatccacaagggaaacagcccactcttcaatgagactcttttcttcaacttgtttgactctcctggggagctgtttgatgagcccatctttatcacggtggtagactctcgttctctcaggacagatgctctcctcggggagttccggatggacgtgggcaccatttacagagagccccggcacgcctatctcaggaagtggctgctgctctcagaccctgatgacttctctgctggggccagaggctacctgaaaacaagcctttgtgtgctggggcctggggacgaagcgcctctggagagaaaagacccctctgaagacaaggaggacattgaaagcaacctgctccggcccacaggcgtagccctgcgaggagcccacttctgcctgaaggtcttccgggccgaggacttgccgcagatggacgatgccgtgatggacaacgtgaaacagatctttggcttcgagagtaacaagaagaacttggtggacccctttgtggaggtcagctttgcggggaaaatgctgtgcagcaagatcttggagaagacggccaaccctcagtggaaccagaacatcacactgcctgccatgtttccctccatgtgcgaaaaaatgaggattcgtatcatagactgggaccgcctgactcacaatgacatcgtggctaccacctacctgagtatgtcgaaaatctctgcccctggaggagaaatagaagaggagcctgcaggtgctgtcaagccttcgaaagcctcagacttggatgactacctgggcttcctccccacttttgggccctgctacatcaacctctatggcagtcccagagagttcacaggcttcccagacccctacacagagctcaacacaggcaagggggaaggtgtggcttatcgtggccggcttctgctctccctggagaccaagctggtggagcacagtgaacagaaggtggaggaccttcctgcggatgacatcctccgggtggagaagtaccttaggaggcgcaagtactccctgtttgcggccttctactcagccaccatgctgcaggatgtggatgatgccatccagtttgaggtcagcatcgggaactacgggaacaagttcgacatgacctgcctgccgctggcctccaccactcagtacagccgtgcagtctttgacgggtgccactactactacctaccctggggtaacgtgaaacctgtggtggtgctgtcatcctactgggaggacatcagccatagaatcgagactcagaaccagctgcttgggattgctgaccggctggaagctggcctggagcaggtccacctggccctgaaggcgcagtgctccacggaggacgtggactcgctggtggctcagctgacggatgagctcatcgcaggctgcagccagcctctgggtgacatccatgagacaccctctgccacccacctggaccagtacctgtaccagctgcgcacccatcacctgagccaaatcactgaggctgccctggccctgaagctcggccacagtgagctccctgcagctctggagcaggcggaggactggctcctgcgtctgcgtgccctggcagaggagccccagaacagcctgccggacatcgtcatctggatgctgcagggagacaagcgtgtggcataccagcgggtgcccgcccaccaagtcctcttctcccggcggggtgccaactactgtggcaagaattgtgggaagctacagacaatctttctgaaatatccgatggagaaggtgcctggcgcccggatgccagtgcagatacgggtcaagctgtggtttgggctctctgtggatgagaaggagttcaaccagtttgctgaggggaagctgtctgtctttgctgaaacctatgagaacgagactaagttggcccttgttgggaactggggcacaacgggcctcacctaccccaagttttctgacgtcacgggcaagatcaagctacccaaggacagcttccgcccctcggccggctggacctgggctggagattggttcgtgtgtccggagaagactctgctccatgacatggacgccggtcacctgagcttcgtggaagaggtgtttgagaaccagacccggcttcccggaggccagtggatctacatgagtgacaactacaccgatgtgaacggggagaaggtgcttcccaaggatgacattgagtgcccactgggctggaagtgggaagatgaggaatggtccacagacctcaaccgggctgtcgatgagcaaggctgggagtatagcatcaccatccccccggagcggaagccgaagcactgggtccctgctgagaagatgtactacacacaccgacggcggcgctgggtgcgcctgcgcaggagggatctcagccaaatggaagcactgaaaaggcacaggcaggcggaggcggagggcgagggctgggagtacgcctctctttttggctggaagttccacctcgagtaccgcaagacagatgccttccgccgccgccgctggcgccgtcgcatggagccactggagaagacggggcctgcagctgtgtttgcccttgagggggccctgggcggcgtgatggatgacaagagtgaagattccatgtccgtctccaccttgagcttcggtgtgaacagacccacgatttcctgcatattcgactatgggaaccgctaccatctacgctgctacatgtaccaggcccgggacctggctgcgatggacaaggactctttttctgatccctatgccatcgtctccttcctgcaccagagccagaagacggtggtggtgaagaacacccttaaccccacctgggaccagacgctcatcttctacgagatcgagatctttggcgagccggccacagttgctgagcaaccgcccagcattgtggtggagctgtacgaccatgacacttatggtgcagacgagtttatgggtcgctgcatctgtcaaccgagtctggaacggatgccacggctggcctggttcccactgacgaggggcagccagccgtcgggggagctgctggcctcttttgagctcatccagagagagaagccggccatccaccatattcctggttttgaggtgcaggagacatcaaggatcctggatgagtctgaggacacagacctgccctacccaccaccccagagggaggccaacatctacatggttcctcagaacatcaagccagcgctccagcgtaccgccatcgagatcctggcatggggcctgcggaacatgaagagttaccagctggccaacatctcctcccccagcctcgtggtagagtgtgggggccagacggtgcagtcctgtgtcatcaggaacctccggaagaaccccaactttgacatctgcaccctcttcatggaagtgatgctgcccagggaggagctctactgcccccccatcaccgtcaaggtcatcgataaccgccagtttggccgccggcctgtggtgggccagtgtaccatccgctccctggagagcttcctgtgtgacccctactcggcggagagtccatccccacagggtggcccagacgatgtgagcctactcagtcctggggaagacgtgctcatcgacattgatgacaaggagcccctcatccccatccaggaggaagagttcatcgattggtggagcaaattctttgcctccataggggagagggaaaagtgcggctcctacctggagaaggattttgacaccctgaaggtctatgacacacagctggagaatgtggaggcctttgagggcctgtctgacttttgtaacaccttcaagctgtaccggggcaagacgcaggaggagacagaagatccatctgtgattggtgaatttaagggcctcttcaaaatttatcccctcccagaagacccagccatccccatgcccccaagacagttccaccagctggccgcccagggaccccaggagtgcttggtccgtatctacattgtccgagcatttggcctgcagcccaaggaccccaatggaaagtgtgatccttacatcaagatctccatagggaagaaatcagtgagtgaccaggataactacatcccctgcacgctggagcccgtatttggaaagatgttcgagctgacctgcactctgcctctggagaaggacctaaagatcactctctatgactatgacctcctctccaaggacgaaaagatcggtgagacggtcgtcgacctggagaacaggctgctgtccaagtttggggctcgctgtggactcccacagacctactgtgtctctggaccgaaccagtggcgggaccagctccgcccctcccagctcctccacctcttctgccagcagcatagagtcaaggcacctgtgtaccggacagaccgtgtaatgtttcaggataaagaatattccattgaagagatagaggctggcaggatcccaaacccacacctgggcccagtggaggagcgtctggctctgcatgtgcttcagcagcagggcctggtcccggagcacgtggagtcacggcccctctacagccccctgcagccagacatcgagcaggggaagctgcagatgtgggtcgacctatttccgaaggccctggggcggcctggacctcccttcaacatcaccccacggagagccagaaggtttttcctgcgttgtattatctggaataccagagatgtgatcctggatgacctgagcctcacgggggagaagatgagcgacatttatgtgaaaggttggatgattggctttgaagaacacaagcaaaagacagacgtgcattatcgttccctgggaggtgaaggcaacttcaactggaggttcattttccccttcgactacctgccagctgagcaagtctgtaccattgccaagaaggatgccttctggaggctggacaagactgagagcaaaatcccagcacgagtggtgttccagatctgggacaatgacaagttctcctttgatgattttctgggctccctgcagctcgatctcaaccgcatgcccaagccagccaagacagccaagaagtgctccttggaccagctggatgatgctttccacccagaatggtttgtgtccctttttgagcagaaaacagtgaagggctggtggccctgtgtagcagaagagggtgagaagaaaatactggcgggcaagctggaaatgaccttggagattgtagcagagagtgagcatgaggagcggcctgctggccagggccgggatgagcccaacatgaaccctaagcttgaggacccaaggcgccccgacacctccttcctgtggtttacctccccatacaagaccatgaagttcatcctgtggcggcgtttccggtgggccatcatcctcttcatcatcctcttcatcctgctgctgttcctggccatcttcatctacgccttcccgaactatgctgccatgaagctggtgaagcccttcagctgaggactctcctgccctgtagaaggggccgtggggtcccctccagcatgggactggcctgcctcctccgcccagctcggcgagctcctccagacctcctaggcctgattgtcctgccagggtgggcagacagacagatggaccggcccacactcccagagttgctaacatggagctctgagatcaccccacttccatcatttccttctcccccaacccaacgcttttttggatcagctcagacatatttcagtataaaacagttggaaccacaaaaaaaaaaaaaaaaaaaaaaaaa

SEQ ID NO: 164 - protein, 2080 aa, Homo sapiens
MLRVFILYAENVHTPDTDISDAYCSAVFAGVKKRTKVIKNSVNPVWNEGFEWDLKGIPLDQGSELHVVVKDHETMGRNRFLGEAKVPLREVLATPSLSASFNAPLLDTKKQPTGASLVLQVSYTPLPGAVPLFPPPTPLEPSPTLPDLDVVADTGGEEDTEDQGLTGDEAEPFLDQSGGPGAPTTPRKLPSRPPPHYPGIKRKRSAPTSRKLLSDKPQDFQIRVQVIEGRQLPGVNIKPVVKVTAAGQTKRTRIHKGNSPLFNETLFFNLFDSPGELFDEPIFITVVDSRSLRTDALLGEFRMDVGTIYREPRHAYLRKWLLLSDPDDFSAGARGYLKTSLCVLGPGDEAPLERKDPSEDKEDIESNLLRPTGVALRGAHFCLKVFRAEDLPQMDDAVMDNVKQIFGFESNKKNLVDPFVEVSFAGKMLCSKILEKTANPQWNQNITLPAMFPSMCEKMRIRIIDWDRLTHNDIVATTYLSMSKISAPGGEIEEEPAGAVKPSKASDLDDYLGFLPTFGPCYINLYGSPREFTGFPDPYTELNTGKGEGVAYRGRLLLSLETKLVEHSEQKVEDLPADDILRVEKYLRRRKYSLFAAFYSATMLQDVDDAIQFEVSIGNYGNKFDMTCLPLASTTQYSRAVFDGCHYYYLPWGNVKPVVVLSSYWEDISHRIETQNQLLGIADRLEAGLEQVHLALKAQCSTEDVDSLVAQLTDELIAGCSQPLGDIHETPSATHLDQYLYQLRTHHLSQITEAALALKLGHSELPAALEQAEDWLLRLRALAEEPQNSLPDIVIWMLQGDKRVAYQRVPAHQVLFSRRGANYCGKNCGKLQTIFLKYPMEKVPGARMPVQIRVKLWFGLSVDEKEFNQFAEGKLSVFAETYENETKLALVGNWGTTGLTYPKFSDVTGKIKLPKDSFRPSAGWTWAGDWFVCPEKTLLHDMDAGHLSFVEEVFENQTRLPGGQWIYMSDNYTDVNGEKVLPKDDIECPLGWKWEDEEWSTDLNRAVDEQGWEYSITIPPERKPKHWVPAEKMYYTHRRRRWVRLRRRDLSQMEALKRHRQAEAEGEGWEYASLFGWKFHLEYRKTDAFRRRRWRRRMEPLEKTGPAAVFALEGALGGVMDDKSEDSMSVSTLSFGVNRPTISCIFDYGNRYHLRCYMYQARDLAAMDKDSFSDPYAIVSFLHQSQKTVVVKNTLNPTWDQTLIFYEIEIFGEPATVAEQPPSIVVELYDHDTYGADEFMGRCICQPSLERMPRLAWFPLTRGSQPSGELLASFELIQREKPAIHHIPGFEVQETSRILDESEDTDLPYPPPQREANIYMVPQNIKPALQRTAIEILAWGLRNMKSYQLANISSPSLVVECGGQTVQSCVIRNLRKNPNFDICTLFMEVMLPREELYCPPITVKVIDNRQFGRRPVVGQCTIRSLESFLCDPYSAESPSPQGGPDDVSLLSPGEDVLIDIDDKEPLIPIQEEEFIDWWSKFFASIGEREKCGSYLEKDFDTLKVYDTQLENVEAFEGLSDFCNTFKLYRGKTQEETEDPSVIGEFKGLFKIYPLPEDPAIPMPPRQFHQLAAQGPQECLVRIYIVRAFGLQPKDPNGKCDPYIKISIGKKSVSDQDNYIPCTLEPVFGKMFELTCTLPLEKDLKITLYDYDLLSKDEKIGETVVDLENRLLSKFGARCGLPQTYCVSGPNQWRDQLRPSQLLHLFCQQHRVKAPVYRTDRVMFQDKEYSIEEIEAGRIPNPHLGPVEERLALHVLQQQGLVPEHVESRPLYSPLQPDIEQGKLQMWVDLFPKALGRPGPPFNITPRRARRFFLRCIIWNTRDVILDDLSLTGEKMSDIYVKGWMIGFEEHKQKTDVHYRSLGGEGNFNWRFIFPFDYLPAEQVCTIAKKDAFWRLDKTESKIPARVVFQIWDNDKFSFDDFLGSLQLDLNRMPKPAKTAKKCSLDQLDDAFHPEWFVSLFEQKTVKGWWPCVAEEGEKKILAGKLEMTLEIVAESEHEERPAGQGRDEPNMNPKLEDPRRPDTSFLWFTSPYKTMKFILWRRFRWAIILFIILFILLLFLAIFIYAFPNYAAMKLVKPFS

SEQ ID NO: 165 - DNA, 1793 bp, Homo sapiens
ggcgccgggactccctcctggccgcccacagcctgtgcgcattcctgcattcctgccgccgcccgggacccgagcccccggaggtgtccaggcgcggtgccaggcgggtactgtgcaggttcattctgccacccatctgcattaagacacaaggtgctgaccgcagagacctgccatgaaaccacacttgaagcaatggagacaacgaatgcttttcggaatattcgcttgggggctcctctttttgctgattttcatctacttcaccgacagcaaccccgctgagcctgtacccagctccctctccttcctggagaccaggaggctcctgccggtgcaggggaagcagcgggccatcatgggcgccgcacatgagccctccccgcctgggggcctggacgcacgccaggcgctgccccgcgcccacccagccggttcctttcatgcggggcctggagacctgcagaaatgggcccagtcccaagatgggtttgaacataaagagtttttttcatcccaggtggggagaaaatctcaaagtgctttctacccggaggatgacgactacttttttgctgctggtcagccagggtggcacagccacactcaggggacattgggattcccttcccccggggagccaggcccacgggagggggcttttccggctgcacaggtccagaggaggcgggtgaagaagaggcaccggaggcagagaaggagccacgtgttggaggagggcgacgacggcgacaggctgtactcctccatgtccagggccttcctgtaccggctctggaaggggaacgtctcttccaaaatgctgaacccgcgcctgcagaaggcgatgaaggattacctgaccgccaacaagcacggggtgcgcttccgcgggaagcgggaggccgggctgagcagggcacagctgctgtgccagctgcggagccgcgcgcgcgtgcggacgctggacggcaccgaggcgcccttttctgcgctgggctggcggcgcctggtgcccgccgtgcccctgagccagctgcacccccgcggcctgcgcagctgcgctgtcgtcatgtctgcaggcgcaatcctcaactcttccttgggcgaggaaatagattctcatgatgcggttttgagatttaactctgctcctacacgtggttatgagaaagatgttgggaataaaaccaccatacgcatcattaattcgcagattctgaccaaccccagccatcacttcattgacagttcactgtataaagacgtcattttggtggcctgggaccctgccccatattccgcaaatcttaacctgtggtacaaaaaaccggattacaacctgttcactccatatattcagcatcgtcagagaaacccaaatcagccattttacattcttcatcctaaatttatatggcagctctgggatattatccaggagaacactaaagagaagattcaaccaaacccaccatcttctggtttcattggaatcctcatcatgatgtccatgtgcagagaggtgcacgtgtatgaatatatcccatccgtgcggcagacggagctgtgccactaccacgagctgtactacgacgcagcctgcaccctcggggcgtaccacccactactctatgagaagctcctggtgcagcgcctgaacatgggcacgcagggggatttgcatcgcaagggcaaggtggttcttcctggcttccaggcggtgcactgccctgcaccaagtccagtcattccacactcttaaaaagggtttcttgggaatcaatgtgcaa

SEQ ID NO: 166 - protein, 529 aa, Homo sapiens
MKPHLKQWRQRMLFGIFAWGLLFLLIFIYFTDSNPAEPVPSSLSFLETRRLLPVQGKQRAIMGAAHEPSPPGGLDARQALPRAHPAGSFHAGPGDLQKWAQSQDGFEHKEFFSSQVGRKSQSAFYPEDDDYFFAAGQPGWHSHTQGTLGFPSPGEPGPREGAFPAAQVQRRRVKKRHRRQRRSHVLEEGDDGDRLYSSMSRAFLYRLWKGNVSSKMLNPRLQKAMKDYLTANKHGVRFRGKREAGLSRAQLLCQLRSRARVRTLDGTEAPFSALGWRRLVPAVPLSQLHPRGLRSCAVVMSAGAILNSSLGEEIDSHDAVLRFNSAPTRGYEKDVGNKTTIRIINSQILTNPSHHFIDSSLYKDVILVAWDPAPYSANLNLWYKKPDYNLFTPYIQHRQRNPNQPFYILHPKFIWQLWDIIQENTKEKIQPNPPSSGFIGILIMMSMCREVHVYEYIPSVRQTELCHYHELYYDAACTLGAYHPLLYEKLLVQRLNMGTQGDLHRKGKVVLPGFQAVHCPAPSPVIPHS

SEQ ID NO: 167 - DNA, 759 bp, Homo sapiens
atggggtttttcaagtgtgcagaaagttctctaaatacaaaatgtgcttccagcccaccaaagacccccctcacccaagcaggcagtcctcggcgaggagggtcagcatgcccctttatgccttcttcccacgccgcgcctcgaagcgcacgacaccgtggtgctcggtgctccccctggcagcgcggcactggagtccaaggcgtgcgtgtcacattttattccccggcagccgctcgggtgcgcgcgctacgcgctcccacactcacgctggcgcccgctagagctgggaccctggccggggtccccgactcacgccgcggaacttgggggctgcagaaggcgagtgcgcggcgggagtcgtcctgccgcaggctcgagtcctcctcctgccaccgtggggtctcggagctgccccgcgctcccgtcccaggcggcctgcgggatcacctctccggggccagcgctgctccgcgccggcggcagctgcaagcgcgggcggcggggcacagcgggtggctcggcctcaaagccggcgggaggctacgctcagccccgcgctgcacgcctcattgtttcgggcagcgcggcggcggctcccgcggccagaggaaccgcggccccgagccccggggagaggcggcggttcccggcccacgcaccgaggctgcgccgcgccccgcccccgagctccgctcgccccagagccccctccctctccgcgatccctttcatccttcccgctccaggctcacctag

SEQ ID NO: 168 - protein, 252 aa, Homo sapiens
MGFFKCAESSLNTKCASSPPKTPLTQAGSPRRGGSACPFMPSSHAAPRSARHRGARCSPWQRGTGVQGVRVTFYSPAAARVRALRAPTLTLAPARAGTLAGVPDSRRGTWGLQKASARRESSCRRLESSSCHRGVSELPRAPVPGGLRDHLSGASAAPRRRQLQARAAGHSGWLGLKAGGRLRSAPRCTPHCFGQRGGGSRGQRNRGPEPRGEAAVPGPRTEAAPRPAPELRSPQSPLPLRDPFHPSRSRLT

SEQ ID NO: 169 - DNA, 5284 bp, Homo sapiens
gattccagctctcgcgcccgacgaggtggatttggctgtccaccgagctccggcgcctgtcgttctaattgggtttggatttgcaccgttaaggaggggggaagagaaggaagaggcgggcgaggaaggcgagtccagctagcggctgttgcggggaccgtagccccagctgcagctccgaagaatcccccgccacggtttcggtggagcgtctgggcacgggatggagtgaaagagcgagtgcctctccaagcgggggtgggagggggtcaggctgtgcagaggagagagacagcgagaagaagccgcggctggctactgcgaatttgggattcgattgggagggaccgctcactcgggggaaatggattctttaccacggctgaccagcgttttgactttgctgttctctggcttgtggcatttaggattaacagcgacaaactacaactgtgatgatccactagcatccctgctctctccaatggctttttccagttcctcagacctcactggcactcacagcccagctcaactcaactggagagttggaactggcggttggtccccagcagattccaatgctcaacagtggctccagatggacctgggaaacagagtagagattacagcagtggccacgcagggaagatacggaagctctgactgggtgacgagttacagcctgatgttcagtgacacaggacgcaactggaaacagtacaaacaagaagacagcatctggacctttgcaggaaacatgaatgctgacagcgtggtgcaccacaagctattgcactcagtgagagcccgatttgttcgctttgtgcccctggaatggaatcccagtgggaagattggcatgagagtcgaggtctacggatgttcctataaatcagatgttgctgactttgatggccgaagctcacttctgtacaggttcaatcagaagttgatgagtactctcaaagatgtgatctccctgaagttcaagagcatgcaaggagatggggtcctgttccatggagaaggtcagcgtggagaccacatcaccttggaactccagaaggggaggctcgccctacacctcaatttgggtgacagcaaagcgcggctcagcagcagcttgccctctgccaccctgggcagcctcctggatgaccagcactggcactcggtcctcattgagcgggtgggcaagcaggtgaacttcacggtggacaagcacacacagcacttccgcaccaagggcgagacggatgccttagacattgactatgagcttagttttggaggaattccagtaccaggaaaacctgggacctttttaaagaaaaacttccatggatgcatcgaaaacctttactacaatggagtaaacataattgacctggctaagagacgaaagcatcagatctatactggcaatgtcactttttcctgctccgaaccacagattgtgcccatcacatttgtcaactccagcggcagctatttgctgctgcccggcaccccccaaattgatgggctctcagtgagtttccagtttcgaacatggaacaaggatggtctgcttctgtccacagagctgtctgagggctcgggaaccctgctgctgagcctggagggtggaatcctgagactcgtgattcagaaaatgacagaacgcgtagctgaaatcctcacaggcagcaacttgaatgatggcctgtggcactcggttagcatcaacgccaggaggaaccgcatcacgctcactctggatgatgaagcagcacccccggctccagacagcacttgggtgcagatttattctggaaatagctactattttggagggtgccccgacaatctcaccgattcccaatgtttaaatcccattaaggctttccaaggctgcatgaggctcatctttattgataaccagcccaaggacctcatttcagttcagcaaggttccctggggaattttagtgatttacacattgatctgtgtagcatcaaagacaggtgtttgccaaactactgtgaacatggaggaagctgctcccagtcctggactaccttctattgtaactgcagtgacacaagttacactggtgccacctgccacaactccatctacgagcaatcctgcgaggtgtacaggcaccaggggaatacagccggcttcttctacatcgactcagatggcagcggcccactgggacctctccaggtgtactgcaatatcactgaggacaagatctggacatcagtgcagcacaacaatacagagctgacccgagtgcggggcgctaaccctgagaagccctatgccatggccttggactacgggggcagcatggaacagctggaggccgtgatcgacggctctgagcactgtgagcaggaggtggcctaccactgcaggaggtcccgcctgctcaacacgccggatggaacaccatttacctggtggattgggcggtccaatgaaaggcacccttactggggaggttcccctcctggggtccagcagtgtgagtgtggcctagacgagagctgcctggacattcagcacttttgcaattgcgacgctgacaaggatgaatggacaaatgatactggctttctttccttcaaagaccacttgcctgtcactcagatagttatcactgataccgacagatcaaactcagaagccgcttggagaattggtcccttgcgttgctatggtgaccgacgcttctggaacgccgtctcattttatacagaagcctcttacctccactttcctaccttccatgcggaattcagtgccgatatttccttcttttttaaaaccacagcattatccggagttttcctagaaaatcttggcattaaagacttcattcgactcgaaataagctctccttcagagatcacctttgccatcgatgttgggaatggtcctgtggagcttgtagtccagtctccttctcttctgaatgacaaccaatggcactatgtccgggctgagaggaacctcaaggagacctccctgcaggtggacaaccttccaaggagcaccagggagacgtcggaggagggccattttcgactgcagctgaacagccagttgtttgtagggggaacgtcatccagacagaaaggcttcctaggatgcattcgctccttacacttgaatggacagaaaatggacctggaagagagggcaaaggtcacatctggagtcaggccaggctgccccggccactgcagcagctacggcagcatctgccacaacgggggcaagtgtgtggagaagcacaatggctacctgtgtgattgcaccaattcaccttatgaagggcccttttgcaaaaaagaggtttctgctgtttttgaggctggcacgtcggttacttacatgtttcaagaaccctatcctgtgaccaagaatataagcctctcatcctcagctatttacacagattcagctccatccaaggaaaacattgcacttagctttgtgacaacccaggcacccagtcttttgctctttatcaattcttcttctcaggacttcgtggttgttctgctctgcaagaatggaagcttacaggttcgctatcacctaaacaaggaagaaacccatgtattcaccattgatgcagataactttgctaacagaaggatgcaccacttgaagattaaccgagagggaagagagcttaccattcagatggaccagcaacttcgactcagttataacttctctccggaagtagagttcagggttataaggtcactcaccttgggcaaagtcacagagaatcttggtttggattctgaagttgctaaagcaaatgccatgggttttgctggatgcatgtcttccgtccagtacaaccacatagcaccactgaaggctgccctgcgccatgccactgtcgcgcctgtgactgtccatgggaccttgacggaatccagctgtggcttcatggtggactcagatgtgaatgcagtgaccacggtgcattcttcatcagatccttttgggaagacagatgagcgggaaccactcacaaatgctgttcgaagtgattcggcagtcatcggaggggtgatagcagtggtgatattcatcatcttctgtatcatcggcatcatgacccggttcctctaccagcacaagcagtcacatcgtacgagccagatgaaggagaaggaatatccagaaaatttggacagttccttcagaaatgaaattgacttgcaaaacacagtgagcgagtgtaaacgggaatatttcatctgagaaactgcagggttcctactactcttttttcttgttgttcaattatctcctccccctcttctctcctgtcttttgatttggtcattctctttattttctgcttgccatgtcttttctggaacatacttgcatccaccacagcatcaattcccttgatccagcccaagagaccaggcagccatggccactgccttcctctctgatgaacctatcgggtgaaaacgaccactcaagagactgacttcgccattcaagacaaggaagagacacatgtgtgcactcctgcatgttcagttctgtacttccagtttctaaaatgcactgttcagttttccaaccacttggtggttcaggcttgctttgaacctgagctcttaggcacatgacggtcattcctgacatcctccccagctcaagtctattcttaccatagaacccagggcagggagagaagaacctagaggcctggtttgctttggtggcattgtaaaaagagtaagagaggtttggtttgtggtggtttgctttctttaccataagcaatcccttgccttaactcatcaccctttttcactatgacccttagaccctgagtattttcaaatatatgattgctgatagtagtgaccaaaactactttgttcctttcttaccactctctcctggggccgacacgttgggacagcacaccatagcataaagctaggggatgcatggaaatagcagcttgaaactaggaggtaacaagaaagcttctaggaagtagatgttccatatcttcaaaatgcctcctccaattttgtaagaatgctagctaggtattcctgggattattatactgagatatatatatatacacacacacacacatatgtgtatatatgtatatatatatgtgagtatatatacacacacacacacacacacacatatatatatatacacacacgcacacatatatgttgctgcagcataaagaaattgaaataaaagtttaaa

SEQ ID NO: 170 - protein, 1306 aa, Homo sapiens
MDSLPRLTSVLTLLFSGLWHLGLTATNYNCDDPLASLLSPMAFSSSSDLTGTHSPAQLNWRVGTGGWSPADSNAQQWLQMDLGNRVEITAVATQGRYGSSDWVTSYSLMFSDTGRNWKQYKQEDSIWTFAGNMNADSVVHHKLLHSVRARFVRFVPLEWNPSGKIGMRVEVYGCSYKSDVADFDGRSSLLYRFNQKLMSTLKDVISLKFKSMQGDGVLFHGEGQRGDHITLELQKGRLALHLNLGDSKARLSSSLPSATLGSLLDDQHWHSVLIERVGKQVNFTVDKHTQHFRTKGETDALDIDYELSFGGIPVPGKPGTFLKKNFHGCIENLYYNGVNIIDLAKRRKHQIYTGNVTFSCSEPQIVPITFVNSSGSYLLLPGTPQIDGLSVSFQFRTWNKDGLLLSTELSEGSGTLLLSLEGGILRLVIQKMTERVAEILTGSNLNDGLWHSVSINARRNRITLTLDDEAAPPAPDSTWVQIYSGNSYYFGGCPDNLTDSQCLNPIKAFQGCMRLIFIDNQPKDLISVQQGSLGNFSDLHIDLCSIKDRCLPNYCEHGGSCSQSWTTFYCNCSDTSYTGATCHNSIYEQSCEVYRHQGNTAGFFYIDSDGSGPLGPLQVYCNITEDKIWTSVQHNNTELTRVRGANPEKPYAMALDYGGSMEQLEAVIDGSEHCEQEVAYHCRRSRLLNTPDGTPFTWWIGRSNERHPYWGGSPPGVQQCECGLDESCLDIQHFCNCDADKDEWTNDTGFLSFKDHLPVTQIVITDTDRSNSEAAWRIGPLRCYGDRRFWNAVSFYTEASYLHFPTFHAEFSADISFFFKTTALSGVFLENLGIKDFIRLEISSPSEITFAIDVGNGPVELVVQSPSLLNDNQWHYVRAERNLKETSLQVDNLPRSTRETSEEGHFRLQLNSQLFVGGTSSRQKGFLGCIRSLHLNGQKMDLEERAKVTSGVRPGCPGHCSSYGSICHNGGKCVEKHNGYLCDCTNSPYEGPFCKKEVSAVFEAGTSVTYMFQEPYPVTKNISLSSSAIYTDSAPSKENIALSFVTTQAPSLLLFINSSSQDFVVVLLCKNGSLQVRYHLNKEETHVFTIDADNFANRRMHHLKINREGRELTIQMDQQLRLSYNFSPEVEFRVIRSLTLGKVTENLGLDSEVAKANAMGFAGCMSSVQYNHIAPLKAALRHATVAPVTVHGTLTESSCGFMVDSDVNAVTTVHSSSDPFGKTDEREPLTNAVRSDSAVIGGVIAVVIFIIFCIIGIMTRFLYQHKQSHRTSQMKEKEYPENLDSSFRNEIDLQNTVSECKREYFI

SEQ ID NO: 171 - DNA, 16557 bp, Homo sapiens
aaagacagaaccccagagaaaaacgctgccaattcgttgctttattgttccctgcctggggacctcaatagccttttccattaaccttcccttcttacgcaacggttaatgactttgggggttgttttgctttctgtttctgctgagtcactaaattttgcctctttgtccccaggtgctgctcagcataaaagttaaaagtgcaattcaggaagtactgggattctgtgtagagccgaggaaaccatttccctaagagaagctctgttccttggcttgtccttccttcccgggaaggaagcttccgaggaacgaagggagaagctttgttttgcctgcagaagcagccctgtgctcggctgagggttctcagctggctgtgaactgcggagcattgtaggcgcctggctggctcaggccaatgcagaagtctctcccttctccaaagacccaaatccccacagaaccagcttcgagttactttcccttcaaggggattaaaataattgtgatttgtggcgctctccgttcgcggtggtattttcctgttgtgttaaatgcctcttattaagtaatagatgtgatttatgtgaacgacgaaggggtgtgtggtggattcggtgattaatcagtgaattcccatccgctggcatctctcactgcccctcttgcgtgatgtaagatcagacgtaccctgcattgaaaagtcaagacacacgggcgtctcgctcgcgctcacacacgctctgcctcctctctcccgcacgcgcgcatccctccaccttccacatcctgctccaggcaggagaaggctgactggctggactcattgagctgaagaatttccagtgacatttgtaaatgacgccgctcgattccaggctccaagcggcccctgccgccgccgccgccgccgggccgaaggtgccgccgagcagtctccagcgcaggcttccttaccgggcgaccacaatgtccgagtttctcctcgccttactcactctctcgggattattgccgattgccagggtgctgaccgtgggagccgaccgagatcagcagttgtgtgatcctggtgaatttctttgccacgatcacgtgacttgtgtctcccagagctggctgtgtgatggggaccctgactgccctgatgattcagacgagtctttagatacctgtcccgaggaggtagaaatcaagtgccccttgaatcacattgcttgccttggtaccaacaaatgtgttcatttatcccagctgtgcaatggtgtcttggactgcccagatgggtatgacgaaggagtacattgtcaggaactgttatccaattgccaacagctgaattgtcagtataaatgtacaatggtcagaaatagtacaagatgttactgtgaggatggattcgaaataacagaagatgggagaagctgtaaagatcaagatgaatgtgctgtttatggtacatgcagccagacctgcagaaacacacatggatcctacacttgcagttgtgtggaaggctacctaatgcagccagacaacagatcttgcaaggctaaaattgaacctacagatagaccacctatactattaattgcaaattttgaaacaattgaggttttctatcttaatggaagtaaaatggcaactctaagctcagtcaatggaaatgaaattcatactctggattttatttataatgaagatatgatttgttggattgaatcaagagaatcttcaaatcaactcaaatgtatccagataacaaaagcaggaggattaacagatgaatggacaatcaatattcttcaatccttccacaatgtgcaacaaatggcgattgactggctcactcgaaatctctattttgtggaccatgtcggtgaccggatctttgtttgtaattccaacggttctgtatgtgtcaccctgattgatctggagcttcacaatcctaaagcaatagcagtagatccaatagcaggaaaacttttctttactgactacgggaatgtcgccaaagtggagagatgtgacatggatgggatgaaccgaacaaggataattgattcaaagacagagcagccagctgcactggcactagacctagtcaacaaattggtttactgggtagatctttacttggactatgtgggagtagtggactatcaaggaaaaaatagacacactgtcattcaaggcagacaagttagacatctttatggtataactgtgtttgaagattatttgtatgcaaccaattctgataactacaatatcgtaaggataaaccgatttaatgggactgatattcactcattaattaaaattgagaatgcttggggaatccgaatttatcaaaaaagaactcaaccaacagtcagaagccatgcatgtgaagtcgatccatatggaatgccagggggctgttcacacatctgtctactcagcagcagttacaaaactcggacttgtcgctgcaggactggcttcaacttgggaagtgatggcaggtcatgcaaaagaccaaagaatgagttgttcctcttttatgggaaaggacgcccaggaattgttagaggaatggacttgaataccaagatagctgatgaatacatgatccccatagaaaatctggtaaaccctcgtgctttagactttcacgcagaaaccaattacatctactttgctgacaccaccagtttcctaattggccggcagaagatagatggcacagagagagaaaccatcctgaaagatgatctggataatgtagagggcattgctgtggactggattggaaataatctttactggaccaatgatggccataggaaaaccattaatgtggccaggctggaaaaagcttctcagagtcggaagactcttttagagggtgaaatgtctcatcccagaggaattgtggtggatccagttaatggttggatgtattggacagactgggaggaagatgaaatagatgacagcgtgggaaggattgagaaggcctggatggatggattcaatcggcagatttttgtgacttcaaagatgctgtggccaaacggtttaactctggactttcacaccaacacattatactggtgtgatgcctattacgatcatattgaaaaagtatttttgaatgggactcacaggaagattgtttacagtgggagagagttgaaccaccctttcggactgtcgcatcatggaaattatgtgttctggactgattatatgaatggttccatttttcaactagatttgataacaagtgaggtgacattgctgaggcatgaaagaccacccctatttgggcttcagatttatgatccacgaaagcaacaaggtgacaatatgtgccgagtaaataatgggggctgtagtacactttgcttggctatcccaggaggccgggtgtgtgcttgtgccgataatcaacttttggatgaaaatgggacaacttgcacatttaatcctggagaagcactacctcacatatgtaaagctggagagtttcgctgcaaaaacagacactgtatccaagctcggtggaaatgtgatggcgacgatgactgcctagacggaagcgatgaggattcagtaaactgcttcaatcatagctgtcctgatgatcagtttaaatgccagaataatcgctgcatccccaagagatggctttgtgatggagctaatgactgtgggagcaatgaagatgaatccaatcaaacttgcacagccagaacatgccaggtagaccagttttcttgcggaaatgggcgttgcattcccagagcatggctgtgtgacagggaagacgactgtggtgaccagacagatgaaatggcatcttgtgaattcccaacttgtgagccactaacccaattcgtatgcaaaagtggaagatgcattagcagcaaatggcactgcgactctgatgacgactgtggggacgggagtgatgaggtgggctgtgttcactcttgctttgataatcagttcagatgttccagtggcagatgcatcccaggccactgggcctgtgatggtgacaatgactgtggggacttcagtgatgaagcccagatcaattgtactaaagaagagattcattctcctgctggttgtaacggaaatgaatttcagtgccaccctgatggtaattgcgttcctgatttgtggcgctgtgatggagaaaaagactgtgaagatggtagtgatgaaaaaggttgcaatggtaccatacgattgtgtgaccacaaaaccaagttttcctgttggagtacagggagatgcatcaacaaagcatgggtgtgtgatggagatattgattgcgaagatcagtcagatgaagatgactgtgacagtttcttgtgtggaccacccaagcatccttgtgctaatgacacctcagtctgcctgcagccagagaaactctgcaatgggaaaaaggattgtcctgatggctctgatgaaggctatctctgtgatgagtgttcgctgaacaatggaggctgtagcaaccactgttctgttgttcctggaagaggaattgtctgttcctgccctgaaggacttcaactcaacaaagacaataaaacatgtgaaattgtggattattgtagcaatcatctaaagtgcagccaagtatgtgagcagcacaagcacacagtcaagtgctcatgttatgaaggttggaagctggatgtagacggtgaaagttgtacaagtgttgatccttttgaagcattcatcatcttttctattcgtcatgagatcagaaggattgatcttcacaaaagagactatagtctacttgttcctggattgagaaacacaatagcacttgattttcacttcaatcaaagtttactttattggacagatgttgtagaagacagaatataccggggaaagctttctgaaagtggaggtgtcagtgccattgaagtggttgtggagcatggcctggctactccagaaggcctgacagtcgactggatagcaggaaacatatactggatagacagcaatctggaccaaatcgaagtggccaaactagatggctccctaagaactacactaatagcaggagccatggaacaccccagggccattgctttggacccaagatatggaattcttttctggacagactgggatgcaaattttcctcgcattgaatctgcctctatgagtggtgctgggagaaaaaccatctataaagacatgaaaactggggcttggcctaatggactaactgtggaccactttgagaaaaggatagtgtggacagacgccaggtcagatgctatttattcagccctctatgatggaacaaacatgatagaaatcatccgaggtcatgaatacctttcccatccctttgctgtgtctctatatgggagtgaagtctactggacagactggaggaccaacacattgtccaaagccaataagtggacagggcagaatgtcagtgtgattcagaaaaccagtgcacagccatttgaccttcagatataccatcccagtcgccagccacaggctcccaatccttgtgcagctaatgatggcaaaggcccctgctctcacatgtgtctaatcaatcacaataggagtgctgcctgtgcgtgcccccacttgatgaagctttcttcagacaagaagacctgctatgaaatgaaaaaatttcttctttatgcaagacgttctgaaatcagaggagtggatattgacaatccatactttaacttcatcacggcatttacagtccctgatattgatgacgttactgtgatagacttcgatgcatctgaggaacgtttatactggacagatattaaaacacaaaccattaaacgagcttttattaacggaactgggttagaaactgttatttcaagagatattcagagtatcagagggctagcagtggattgggtgtcacgtaatttatactggattagctcagaatttgatgaaacgcaaattaatgtggcaaggctagatggctctttgaaaacctcaattatccatggaatcgataagccacagtgtcttgcagctcacccagtcaggggaaaactctactggaccgatggaaacacaattaacatggcaaatatggatggcagtaatagcaagattctgtttcagaatcagaaggagccagttggtctatcgatagactatgtggaaaacaagctttattggatcagttcagggaatggaaccataaatagatgcaacctggatggtggtaatttagaagtaatcgagtcaatgaaagaagaattaacaaaagctacagccctaaccatcatggataagaaactgtggtgggcagaccaaaacttagcccagctaggaacctgcagcaaaagagacggaagaaaccccaccatcctacggaataagacttctggggtagttcatatgaaagtctatgataaagaagcacagcaaggcagcaattcctgccaactaaacaatggtggatgctctcaactttgtttaccaacatctgaaactacaaggacttgtatgtgtacagtgggatattatctccaaaagaaccgtatgtcatgtcaaggtatagaatcatttcttatgtactctgttcatgaaggaatcaggggaatacctcttgaaccaagtgacaaaatggatgctttgatgcctatatcaggaacttcatttgccgtgggaatagatttccatgcagaaaatgataccatctactggacagacatgggcttcaataaaattagcagagctaaaagagatcagacttggaaagaagatatcattaccaatggcttgggaagagtggaagggatagctgttgactggattgctggtaacatatattggacagatcatggtttcaacttaattgaagttgcaagactcaatggttctttccgttatgtaattatttcccaaggcctggatcaaccaagatctatagctgtgcacccagagaaaggcctcttgttctggactgaatggggacaaatgccctgtattggaaaggctcgcttggatggctcagagaaggttgtccttgtaagcatgggaatagcatggccgaatggcatctccatcgactatgaggaaaataaattgtactggtgtgatgctcgcacagacaagatagagagaatcgaccttgagactggagggaatcgcgagatggtgctgtcaggaagcaatgtggatatgttttcagttgcagtctttggggcttacatctactggtctgacagagcacatgcaaacgggtctgtcagaaggggccacaagaatgatgccacagaaacgataaccatgagaaccggccttggagtcaacctgaaggaggttaaaatatttaaccgagtaagagagaaagggaccaatgtttgtgccagggacaatggtggctgtaagcaactctgtctttatcgaggaaattcccggagaacttgtgcttgtgcccatggatatttggcagaagatggagttacttgcctgaggcatgaaggctatttactgtattcaggaagaacaatattaaaaagtatacatctttctgatgaaaccaatttaaattccccaataaggccatatgagaatccacgttatttcaagaatgtcatagccttggcttttgactataatcaaagaagaaaaggtaccaaccgaatcttttacagtgatgcacactttggaaatatacagcttattaaagacaactgggaagacagacaagtaattgttgaaaatgtgggttctgtggaaggacttgcctatcacagagcctgggatacactgtactggacaagctctaccacctcatccatcaccagacacactgtggaccagactcggcctggagcatttgacagggaagctgtcatcaccatgtcagaagatgaccatccacatgtgctagccttggatgaatgtcaaaatttaatgttttggaccaactggaatgaacaacatccaagtatcatgagatctactctgactgggaaaaatgctcaagtggtggtcagtacagacatactcactccaaatggacttactatcgactaccgtgcagagaagctgtatttctcagatggcagtctaggaaaaattgaaaggtgtgaatacgatggatcccagagacatgtgatagttaaatctgggccagggactttcctcagtttggctgtttatgacaattatatattctggtcggactggggaagaagagctatactgcggtccaacaagtacacaggaggagatacaaaaattcttcgttccgatattccacatcagccaatgggaatcatagctgttgccaatgacaccaatagctgtgaactttctccatgtgcattattgaatggaggctgccatgacttgtgccttttaactcccaatgggagagtgaattgttcctgcagaggggaccgaatattgctagaggacaacagatgtgtgactaaaaattcctcctgcaacgcttattcggagtttgaatgtggaaatggtgagtgcattgactaccagctcacctgtgatggcattcctcactgtaaagataaatcagatgaaaaactgctctactgtgaaaacagaagctgtcgaagaggcttcaagccatgctataatcgccgctgcattcctcatggcaagttatgtgatggagaaaatgactgcggagacaactctgatgaattagattgtaaagtttcaacctgtgccacggttgagttccgctgtgcagatgggacttgtattccaagatcagcacgatgcaaccagaacatagattgtgcagatgcttcagatgaaaagaactgcaataacacagactgcacacatttctataagcttggagtgaaaaccacagggttcataagatgtaattctacctcactgtgtgttctgccaacctggatatgcgacgggtctaatgactgtggagactattcagatgaattaaagtgcccagttcaaaacaaacacaaatgtgaagaaaattattttagttgtcctagtggaagatgcattttgaatacctggatatgcgatggtcagaaagattgtgaggatggacgtgatgaattccactgtgattcttcttgctcttggaaccaatttgcttgttccgcacaaaaatgtatttctaagcattggatttgtgatggagaagatgactgtggggatgggttagatgaaagtgacagcatttgtggtgccataacctgtgctgctgacatgttcagctgccagggctctcgtgcctgcgtgccccgacattggctttgtgatggtgaaagggactgtccagatggaagcgatgagctttccacagcaggctgcgctcccaataatacatgtgatgaaaatgctttcatgtgccataataaagtatgcattcccaagcaatttgtttgtgaccatgatgacgactgtggagatggctctgatgagtcaccgcagtgtggatatcgacagtgtggtacagaagaatttagttgtgctgatgggcggtgtcttctaaatactcaatggcagtgtgatggagactttgactgtcctgaccattctgatgaagcacctttaaacccaaagtgtaaaagtgcagaacagtcatgcaacagttcattttttatgtgcaaaaatggcaggtgcattcccagtggaggtctttgcgacaataaggatgactgtggcgatggttcagatgagagaaactgccatataaatgaatgtttgagtaagaaagtcagtggatgttctcaagactgtcaagaccttccggtcagttataagtgcaaatgctggcctggattccaactgaaggatgacggcaaaacatgtgtagacattgatgaatgctcttcaggctttccctgtagccagcaatgcatcaatacatacgggacttacaagtgcctctgtacagatgggtatgaaatacaacctgataacccaaatggctgcaaatcgctctcagatgaagaaccttttttaattcttgctgatcatcatgagataaggaaaattagcactgatggctccaactacacacttttaaaacagggattaaacaatgttattgctatagactttgattacagagaagaattcatctattggatcgattctagccgacccaatggcagtcgcataaatagaatgtgtttaaatggaagtgacattaaggtagttcataacacagcggtccccaatgcacttgctgtcgattggattggaaaaaacctctattggtctgacacagaaaaaagaatcattgaagtatccaaactcaatggcttgtaccctactatactcgttagcaaaaggctgaagtttcccagagacttgtctttagatcctcaagctggatatttgtattggattgactgctgcgagtatcctcatattggccgtgttggaatggatggaaccaatcagagtgttgtcatagaaaccaagatttctagacctatggcactaacaatagattatgttaatcgtagactctactgggccgatgaaaatcacattgaatttagcaacatggatggatctcatagacacaaagtccctaatcaagatattccaggggtgattgcactaacattgtttgaagactacatctactggactgatgggaaaaccaagtcactcagccgtgcccataaaacatcgggagcagacagactctcactgatttactcatggcatgccatcacagatatccaggtgtatcattcttatagacaacctgatgtctccaaacatctctgcatgataaataatggtggttgcagtcatttgtgccttttagcccctggaaaaacccacacttgtgcatgtcccactaacttctatctggcagctgataataggacttgcttatccaactgcacagccagccagtttcgttgcaaaactgacaaatgtattccattctggtggaaatgtgacaccgtggatgactgtggtgatggatctgatgaacctgatgactgtcctgaatttagatgtcagccaggccgatttcagtgtgggactggactctgtgctctaccagctttcatctgtgatggagagaatgattgtggagacaattctgatgaactcaactgtgacacacatgtctgcctgtcaggtcaattcaaatgtaccaagaaccagaaatgtatcccagtaaacttaagatgtaatgggcaagatgactgtggtgatgaggaagatgaaagagactgtcctgaaaacagctgttctccagactatttccagtgtaagactacgaagcattgcatttccaagctgtgggtttgtgacgaggatccagactgtgcagatgcatcagacgaggccaactgcgataaaaagacttgtggacctcatgaattccagtgtaaaaacaacaactgtattcccgatcactggcggtgtgatagccaaaatgactgcagtgataattcagatgaagaaaactgtaagccacagacatgtacattgaaagatttcctctgtgccaatggggactgtgtttcttcaaggttttggtgtgatggagattttgactgtgcagatggctctgatgagagaaattgtgagacaagttgttccaaagatcagttccggtgttccaatggtcagtgtataccagcaaaatggaaatgtgatggccatgaagactgcaaatatggggaagatgagaaaagctgtgagccagcttctcctacttgctcatcacgtgaatatatatgtgccagtgatggatgtatttcagcatctttgaaatgtaatggagaatatgattgtgctgatggttcagatgagatggactgtgtgactgaatgtaaggaagatcagtttcggtgcaaaaataaagcccactgtattccaattagatggctgtgtgatggaattcatgactgtgtggatggcagtgatgaagagaactgtgaaagaggaggaaatatatgtagagctgatgagttcctttgcaataattctctctgcaaactacatttctgggtgtgtgatggagaggacgactgtggagacaactctgatgaagcccctgatatgtgtgtcaaatttctttgtccatccacgagacctcacagatgcagaaataacagaatatgcctacagtcggagcaaatgtgcaatgggattgatgaatgcggtgacaattcagatgaagatcactgtggtggtaagctgacatataaagcaaggccttgtaaaaaggatgagtttgcttgtagtaataaaaaatgcatccctatggatctccagtgtgatcgacttgatgactgcggagatggttcagatgagcaaggatgcagaatagctcctactgaatatacctgtgaagataatgtgaatccatgtggagatgatgcatattgtaatcaaataaaaacatctgttttctgtcgctgtaagcctggatttcagagaaacatgaaaaacagacaatgtgaagaccttaatgaatgtttggtgtttggcacatgttcccatcaatgtataaatgtggaaggatcatataaatgtgtgtgtgaccagaattttcaagaaagaaataacacctgcatagcagaaggctctgaagatcaagttctctacattgctaatgacactgatatcctgggttttatatatccattcaactacagtggcgatcatcaacaaatttctcatattgaacataattcaagaataacagggatggatgtatattatcaaagagatatgattatttggagtactcagtttaatccaggcggaattttctacaaaaggatccatggcagagaaaaaaggcaagcaaacagtggcttgatttgtcctgaatttaaaaggcccagggacattgcagttgactgggtggctggaaacatttactggactgatcattctagaatgcattggttcagttactacactactcactggaccagtctgaggtactctatcaacgtagggcagctgaatggccccaactgcaccagactcttaacaaatatggctggagaaccctatgctattgcagtaaatcctaaaagagggatgatgtactggactgttgttggggatcattcccatatagaagaagcagccatggatggtacactgagaaggattttagtacaaaagaacttacagagacccacaggtttggctgtggattattttagtgaacgcatatattgggctgactttgagctctccatcattggcagtgttctgtatgatggctctaattcagtagtctctgtcagcagcaaacaaggtttattacatccacataggatcgatatctttgaagattatatatatggagcaggacctaaaaatggtgtatttcgagttcaaaaatttggccatggttcagtagagtacttagctttaaatattgataaaacaaaaggtgttttgatatctcatcgttataaacaactagatttacccaatccatgcttggatttagcatgcgaatttctttgcttgctaaatccttctggggccacttgtgtgtgtccagaaggaaaatatttgattaatggcacctgcaatgatgacagcctgttagatgattcatgtaagttaacttgtgaaaatggaggaagatgcattttaaatgagaaaggtgatttgaggtgtcactgttggcccagttattcaggagaaagatgtgaagtcaaccactgtagcaactactgccagaatggaggaacttgcgtaccatcagttctagggagacccacctgcagctgtgcactgggtttcactgggccaaactgtggtaagacagtctgtgaggatttttgtcaaaatggaggaacctgcattgtgactgctggaaaccagccttactgccactgccagccggaatacaccggagacagatgtcagtactacgtgtgccaccactattgtgtgaattctgaatcatgtaccattggggatgatggaagtgttgaatgtgtctgtccaacgcgctatgaaggaccaaaatgtgaggttgacaagtgtgtaaggtgccatggggggcactgcattataaataaagacagtgaagatatattttgcaactgcactaatggaaagattgcctctagctgtcagttatgtgatggctactgttacaatggtggcacatgccagctggaccccgagacaaatgtacctgtgtgtctatgctccaccaactggtcaggcacacagtgtgaaaggccagccccaaagagcagcaagtctgatcatatcagcacaagaagcattgccatcattgtgcctctcgtcctcttggtgactttgataaccaccttagtaattggtttagtgctttgtaaaagaaaaagaaggacaaaaacaattagaagacaacctattatcaatggaggaataaatgtagaaattggcaatccatcttataacatgtatgaggtagatcatgatcacaacgatggaggtcttttagatcctggctttatgatagacccaacaaaggccaggtacatagggggaggacccagtgctttcaagcttccacacacagcgccgcccatctacctaaactctgatttgaaaggaccactaactgctgggccaacaaattactccaatccggtatatgcaaaattatatatggatgggcaaaactgtcgaaactccttaggaagtgttgatgaaaggaaagaactgcttccaaagaaaatagaaattggtataagagagacagtggcataatcagtgatatcttttatatgctgtataaatgtataaaatataaggattacttttgtatgttccaacagtattatacttgttttggcatcagcattacctctttctttatctttttcctggttaattgttttctgagttttttgggttttattttttgctgatgactattgattgaccatttgtatggtatttttatgaaaaagaactgcactacagtacaatttacaacaatgctgctgatatgacacacctttgaatttgttaaaattaaaaacaacgtattcctttgtagtgtgaatatgagcaatctattttatatgaacttttttggttgtacttaatcaacgaggagaatctctgcacttttccattatacggtttgaaggctgtaatacagtgtcatattatttttctgtttaaattgatggaaaaatgattgaatggtcaactctcttctttgtgcccataaagatcgattcagactctgctgaaaatatatagctctcacaagttcagcatcacctgctttgaaattagccttagattgccaaccaatagatgagaattttgaggaaaaaaattaaaaatatgtaaaattaataatttgcatgaacacagatgactacattttccaaaacttagtggactctatgtgatgtactaaatgtatacaccttgtaagcaatagttatatttaggtggtagaacatagcaaaaatataaccgaaagttggccgactgcacttgctatggaataagaccttttattctccctcagtctcgagataaatagccagcctagagcacaacagggcattgggtacttgcatcttaggtatttcttcccagtcacatccattttgtggaagattaacccaaccccttacactacactgaacactaaagaataatatataagcacacaaattggtgacagaatttcaattacgtgaacgcatcctctttgctaggtcaaaaaacaaagggcaaagcagacattttagtatacagagtgattggcaaatattttcaagatttaatatgagcaacccattatttgccctatccaaaatatattcaagggccttccaagttgtagaagaacaatgatcttcccataatcaaaagtggagagtcgaaatgctgtgccagttgctctggtattcaggtttctctgggttttacagaacgcatggaccccattcacgtttggtttgtttatcttcaaatttgagttgaaacgagtgcgatttatttaagttgtatataaaaataaaaggatagcatttttatacaaatatctttaaaggcacaaaagatttattcacaagttttggagggctttttgttcctctgatagacatgactgacttttagctgtcataatgtattaacctaacagatgaaatatgttaaatatgtggttgctctttatccctttgtacaagcattaaaaaaactgctgttttataagaagactttttgttgtactatgtgcatgcatactacctatttctaaactttgccatattgaggcctttataaactattgatttatgtaatactagtgcaattttgcttgaacaatgttatgcatatcataaactttttcaggttcttgtttaagtacattttttaaattgaacagtatttttcattttggttataatatagtcattttgcctatgtttctacaatgaagtgttaaatactttataaaaaattgttgactgacttatttaaatgaaattctacatataaaaaaaaaaaaaaaaaaaaaaaaaa

SEQ ID NO: 172 - protein, 4599 aa, Homo sapiens
MSEFLLALLTLSGLLPIARVLTVGADRDQQLCDPGEFLCHDHVTCVSQSWLCDGDPDCPDDSDESLDTCPEEVEIKCPLNHIACLGTNKCVHLSQLCNGVLDCPDGYDEGVHCQELLSNCQQLNCQYKCTMVRNSTRCYCEDGFEITEDGRSCKDQDECAVYGTCSQTCRNTHGSYTCSCVEGYLMQPDNRSCKAKIEPTDRPPILLIANFETIEVFYLNGSKMATLSSVNGNEIHTLDFIYNEDMICWIESRESSNQLKCIQITKAGGLTDEWTINILQSFHNVQQMAIDWLTRNLYFVDHVGDRIFVCNSNGSVCVTLIDLELHNPKAIAVDPIAGKLFFTDYGNVAKVERCDMDGMNRTRIIDSKTEQPAALALDLVNKLVYWVDLYLDYVGVVDYQGKNRHTVIQGRQVRHLYGITVFEDYLYATNSDNYNIVRINRFNGTDIHSLIKIENAWGIRIYQKRTQPTVRSHACEVDPYGMPGGCSHICLLSSSYKTRTCRCRTGFNLGSDGRSCKRPKNELFLFYGKGRPGIVRGMDLNTKIADEYMIPIENLVNPRALDFHAETNYIYFADTTSFLIGRQKIDGTERETILKDDLDNVEGIAVDWIGNNLYWTNDGHRKTINVARLEKASQSRKTLLEGEMSHPRGIVVDPVNGWMYWTDWEEDEIDDSVGRIEKAWMDGFNRQIFVTSKMLWPNGLTLDFHTNTLYWCDAYYDHIEKVFLNGTHRKIVYSGRELNHPFGLSHHGNYVFWTDYMNGSIFQLDLITSEVTLLRHERPPLFGLQIYDPRKQQGDNMCRVNNGGCSTLCLAIPGGRVCACADNQLLDENGTTCTFNPGEALPHICKAGEFRCKNRHCIQARWKCDGDDDCLDGSDEDSVNCFNHSCPDDQFKCQNNRCIPKRWLCDGANDCGSNEDESNQTCTARTCQVDQFSCGNGRCIPRAWLCDREDDCGDQTDEMASCEFPTCEPLTQFVCKSGRCISSKWHCDSDDDCGDGSDEVGCVHSCFDNQFRCSSGRCIPGHWACDGDNDCGDFSDEAQINCTKEEIHSPAGCNGNEFQCHPDGNCVPDLWRCDGEKDCEDGSDEKGCNGTIRLCDHKTKFSCWSTGRCINKAWVCDGDIDCEDQSDEDDCDSFLCGPPKHPCANDTSVCLQPEKLCNGKKDCPDGSDEGYLCDECSLNNGGCSNHCSVVPGRGIVCSCPEGLQLNKDNKTCEIVDYCSNHLKCSQVCEQHKHTVKCSCYEGWKLDVDGESCTSVDPFEAFIIFSIRHEIRRIDLHKRDYSLLVPGLRNTIALDFHFNQSLLYWTDVVEDRIYRGKLSESGGVSAIEVVVEHGLATPEGLTVDWIAGNIYWIDSNLDQIEVAKLDGSLRTTLIAGAMEHPRAIALDPRYGILFWTDWDANFPRIESASMSGAGRKTIYKDMKTGAWPNGLTVDHFEKRIVWTDARSDAIYSALYDGTNMIEIIRGHEYLSHPFAVSLYGSEVYWTDWRTNTLSKANKWTGQNVSVIQKTSAQPFDLQIYHPSRQPQAPNPCAANDGKGPCSHMCLINHNRSAACACPHLMKLSSDKKTCYEMKKFLLYARRSEIRGVDIDNPYFNFITAFTVPDIDDVTVIDFDASEERLYWTDIKTQTIKRAFINGTGLETVISRDIQSIRGLAVDWVSRNLYWISSEFDETQINVARLDGSLKTSIIHGIDKPQCLAAHPVRGKLYWTDGNTINMANMDGSNSKILFQNQKEPVGLSIDYVENKLYWISSGNGTINRCNLDGGNLEVIESMKEELTKATALTIMDKKLWWADQNLAQLGTCSKRDGRNPTILRNKTSGVVHMKVYDKEAQQGSNSCQLNNGGCSQLCLPTSETTRTCMCTVGYYLQKNRMSCQGIESFLMYSVHEGIRGIPLEPSDKMDALMPISGTSFAVGIDFHAENDTIYWTDMGFNKISRAKRDQTWKEDIITNGLGRVEGIAVDWIAGNIYWTDHGFNLIEVARLNGSFRYVIISQGLDQPRSIAVHPEKGLLFWTEWGQMPCIGKARLDGSEKVVLVSMGIAWPNGISIDYEENKLYWCDARTDKIERIDLETGGNREMVLSGSNVDMFSVAVFGAYIYWSDRAHANGSVRRGHKNDATETITMRTGLGVNLKEVKIFNRVREKGTNVCARDNGGCKQLCLYRGNSRRTCACAHGYLAEDGVTCLRHEGYLLYSGRTILKSIHLSDETNLNSPIRPYENPRYFKNVIALAFDYNQRRKGTNRIFYSDAHFGNIQLIKDNWEDRQVIVENVGSVEGLAYHRAWDTLYWTSSTTSSITRHTVDQTRPGAFDREAVITMSEDDHPHVLALDECQNLMFWTNWNEQHPSIMRSTLTGKNAQVVVSTDILTPNGLTIDYRAEKLYFSDGSLGKIERCEYDGSQRHVIVKSGPGTFLSLAVYDNYIFWSDWGRRAILRSNKYTGGDTKILRSDIPHQPMGIIAVANDTNSCELSPCALLNGGCHDLCLLTPNGRVNCSCRGDRILLEDNRCVTKNSSCNAYSEFECGNGECIDYQLTCDGIPHCKDKSDEKLLYCENRSCRRGFKPCYNRRCIPHGKLCDGENDCGDNSDELDCKVSTCATVEFRCADGTCIPRSARCNQNIDCADASDEKNCNNTDCTHFYKLGVKTTGFIRCNSTSLCVLPTWICDGSNDCGDYSDELKCPVQNKHKCEENYFSCPSGRCILNTWICDGQKDCEDGRDEFHCDSSCSWNQFACSAQKCISKHWICDGEDDCGDGLDESDSICGAITCAADMFSCQGSRACVPRHWLCDGERDCPDGSDELSTAGCAPNNTCDENAFMCHNKVCIPKQFVCDHDDDCGDGSDESPQCGYRQCGTEEFSCADGRCLLNTQWQCDGDFDCPDHSDEAPLNPKCKSAEQSCNSSFFMCKNGRCIPSGGLCDNKDDCGDGSDERNCHINECLSKKVSGCSQDCQDLPVSYKCKCWPGFQLKDDGKTCVDIDECSSGFPCSQQCINTYGTYKCLCTDGYEIQPDNPNGCKSLSDEEPFLILADHHEIRKISTDGSNYTLLKQGLNNVIAIDFDYREEFIYWIDSSRPNGSRINRMCLNGSDIKVVHNTAVPNALAVDWIGKNLYWSDTEKRIIEVSKLNGLYPTILVSKRLKFPRDLSLDPQAGYLYWIDCCEYPHIGRVGMDGTNQSVVIETKISRPMALTIDYVNRRLYWADENHIEFSNMDGSHRHKVPNQDIPGVIALTLFEDYIYWTDGKTKSLSRAHKTSGADRLSLIYSWHAITDIQVYHSYRQPDVSKHLCMINNGGCSHLCLLAPGKTHTCACPTNFYLAADNRTCLSNCTASQFRCKTDKCIPFWWKCDTVDDCGDGSDEPDDCPEFRCQPGRFQCGTGLCALPAFICDGENDCGDNSDELNCDTHVCLSGQFKCTKNQKCIPVNLRCNGQDDCGDEEDERDCPENSCSPDYFQCKTTKHCISKLWVCDEDPDCADASDEANCDKKTCGPHEFQCKNNNCIPDHWRCDSQNDCSDNSDEENCKPQTCTLKDFLCANGDCVSSRFWCDGDFDCADGSDERNCETSCSKDQFRCSNGQCIPAKWKCDGHEDCKYGEDEKSCEPASPTCSSREYICASDGCISASLKCNGEYDCADGSDEMDCVTECKEDQFRCKNKAHCIPIRWLCDGIHDCVDGSDEENCERGGNICRADEFLCNNSLCKLHFWVCDGEDDCGDNSDEAPDMCVKFLCPSTRPHRCRNNRICLQSEQMCNGIDECGDNSDEDHCGGKLTYKARPCKKDEFACSNKKCIPMDLQCDRLDDCGDGSDEQGCRIAPTEYTCEDNVNPCGDDAYCNQIKTSVFCRCKPGFQRNMKNRQCEDLNECLVFGTCSHQCINVEGSYKCVCDQNFQERNNTCIAEGSEDQVLYIANDTDILGFIYPFNYSGDHQQISHIEHNSRITGMDVYYQRDMIIWSTQFNPGGIFYKRIHGREKRQANSGLICPEFKRPRDIAVDWVAGNIYWTDHSRMHWFSYYTTHWTSLRYSINVGQLNGPNCTRLLTNMAGEPYAIAVNPKRGMMYWTVVGDHSHIEEAAMDGTLRRILVQKNLQRPTGLAVDYFSERIYWADFELSIIGSVLYDGSNSVVSVSSKQGLLHPHRIDIFEDYIYGAGPKNGVFRVQKFGHGSVEYLALNIDKTKGVLISHRYKQLDLPNPCLDLACEFLCLLNPSGATCVCPEGKYLINGTCNDDSLLDDSCKLTCENGGRCILNEKGDLRCHCWPSYSGERCEVNHCSNYCQNGGTCVPSVLGRPTCSCALGFTGPNCGKTVCEDFCQNGGTCIVTAGNQPYCHCQPEYTGDRCQYYVCHHYCVNSESCTIGDDGSVECVCPTRYEGPKCEVDKCVRCHGGHCIINKDSEDIFCNCTNGKIASSCQLCDGYCYNGGTCQLDPETNVPVCLCSTNWSGTQCERPAPKSSKSDHISTRSIAIIVPLVLLVTLITTLVIGLVLCKRKRRTKTIRRQPIINGGINVEIGNPSYNMYEVDHDHNDGGLLDPGFMIDPTKARYIGGGPSAFKLPHTAPPIYLNSDLKGPLTAGPTNYSNPVYAKLYMDGQNCRNSLGSVDERKELLPKKIEIGIRETVA

SEQ ID NO: 173 - DNA, 4535 bp, Homo sapiens
gggtttgaaattccaacatggcagaggctgcagtccgtcttcccttcaaaaacttggaatgatttcaaatcataggcaccttcacttaaccctagcttccattcatcagcaaacacatcggatcgatgctacgctaacctatcgggttctctctccgcgcgttcaggttaaatgaatacctgacgaaagggcccacgtttcaaggcagtgacatttgatagctgagaggaaaagtggctttaatgaaaagcaacctttggaattcctgcttgtgagaaatccaattcagctttttgtgctgccagcaagaaatgatcagtagcaccagtgtttatggcttgaagatgcagtggacgccagagcatgcccagtggccagaacagcactttgacatcacctcaaccactcggtctcctgcccacaaagttgaagcctacagaggtcatctgcagcgcacctatcagtacgcctgggcgaatgatgacatatctgctctgactgcatccaacctactaaaaaaatatgcagagaagtattccggcattttggaaggtcctgtggaccgacccgtactcagcaactattcggacacaccatcaggactagtgaacggtcggaaaaatgaaagtgaaccctggcagccttccttgaattcagaagctgtttatcccatgaactgtgttccggatgttatcactgccagcaaagctggagtcagttcagccctccctccagcagatgtctctgcgagtataggaagctctcctggggtagccagcaacctgacagaacctagttattcaagtagtacctgtggaagccacactgtacccagtcttcatgcagggctcccatctcaggaatatgccccaggatacaacggatcatatttgcattctacttatagtagccagccagcacctgcacttccttcacctcatccgtctcctttgcatagctctgggctactacagcccccaccaccacctcctccgccaccagccttggtcccaggctacaatgggacttctaacctctccagttacagctatccgtctgctagctatcctcctcagactgctgtggggtctgggtacagccctgggggggcaccgcctccgccttcagcgtacctgccttcaggaattcctgctcccacccccctaccccccaccactgttcctggctacacctaccagggccatggtttgacacctattgcaccgtcggctctgacaaacagttcagcaagttctctcaaaaggaaagctttctacatggcagggcaaggagatatggactccagttatggaaattacagctatggccaacagagatctacacagagtcctatgtacagaatgcccgacaacagcatttcaaacacaaatcgggggaatggctttgacagaagtgctgaaacatcatccttagcatttaagccaacgaagcagctaatgtcctctgaacagcaaaggaaattcagcagccagtccagtagggctctgacccctccttcctacagtactgctaaaaattcattgggatcaagatccagtgaatcctttgggaagtacacatcgccagtaatgagtgagcatggggacgagcacaggcagctcctctctcacccaatgcaaggccctggactccgtgcagctacctcatccaaccactctgtggacgagcaactgaagaatactgacacgcacctcatcgacctggtaaccaatgagattatcacccaaggacctccagtggactggaatgacattgctggtctcgacctggtgaaggctgtcattaaagaggaggttttatggccagtgttgaggtcagacgcgttcagtggactgacggccttacctcggagcatccttttatttggacctcgggggacaggcaaaacattattgggcagatgcatcgctagtcagctgggggccacatttttcaaaattgccggttctggactagtcgccaagtggttaggagaagcagagaaaattatccatgcctcttttcttgtggccaggtgtcgccagccctcggtgatttttgttagtgacattgacatgcttctctcctctcaagtgaatgaggaacatagtccagtcagtcggatgagaaccgaatttctgatgcaactggacactgtactaacttcggctgaggaccaaatcgtagtaatttgtgccaccagtaaaccagaagaaatagatgaatcccttcggaggtacttcatgaaacgacttttaatcccacttcctgacagcacagcgaggcaccagataatagtacaactgctctcacagcacaattactgtctcaatgacaaggagtttgcactgctcgtccagcgcacagaaggcttttctggactagatgtggctcatttgtgtcaggaagcagtggtgggccccctccatgccatgccagccacagacctttcagccattatgcccagccagttgaggcccgttacatatcaagactttgaaaatgctttctgcaagattcagcctagcatatctcaaaaggagcttgatatgtatgttgaatggaacaaaatgtttggttgcagtcagtgataacttctttagaaaaaaaaaatgtaatgaatgttggcacacacacataaaacctgctacatagggaatagagcccctttccagtagagtttaaattgcaaagggtactggggaagatgacgattaagttgcatctttagagtcagggtagatttggaggaaaagtgcatcaaatgagagcttctgatttgaaagccccagatgacagaaagcatatgtggatgctcagttctgttcaagctagacaacactcaccaaggagcaaggtgcaagtgtgttgatttcagaaggacatgaacctcgtgtgttgattccattctgctgttctcgagatttagttgctgtcaagtgcctggagtggtgctttattttttgtttgcctcacaattacattggtggcatgtgctaatataaagagctttaacttcaaacattattggactaaagagatgaacagttgtgttatgacagaaaaccagatttttgccattttaagagcaacagtattcctcaatcctgtctgttctgcagtattaagctaagaacaggtaaaacagggtaacggtaatctggaccttaatttctgcagttcatttcttttaatgttcttgtctgcaaaaactcaggaaagtgattgtgatttgtacagtacctcaaaggaatgtgttgaaagcactatgtactgctgagagtaataggataggcttcaatgttactttatattaaaatgtatgtttacctcaacaattggaaaatagcaaggaaaattactttgaatgtatccagaaaaatactgaagtgtgatacaactgaatatttacagtttaaagtagaaatggaaggatttttttaagttcttttactaattatggggaattaaccagagcagaataattctttatgtcaataactgcaagagttcttagtacattgctccttgataattaagtgaaaatgttcttaaaaggtacactggttaattgaaagctacttattcagtttgtgttagtgtctagacctgtcagccacaagacctgtttaggaccctgaaagtcacagtacctaaaaactatgactgcctttttattgcataggtggtagtggtggtgatggtggtggtagtttgcaagttatctcttaaaactgctgggaatggtgtcattctattcactaatctagcttatagacttgccgtgctgtttgatagaatgcagaggatagcaaccaaaacaaatacacaaataaataaaaacaaaaaccaaccaacaaaccaacttacatacacatatatatatccacaaagaacctctccatctcctccccttctttttgactccactcttgtcagtgcaattttgcttctcattttgaaatctgggctgtagtgctcctgctttatttctacctcagttttgttacatttctcttggaaagtaaagtagaaaattggaagtggacacacacactgcaatgtagcttgccaaacatgttactttgttttcttccatctttcaccgtaaatctagtttccaaagacatcagcatttgtgcttacttccacctcagtctaccagccccacccctacccatggcataagtggcatttttcttaatttcctatttttctcctgctctctgtcaagttgttctttgtatcctttaatgctttatgtgcaacctttcattgatagtgggctgatgtttggcaatgcttctgaactgtcacagagcaggctgtagctttccacagccactgcccatgcataagcagaacagcctggccttttgaatgtattttcctgggttttttccccttttctttttttagtttagagatgcagtaacaaaactgttgcaaagcactggcattttatgtattcaataaataagtgatgtacatttttaaaaaaatttaaataaatgcaatgagaagccccaagaaag

SEQ ID NO: 174 - protein, 759 aa, Homo sapiens
MISSTSVYGLKMQWTPEHAQWPEQHFDITSTTRSPAHKVEAYRGHLQRTYQYAWANDDISALTASNLLKKYAEKYSGILEGPVDRPVLSNYSDTPSGLVNGRKNESEPWQPSLNSEAVYPMNCVPDVITASKAGVSSALPPADVSASIGSSPGVASNLTEPSYSSSTCGSHTVPSLHAGLPSQEYAPGYNGSYLHSTYSSQPAPALPSPHPSPLHSSGLLQPPPPPPPPPALVPGYNGTSNLSSYSYPSASYPPQTAVGSGYSPGGAPPPPSAYLPSGIPAPTPLPPTTVPGYTYQGHGLTPIAPSALTNSSASSLKRKAFYMAGQGDMDSSYGNYSYGQQRSTQSPMYRMPDNSISNTNRGNGFDRSAETSSLAFKPTKQLMSSEQQRKFSSQSSRALTPPSYSTAKNSLGSRSSESFGKYTSPVMSEHGDEHRQLLSHPMQGPGLRAATSSNHSVDEQLKNTDTHLIDLVTNEIITQGPPVDWNDIAGLDLVKAVIKEEVLWPVLRSDAFSGLTALPRSILLFGPRGTGKTLLGRCIASQLGATFFKIAGSGLVAKWLGEAEKIIHASFLVARCRQPSVIFVSDIDMLLSSQVNEEHSPVSRMRTEFLMQLDTVLTSAEDQIVVICATSKPEEIDESLRRYFMKRLLIPLPDSTARHQIIVQLLSQHNYCLNDKEFALLVQRTEGFSGLDVAHLCQEAVVGPLHAMPATDLSAIMPSQLRPVTYQDFENAFCKIQPSISQKELDMYVEWNKMFGCSQ

SEQ ID NO: 175 - DNA, 3488 bp, Homo sapiens
gcaaaaccgtgagctggatttataatcgccctataaagctccagaggcggtcaggcacctgcagaggagccccgccgctccgccgactagctgcccccgcgagcaacggcctcgtgatttccccgccgatccggtccccgcctccccactctgcccccgcctaccccggagccgtgcagccgcctctccgaatctctctcttctcctggcgctcgcgtgcgagagggaactagcgagaacgaggaagcagctggaggtgacgccgggcagattacgcctgtcagggccgagccgagcggatcgctgggcgctgtgcagaggaaaggcgggagtgcccggctcgctgtcgcagagccgagcctgtttctgcgccggaccagtcgaggactctggacagtagaggccccgggacgaccgagctgatggcgtcttcgaccccatcttcgtccgcaacctcctcgaacgcgggagcggaccccaataccactaacctgcgccccacaacgtacgatacctggtgcggcgtggcccatggatgcaccagaaaactggggctcaagatctgcggcttcttgcaaaggaccaacagcctggaagagaagagtcgccttgtgagtgccttcaaggagaggcaatcctccaagaacctgctttcctgtgaaaacagcgaccgggatgcccgcttccggcgcacagagactgacttctctaatctgtttgctagagatctgcttccggctaagaacggtgaggagcaaaccgtgcaattcctcctggaagtggtggacatactcctcaactatgtccgcaagacatttgatcgctccaccaaggtgctggactttcatcacccacaccagttgctggaaggcatggagggcttcaacttggagctctctgaccaccccgagtccctggagcagatcctggttgactgcagagacaccttgaagtatggggttcgcacaggtcatcctcgatttttcaaccagctctccactggattggatattattggcctagctggagaatggctgacatcaacggccaataccaacatgtttacatatgaaattgcaccagtgtttgtcctcatggaacaaataacacttaagaagatgagagagatagttggatggtcaagtaaagatggtgatgggatattttctcctgggggcgccatatccaacatgtacagcatcatggctgctcgctacaagtacttcccggaagttaagacaaagggcatggcggctgtgcctaaactggtcctcttcacctcagaacagagtcactattccataaagaaagctggggctgcacttggctttggaactgacaatgtgattttgataaagtgcaatgaaagggggaaaataattccagctgattttgaggcaaaaattcttgaagccaaacagaagggatatgttcccttttatgtcaatgcaactgctggcacgactgtttatggagcttttgatccgatacaagagattgcagatatatgtgagaaatataacctttggttgcatgtcgatgctgcctggggaggtgggctgctcatgtccaggaagcaccgccataaactcaacggcatagaaagggccaactcagtcacctggaaccctcacaagatgatgggcgtgctgttgcagtgctctgccattctcgtcaaggaaaagggtatactccaaggatgcaaccagatgtgtgcaggatacctcttccagccagacaagcagtatgatgtctcctacgacaccggggacaaggcaattcagtgtggccgccacgtggatatcttcaagttctggctgatgtggaaagcaaagggcacagtgggatttgaaaaccagatcaacaaatgcctggaactggctgaatacctctatgccaagattaaaaacagagaagaatttgagatggttttcaatggcgagcctgagcacacaaacgtctgtttttggtatattccacaaagcctcaggggtgtgccagacagccctcaacgacgggaaaagctacacaaggtggctccaaaaatcaaagccctgatgatggagtcaggtacgaccatggttggctaccagccccaaggggacaaggccaacttcttccggatggtcatctccaacccagccgctacccagtctgacattgacttcctcattgaggagatagaaagactgggccaggatctgtaatcatccttcgcagaacatgagtttatgggaatgccttttccctctggcactccagaacaaacctctatatgttgctgaaacacacaggccatttcattgagggaaaacataatatcttgaagaatattgttaaaaccttacttaaagcttgtttgttctagttagcaggaaatagtgttctttttaaaaagttgcacattaggaacagagtatatatgtacagttatacatacctctctctatatatacatgtatagtgagtgtggcttagtaatagatcacggcatgtttcccgctccaagagaattcactttaccttcagcagttaccgaggagctaaacatgctgccaaccagcttgtccaacaactccaggaaaactgtttttcaaaacgccatgtcctaggggccaagggaaatgctgttggtgagaatcgacctcactgtcagcgtttctccacctgaagtgatgatggatgagaaaaaacaccaccaaatgacaagtcacaccctccccattagtatcctgttaggggaaaatagtagcagagtcattgttacaggtgtactatggctgtatttttagagattaatttgtgtagattgtgtaaattcctgttgtctgaccttggtggtgggagggggagactatgtgtcatgatttcaatgattgtttaattgtaggtcaatgaaatatttgcttatttatattcagagatgtaccatgttaaagaggcgtcttgtattttcttcccatttgtaatgtatcttatttatatatgaagtaagttctgaaaactgtttatggtattttcgtgcatttgtgagccaaagagaaaagattaaaattagtgagatttgtatttatattagagtgcccttaaaataatgatttaagcattttactgtctgtaagagaattctaagattgtacataaagtcatatatatggaaatcctgttacttaaatagcatctgctcttctcttacgctctctgtctggctgtacgtctggtgttctcaatgcttttctagcaactgttggataataactagatctcctgtaattttgtagtagttgatgaccaatctctgtgactcgcttagctgaaacctaaggcaacatttccgaagaccttctgaagatctcagataaagtgaccaggctcacaactgtttttgaagaagggaaattcacactgtgcgttttagagtatgcaagaagaatataaataaataaaaatattctccatggagaatttgaacaaaaaaaaaaaaaaaa

SEQ ID NO: 176 - protein, 594 aa, Homo sapiens
MASSTPSSSATSSNAGADPNTTNLRPTTYDTWCGVAHGCTRKLGLKICGFLQRTNSLEEKSRLVSAFKERQSSKNLLSCENSDRDARFRRTETDFSNLFARDLLPAKNGEEQTVQFLLEVVDILLNYVRKTFDRSTKVLDFHHPHQLLEGMEGFNLELSDHPESLEQILVDCRDTLKYGVRTGHPRFFNQLSTGLDIIGLAGEWLTSTANTNMFTYEIAPVFVLMEQITLKKMREIVGWSSKDGDGIFSPGGAISNMYSIMAARYKYFPEVKTKGMAAVPKLVLFTSEQSHYSIKKAGAALGFGTDNVILIKCNERGKIIPADFEAKILEAKQKGYVPFYVNATAGTTVYGAFDPIQEIADICEKYNLWLHVDAAWGGGLLMSRKHRHKLNGIERANSVTWNPHKMMGVLLQCSAILVKEKGILQGCNQMCAGYLFQPDKQYDVSYDTGDKAIQCGRHVDIFKFWLMWKAKGTVGFENQINKCLELAEYLYAKIKNREEFEMVFNGEPEHTNVCFWYIPQSLRGVPDSPQRREKLHKVAPKIKALMMESGTTMVGYQPQGDKANFFRMVISNPAATQSDIDFLIEEIERLGQDL

SEQ ID NO: 177 - DNA, 1272 bp, Homo sapiens
gcaaaaccgtgagctggatttataatcgccctataaagctccagaggcggtcaggcacctgcagaggagccccgccgctccgccgactagctgcccccgcgagcaacggcctcgtgatttccccgccgatccggtccccgcctccccactctgcccccgcctaccccggagccgtgcagccgcctctccgaatctctctcttctcctggcgctcgcgtgcgagagggaactagcgagaacgaggaagcagctggaggtgacgccgggcagattacgcctgtcagggccgagccgagcggatcgctgggcgctgtgcagaggaaaggcgggagtgcccggctcgctgtcgcagagccgaggtggcctgtttctgcgccggaccagtcgaggactctggacagtagaggccccgggacgaccgagctgatggcgtcttcgaccccatcttcgtccgcaacctcctcgaacgcgggagcggaccccaataccactaacctgcgccccacaacgtacgatacctggtgcggcgtggcccatggatgcaccagaaaactggggctcaagatctgcggcttcttgcaaaggaccaacagcctggaagagaagagtcgccttgtgagtgccttcaaggagaggcaatcctccaagaacctgctttcctgtgaaaacagcgaccgggatgcccgcttccggcgcacagagactgacttctctaatctgtttgctagagatctgcttccggctaagaacggtgaggagcaaaccgtgcaattcctcctggaagtggtggacatactcctcaactatgtccgcaagacatttgatcgctccaccaaggtgctggactttcatcacccacaccagttgctggaaggcatggagggcttcaacttggagctctctgaccaccccgagtccctggagcagatcctggttgactgcagagacaccttgaagtatggggttcgcacaggtcatcctcgatttttcaaccagctctccactggattggatattattggcctagctggagaatggctgacatcaacggccaataccaacatgccatcagacatgagggagtgttggttgctacggtgatggggctcagagcagaaccaaagcatgattgtgacctccagaggtgatggtaactgcacacatggtttccaagggtcttcctcctaaatttccaggggcctcccaaggaaaatggacatattctttttggaaataaaatacttctaccaacataaaaaaaaaaaaaaaaaa

SEQ ID NO: 178 - protein, 224 aa, Homo sapiens
MASSTPSSSATSSNAGADPNTTNLRPTTYDTWCGVAHGCTRKLGLKICGFLQRTNSLEEKSRLVSAFKERQSSKNLLSCENSDRDARFRRTETDFSNLFARDLLPAKNGEEQTVQFLLEVVDILLNYVRKTFDRSTKVLDFHHPHQLLEGMEGFNLELSDHPESLEQILVDCRDTLKYGVRTGHPRFFNQLSTGLDIIGLAGEWLTSTANTNMPSDMRECWLLR

SEQ ID NO: 179 - DNA, 3279 bp, Homo sapiens
gtggagtccccgcaggcagagacgcggagtgggggtggcgggtcgccggatcgggtgggaagtaaaagacccccaggagtgggtgcgggctcactgatacggctgtgagcggcattggagtgtgcgtgggtcttctcgctacgctcgggcccgcaagaggggtgtgagagcggctaggtccaagcaggtgatgtttgcagacagaaaaagtaaactgtcaaggaattcagagcattgggtacttgttatttggaccagtttgaagcatctttgatttattggaccaactggcaacagaaaatgaaaagtagtgtggcacagataaaaccttcttctggtcatgacagaagggaaaaccttaattcatatcagaggaactcctctccagaagacagatatgaagaacaagaacgatccccccgggatagagattactttgattacagcagatcagactatgagcattcaagaagaggacgttcttatgatagtagcatggagtcacgaaacagggaccgagaaaaacgcagagaaagagaaagagatacggatcggaaaaggtctcggaaatccccatctcctgggaggagaaacccagaaacatcagtaactcagagttcctctgctcaggatgaacctgctacaaagaaaaagaaagatgagctggatcctcttcttactcgcactggtggagcatatattccccctgcaaagctcaggatgatgcaggaacagattacagataaaaacagcttagcataccagaggatgagttgggaggccctgaagaagtcaattaatggccttatcaacaaagtcaacatttccaacataagtattattattcaagagcttcttcaagaaaatatagttagaggaagaggactgctgtccaggtctgttttgcaagcacagagtgcttctccaatcttcacccatgtttatgcagcattagtggcaattatcaactcaaaatttccacaaattggagaattaatcctcaaaaggttaattcttaattttcgaaaaggctatcgaagaaatgacaagcaactttgcctgactgcttcaaaatttgtggcgcatcttattaaccaaaatgtggcacacgaagtattatgcttagagatgctcactttgctcctggaaagaccaacagatgatagcgttgaagtagctattggttttcttaaggaatgtggcctcaaattaacacaagtgtcaccaagaggaatcaatgctatatttgaacgccttcgaaacattctgcatgagtctgaaattgacaaaagagttcaatatatgattgaagtgatgtttgctgtacggaaagatggattcaaggaccaccccattatcctagaaggtcttgatttggtggaagaagatgatcaattcactcatatgctccctctggaggatgactataatccagaagatgttcttaatgttttcaagatggatcctaattttatggagaatgaagagaagtacaaagctattaagaaagaaattcttgatgagggagatactgactcgaacacagaccaggatgctgggagtagtgaagaggacgaggaagaagaagaggaagagggagaagaagatgaagaaggacaaaaagtaactattcatgacaaaacagaaattaacctggtctcatttcgtcgtacaatttatcttgctattcagtcaagtttagattttgaagaatgtgctcacaaattgctgaaaatggagtttcctgaaagccaaacaaaagaactctgcaacatgatacttgattgctgtgcccaacagaggacatacgaaaaattttttggcttattagctgggcgattttgcatgctaaagaaagagtacatggaatcctttgaaggtatattcaaagaacagtatgataccatccatcgcttggaaacaaacaagttgcgaaatgttgctaagatgtttgctcaccttttatacactgattcacttccatggagtgttcttgaatgtataaaactgagtgaagaaaccactacatcatccagtagaatttttgtcaaaatatttttccaggaactgtgtgaatacatgggtcttcctaaacttaatgcaagattaaaggatgaaactctgcagccattctttgaaggattattaccccgagataatccaagaaacactcggtttgccatcaacttctttacttctataggtcttggaggtttaacggatgaactgcgggagcatctcaaaaatacaccaaaggtcattgtggcgcagaaaccagatgttgagcaaaataaatcctccccatcctcttcctcttcagcgtcctcctcttcagagtctgactcatccgactctgattctgacagcagtgatagcagttcagagtcttccagtgaagagagcgactcttcatccatcagtagtcatagctctgcctcagctaatgatgtaagaaagaagggacatgggaagaccagaagtaaagaggtagataaattgatcagaaaccagcaaacaaatgataggaaacaaaaagaaagaagacaagaacacgggcaccaggaaacaaggactgagagagaaagaaggtcagaaaaacacagagatcaaaattcaagtggttcaaattggagagatcctataacaaagtacacatcagacaaagatgttccttctgaacgaaataactacagtagagttgcgaatgacagagaccaagaaatgcatatagatttggaaaataagcatggtgatcccaaaaagaagagaggagagagaagaaattctttttctgaaaatgagaagcatacacaccgaattaaagacagtgaaaatttcagaagaaaagatagatcaaagtcaaaggaaatgaatagaaagcactcaggctcaagaagtgatgaagatagatatcaaaatggtgccgagagacgatgggaaaaatctagcagatactctgaacaatccagagaatcaaagaaaaatcaggaccggcgaagagaaaagtctccagcaaaacaaaaataattctacaaaatgacataaactggacatgccttatattcagttgaaacaaattattttttactttgacgaactttatagagaattcttgtataaagtattggtttgtatttgtaaatttaaaaaatgttttcattttaacatgttttataattgatacatctcaaggccctacccataaaattatttgaaaactttcaccagaaagggatgtaagtctcgcttatattttgtgaataaaatgatcaaaagctc

SEQ ID NO: 180 - protein, 908 aa, Homo sapiens
MKSSVAQIKPSSGHDRRENLNSYQRNSSPEDRYEEQERSPRDRDYFDYSRSDYEHSRRGRSYDSSMESRNRDREKRRERERDTDRKRSRKSPSPGRRNPETSVTQSSSAQDEPATKKKKDELDPLLTRTGGAYIPPAKLRMMQEQITDKNSLAYQRMSWEALKKSINGLINKVNISNISIIIQELLQENIVRGRGLLSRSVLQAQSASPIFTHVYAALVAIINSKFPQIGELILKRLILNFRKGYRRNDKQLCLTASKFVAHLINQNVAHEVLCLEMLTLLLERPTDDSVEVAIGFLKECGLKLTQVSPRGINAIFERLRNILHESEIDKRVQYMIEVMFAVRKDGFKDHPIILEGLDLVEEDDQFTHMLPLEDDYNPEDVLNVFKMDPNFMENEEKYKAIKKEILDEGDTDSNTDQDAGSSEEDEEEEEEEGEEDEEGQKVTIHDKTEINLVSFRRTIYLAIQSSLDFEECAHKLLKMEFPESQTKELCNMILDCCAQQRTYEKFFGLLAGRFCMLKKEYMESFEGIFKEQYDTIHRLETNKLRNVAKMFAHLLYTDSLPWSVLECIKLSEETTTSSSRIFVKIFFQELCEYMGLPKLNARLKDETLQPFFEGLLPRDNPRNTRFAINFFTSIGLGGLTDELREHLKNTPKVIVAQKPDVEQNKSSPSSSSSASSSSESDSSDSDSDSSDSSSESSSEESDSSSISSHSSASANDVRKKGHGKTRSKEVDKLIRNQQTNDRKQKERRQEHGHQETRTERERRSEKHRDQNSSGSNWRDPITKYTSDKDVPSERNNYSRVANDRDQEMHIDLENKHGDPKKKRGERRNSFSENEKHTHRIKDSENFRRKDRSKSKEMNRKHSGSRSDEDRYQNGAERRWEKSSRYSEQSRESKKNQDRRREKSPAKQK

SEQ ID NO: 181 - DNA, 6082 bp, Homo sapiens
ataacgtctttgtcactaaaatgttccccaggggccttcggcgagtctttttgtttggttttttgtttttaatctgtggctcttgataatttatctagtggttgcctacacctgaaaaacaagacacagtgtttaactatcaacgaaagaactggacggctccccgccgcagtcccactccccgagtttgtggctggcatttgggccacgccgggctgggcggtcacagcgaggggcgcgcagtttggggtcacacagctccgcttctaggccccaaccaccgttaaaaggggaagcccgtgccccatcaggtccgctcttgctgagcccagagccatcccgcgctctgcgggctgggaggcccgggccaggacgcgagtcctgcgcagccgaggttccccagcgccccctgcagccgcgcgtaggcagagacggagcccggccctgcgcctccgcaccacgcccgggaccccacccagcggcccgtacccggagaagcagcgcgagcacccgaagctcccggctggcggcagaaaccgggagtggggccgggcgagtgcgcggcatcccaggccggcccgaacgctccgcccgcggtgggccgacttcccctcctcttccctctctccttcctttagcccgctggcgccggacacgctgcgcctcatctcttggggcgttcttccccgttggccaaccgtcgcatcccgtgcaactttggggtagtggccgtttagtgttgaatgttccccaccgagagcgcatggcttgggaagcgaggcgcgaacccggcccccgaagggccgccgtccgggagacggtgatgctgttgctgtgcctgggggtcccgaccggccgcccctacaacgtggacactgagagcgcgctgctttaccagggcccccacaacacgctgttcggctactcggtcgtgctgcacagccacggggcgaaccgatggctcctagtgggtgcgcccactgccaactggctcgccaacgcttcagtgatcaatcccggggcgatttacagatgcaggatcggaaagaatcccggccagacgtgcgaacagctccagctgggtagccctaatggagaaccttgtggaaagacttgtttggaagagagagacaatcagtggttgggggtcacactttccagacagccaggagaaaatggatccatcgtgacttgtgggcatagatggaaaaatatattttacataaagaatgaaaataagctccccactggtggttgctatggagtgccccctgatttacgaacagaactgagtaaaagaatagctccgtgttatcaagattatgtgaaaaaatttggagaaaattttgcatcatgtcaagctggaatatccagtttttacacaaaggatttaattgtgatgggggccccaggatcatcttactggactggctctctttttgtctacaatataactacaaataaatacaaggcttttttagacaaacaaaatcaagtaaaatttggaagttatttaggatattcagtcggagctggtcattttcggagccagcatactaccgaagtagtcggaggagctcctcaacatgagcagattggtaaggcatatatattcagcattgatgaaaaagaactaaatatcttacatgaaatgaaaggtaaaaagcttggatcgtactttggagcttctgtctgtgctgtggacctcaatgcagatggcttctcagatctgctcgtgggagcacccatgcagagcaccatcagagaggaaggaagagtgtttgtgtacatcaactctggctcgggagcagtaatgaatgcaatggaaacaaacctcgttggaagtgacaaatatgctgcaagatttggggaatctatagttaatcttggcgacattgacaatgatggctttgaagatgttgctatcggagctccacaagaagatgacttgcaaggtgctatttatatttacaatggccgtgcagatgggatctcgtcaaccttctcacagagaattgaaggacttcagatcagcaaatcgttaagtatgtttggacagtctatatcaggacaaattgatgcagataataatggctatgtagatgtagcagttggtgcttttcggtctgattctgctgtcttgctaaggacaagacctgtagtaattgttgacgcttctttaagccaccctgagtcagtaaatagaacgaaatttgactgtgttgaaaatggatggccttctgtgtgcatagatctaacactttgtttctcatataagggcaaggaagttccaggttacattgttttgttttataacatgagtttggatgtgaacagaaaggcagagtctccaccaagattctatttctcttctaatggaacttctgacgtgattacaggaagcatacaggtgtccagcagagaagctaactgtagaacacatcaagcatttatgcggaaagatgtgcgggacatcctcaccccaattcagattgaagctgcttaccaccttggtcctcatgtcatcagtaaacgaagtacagaggaattcccaccacttcagccaattcttcagcagaagaaagaaaaagacataatgaaaaaaacaataaactttgcaaggttttgtgcccatgaaaattgttctgctgatttacaggtttctgcaaagattgggtttttgaagccccatgaaaataaaacatatcttgctgttgggagtatgaagacattgatgttgaatgtgtccttgtttaatgctggagatgatgcatatgaaacgactctacatgtcaaactacccgtgggtctttatttcattaagattttagagctggaagagaagcaaataaactgtgaagtcacagataactctggcgtggtacaacttgactgcagtattggctatatatatgtagatcatctctcaaggatagatattagctttctcctggatgtgagctcactcagcagagcggaagaggacctcagtatcacagtgcatgctacctgtgaaaatgaagaggaaatggacaatctaaagcacagcagagtgactgtagcaatacctttaaaatatgaggttaagctgactgttcatgggtttgtaaacccaacttcatttgtgtatggatcaaatgatgaaaatgagcctgaaacgtgcatggtggagaaaatgaacttaactttccatgttatcaacactggcaatagtatggctcccaatgttagtgtggaaataatggtaccaaattcttttagcccccaaactgataagctgttcaacattttggatgtccagactactactggagaatgccactttgaaaattatcaaagagtgtgtgcattagagcagcaaaagagtgcaatgcagaccttgaaaggcatagtccggttcttgtccaagactgataagaggctattgtactgcataaaagctgatccacattgtttaaatttcttgtgtaattttgggaaaatggaaagtggaaaagaagccagtgttcatatccaactggaaggccggccatccattttagaaatggatgagacttcagcactcaagtttgaaataagagcaacaggttttccagagccaaatccaagagtaattgaactaaacaaggatgagaatgttgcgcatgttctactggaaggactacatcatcaaagacccaaacgttatttcaccatagtgattatttcaagtagcttgctacttggacttattgtacttctgttgatctcatatgttatgtggaaggctggcttctttaaaagacaatacaaatctatcctacaagaagaaaacagaagagacagttggagttatatcaacagtaaaagcaatgatgattaaggacttctttcaaattgagagaatggaaaacagactcaggttgtagtaaagaaatttaaaagacactgtttacaagaaaaaatgaattttgtttggacttcttttactcatgatcttgtgacatattatgtcttcatgcaaggggaaaatctcagcaatgattactctttgagatagaagaactgcaaaggtaataatacagccaaagataatctctcagcttttaaatgggtagagaaacactaaagcattcaatttattcaagaaaagtaagcccttgaagatatcttgaaatgaaagtataactgagttaaattatactggagaagtcttagacttgaaatactacttaccatatgtgcttgcctcagtaaaatgaaccccactgggtgggcagaggttcatttcaaatacatctttgatacttgttcaaaatatgttctttaaaaatataattttttagagagctgttcccaaattttctaacgagtggaccattatcactttaaagccctttatttataatacatttcctacgggctgtgttccaacaaccattttttttcagcagactatgaatattatagtattataggccaaactggcaaacttcagactgaacatgtacactggtttgagcttagtgaaattacttctggataattatttttttataattatggatttcaccatctttctttctgtatatatacatgtgtttttatgtaggtatatatttaccattcttcctatctattcttcctataacacacctttatcaagcatacccaggagtaatcttcaaatcttttgttatattctgaaacaaaagattgtgagtgttgcactttacctgatacacgctgatttagaaaatacagaaaccatacctcactaataactttaaaatcaaagctgtgcaaagactagggggcctatacttcatatgtattatgtactatgtaaaatattgactatcacacaactatttccttggatgtaattctttgttaccctttacaagtataagtgttaccttacatggaaacgaagaaacaaaattcataaatttaaattcataaatttagctgaaagatactgattcaatttgtatacagtgaatataaatgagacgacagcaaaattttcatgaaatgtaaaatatttttatagtttgttcatactatatgaggttctattttaaatgactttctggattttaaaaaatttctttaaatacaatcatttttgtaatatttattttatgcttatgatctagataattgcagaatatcattttatctgactctgccttcataagagagctgtggccgaattttgaacatctgttatagggagtgatcaaattagaaggcaatgtggaaaaacaattctgggaaagatttctttatatgaagtccctgccactagccagccatcctaattgatgaaagttatctgttcacaggcctgcagtgatggtgaggaatgttctgagatttgcgaaggcatttgagtagtgaaatgtaagcacaaaacctcctgaacccagagtgtgtatacacaggaataaactttatgacatttatgtatttttaaaaaactttgtatcgttataaaaaggctagtcattctttcaggagaacatctaggatcatagatgaaaaatcaagccccgatttagaactgtcttctccaggatggtctctaaggaaatttacatttggttctttcctactcagaactactcagaaacaactatatatttcaggttatctgagcacagtgaaagcagagtactatggttgtccaacacaggcctctcagatacaaggggaacacaattacatattgggctagattttgcccagttcaaaatagtatttgttatcaacttactttgttacttgtatcatgaattttaaaaccctaccactttaagaagacagggatgggttattcttttttggcaggtaggctatataactatgtgattttgaaatttaactgctctggattagggagcagtgaatcaaggcagacttatgaaatctgtattatatttgtaacagaatataggaaatttaacataattgatgagctcaaatcctgaaaaatgaaagaatccaaattatttcagaattatctaggttaaatattgatgtattatgatggttgcaaagtttttttgtgtgtccaataaacacattgtaaaaaaaa

SEQ ID NO: 182 - protein, 1032 aa, Homo sapiens [sequence omitted]

SEQ ID NO: 183 - DNA, 1677 bp, Homo sapiens
atgccctggaggaggcgcaggaaccgggtgagtgccctggagggcggccgggaggaagaggcgcccccggaggctgccgctgtgcctccggcgctgttaacgtccccgcagcagacggaggcggcggccgagcggattctgctccggggcatcttcgagatcgggagggacagttgtgacgtggtgctgagcgagcgagcactgcggtggcggcccattcagcccgagcgcccggcgggtgattctaagtatgacttgctatgtaaagaagaatttattgaactcaaagacatattctctgtgaaactgaaacggcgttgttctgttaaacagcagagaagtggtactttattaggtatcacactcttcatctgcttgaaaaaggaacaaaataaactaaagaattctacacttgatcttattaatttaagtgaagaccactgtgacatatggtttagacagttcaagaaaatattggcaggctttccaaacagaccgaagtcattaaaaatactccttaacccccaaagtcacaaaaaagaagctacccaggtttattatgagaaggttgaacctctgttgaagcttgcaggaataaaaactgatgtaacaataatggaatatgaagggcacgctctgtcactgcttaaggaatgtgaactccagggatttgatggtgggcatcggaaaccattgttcgcaatacattggagtgtacagagattgttcactggcatgcaaacgttagaaccaagtgttgtctgtgttggtggagatggatctgctagcgaagtagcccatgctttgcttctgagagctcagaagaatgctgggatggaaacagaccgaatcctgactcctgtcagagcacagcttccacttggcttaataccagcaggatctaccaatgtattggcacattctcttcatggagttcctcatgtgataactgcaacattgcacattataatggggcatgtacagctggtcgacgtctgcaccttcagcaccgctggcaagcttcttcgctttgggttctcagccatgtttggctttggtggaagaactttggctctggcagaaaaatatcgatggatgtcccctaaccaacggagagattttgctgttgttaaggcactggcaaaacttaaggcagaagactgtgaaatatcatttttaccatttaacagctctgatgatgtgcaagaaaggagggcacagggatctcccaaatctgactgtaatgatcaatggcaaatgatccagggtcagttcttgaatgtcagcattatggcaattccttgcctgtgttcagtggcacctagaggcttggcacctaataccagattaaataatggaagtatggctcttataattgcccgaaacacttctcggccagaatttataaaacacctgaaaagatatgccagtgtaaaaaatcagttcaattttccatttgttgagacttacactgttgaggaagtaaaagttcatccaaggaataatactggtggatataatccagaggaggaggaggatgaaactgcttcagaaaattgtttcccttggaatgtagatggtgacttaatggaagttgcatcagaggtccatattagattgcatccaagacttatcagtctttatggaggaagcatggaagaaatgattccaaagtaa

SEQ ID NO: 184 - protein, 558 aa, Homo sapiens
MPWRRRRNRVSALEGGREEEAPPEAAAVPPALLTSPQQTEAAAERILLRGIFEIGRDSCDVVLSERALRWRPIQPERPAGDSKYDLLCKEEFIELKDIFSVKLKRRCSVKQQRSGTLLGITLFICLKKEQNKLKNSTLDLINLSEDHCDIWFRQFKKILAGFPNRPKSLKILLNPQSHKKEATQVYYEKVEPLLKLAGIKTDVTIMEYEGHALSLLKECELQGFDGGHRKPLFAIHWSVQRLFTGMQTLEPSVVCVGGDGSASEVAHALLLRAQKNAGMETDRILTPVRAQLPLGLIPAGSTNVLAHSLHGVPHVITATLHIIMGHVQLVDVCTFSTAGKLLRFGFSAMFGFGGRTLALAEKYRWMSPNQRRDFAVVKALAKLKAEDCEISFLPFNSSDDVQERRAQGSPKSDCNDQWQMIQGQFLNVSIMAIPCLCSVAPRGLAPNTRLNNGSMALIIARNTSRPEFIKHLKRYASVKNQFNFPFVETYTVEEVKVHPRNNTGGYNPEEEEDETASENCFPWNVDGDLMEVASEVHIRLHPRLISLYGGSMEEMIPK

SEQ ID NO: 185 - DNA, 1260 bp, Homo sapiens
atgccctggaggaggcgcaggaaccgggtgagtgccctggagggcggccgggaggaagaggcgcccccggaggctgccgctgtgcctccggcgctgttaacgtccccgcagcagacggaggcggcggccgagcggattctgctccggggcatcttcgagatcgggagggacagttgtgacgtggtgctgagcgagcgagcactgcggtggcggcccattcagcccgagcgcccggcgggtgattctaagtatgacttgctatgtaaagaagaatttattgaactcaaagacatattctctgtgaaactgaaacggcgttgttctgttaaacagcagagaagtggtactttattaggtatcacactcttcatctgcttgaaaaaggaacaaaataaactaaagaattctacacttgatcttattaatttaagtgaagaccactgtgacatatggtttagacagttcaagaaaatattggcaggatctaccaatgtattggcacattctcttcatggagttcctcatgtgataactgcaacattgcacattataatggggcatgtacagctggtcgacgtctgcaccttcagcaccgctggcaagcttcttcgctttgggttctcagccatgtttggctttggtggaagaactttggctctggcagaaaaatatcgatggatgtcccctaaccaacggagagattttgctgttgttaaggcactggcaaaacttaaggcagaagactgtgaaatatcatttttaccatttaacagctctgatgatgtgcaagaaaggagggcacagggatctcccaaatctgactgtaatgatcaatggcaaatgatccagggtcagttcttgaatgtcagcattatggcaattccttgcctgtgttcagtggcacctagaggcttggcacctaataccagattaaataatggaagtatggctcttataattgcccgaaacacttctcggccagaatttataaaacacctgaaaagatatgccagtgtaaaaaatcagttcaattttccatttgttgagacttacactgttgaggaagtaaaagttcatccaaggaataatactggtggatataatccagaggaggaggaggatgaaactgcttcagaaaattgtttcccttggaatgtagatggtgacttaatggaagttgcatcagaggtccatattagattgcatccaagacttatcagtctttatggaggaagcatggaagaaatgattccaaagtaa

SEQ ID NO: 186 - protein, 419 aa, Homo sapiens
MPWRRRRNRVSALEGGREEEAPPEAAAVPPALLTSPQQTEAAAERILLRGIFEIGRDSCDVVLSERALRWRPIQPERPAGDSKYDLLCKEEFIELKDIFSVKLKRRCSVKQQRSGTLLGITLFICLKKEQNKLKNSTLDLINLSEDHCDIWFRQFKKILAGSTNVLAHSLHGVPHVITATLHIIMGHVQLVDVCTFSTAGKLLRFGFSAMFGFGGRTLALAEKYRWMSPNQRRDFAVVKALAKLKAEDCEISFLPFNSSDDVQERRAQGSPKSDCNDQWQMIQGQFLNVSIMAIPCLCSVAPRGLAPNTRLNNGSMALIIARNTSRPEFIKHLKRYASVKNQFNFPFVETYTVEEVKVHPRNNTGGYNPEEEEDETASENCFPWNVDGDLMEVASEVHIRLHPRLISLYGGSMEEMIPK

SEQ ID NO: 187 - DNA, 1392 bp, Homo sapiens
atgccctggaggaggcgcaggaaccgggtgagtgccctggagggcggccgggaggaagaggcgcccccggaggctgccgctgtgcctccggcgctgttaacgtccccgcagcagacggaggcggcggccgagcggattctgctccggggcatcttcgagatcgggagggacagttgtgacgtggtgctgagcgagcgagcactgcggtggcggcccattcagcccgagcgcccggcgggtgattctaagtatgacttgctatgtaaagaagaatttattgaactcaaagacatattctctgtgaaactgaaacggcgttgttctgttaaacagcagagaagtggtactttattaggtatcacactcttcatctgcttgaaaaaggaacaaaataaactaaagaattctacacttgatcttattaatttaagtgaagaccactgtgacatatggtttagacagttcaagaaaatattggcaggctttccaaacagaccgaagtcattaaaaatactccttaacccccaaagtcacaaaaaagaagctacccaggtttattatgagaaggttgaacctctgttgaagcttgcaggaataaaaactgatgtaacaagatctaccaatgtattggcacattctcttcatggagttcctcatgtgataactgcaacattgcacattataatggggcatgtacagctggtcgacgtctgcaccttcagcaccgctggcaagcttcttcgctttgggttctcagccatgtttggctttggtggaagaactttggctctggcagaaaaatatcgatggatgtcccctaaccaacggagagattttgctgttgttaaggcactggcaaaacttaaggcagaagactgtgaaatatcatttttaccatttaacagctctgatgatgtgcaagaaaggagggcacagggatctcccaaatctgactgtaatgatcaatggcaaatgatccagggtcagttcttgaatgtcagcattatggcaattccttgcctgtgttcagtggcacctagaggcttggcacctaataccagattaaataatggaagtatggctcttataattgcccgaaacacttctcggccagaatttataaaacacctgaaaagatatgccagtgtaaaaaatcagttcaattttccatttgttgagacttacactgttgaggaagtaaaagttcatccaaggaataatactggtggatataatccagaggaggaggaggatgaaactgcttcagaaaattgtttcccttggaatgtagatggtgacttaatggaagttgcatcagaggtccatattagattgcatccaagacttatcagtctttatggaggaagcatggaagaaatgattccaaagtaa

SEQ ID NO: 188 - protein, 463 aa, Homo sapiens
MPWRRRRNRVSALEGGREEEAPPEAAAVPPALLTSPQQTEAAAERILLRGIFEIGRDSCDVVLSERALRWRPIQPERPAGDSKYDLLCKEEFIELKDIFSVKLKRRCSVKQQRSGTLLGITLFICLKKEQNKLKNSTLDLINLSEDHCDIWFRQFKKILAGFPNRPKSLKILLNPQSHKKEATQVYYEKVEPLLKLAGIKTDVTRSTNVLAHSLHGVPHVITATLHIIMGHVQLVDVCTFSTAGKLLRFGFSAMFGFGGRTLALAEKYRWMSPNQRRDFAVVKALAKLKAEDCEISFLPFNSSDDVQERRAQGSPKSDCNDQWQMIQGQFLNVSIMAIPCLCSVAPRGLAPNTRLNNGSMALIIARNTSRPEFIKHLKRYASVKNQFNFPFVETYTVEEVKVHPRNNTGGYNPEEEEDETASENCFPWNVDGDLMEVASEVHIRLHPRLISLYGGSMEEMIPK

SEQ ID NO: 189 - DNA, 3123 bp, Homo sapiens
ccagcctgcgactccgccatgccctggaggaggcgcaggaaccgggtgagtgccctggagggcggccgggaggaagaggcgcccccggaggctgccgctgtgcctccggcgctgttaacgtccccgcagcagacggaggcggcggccgagcggattctgctccggggcatcttcgagatcgggagggacagttgtgacgtggtgctgagcgagcgagcactgcggtggcggcccattcagcccgagcgcccggcgggtgattctaagtatgacttgctatgtaaagaagaatttattgaactcaaagacatattctctgtgaaactgaaacggcgttgttctgttaaacagcagagaagtggtactttattaggtatcacactcttcatctgcttgaaaaaggaacaaaataaactaaagaattctacacttgatcttattaatttaagtgaagaccactgtgacatatggtttagacagttcaagaaaatattggcaggctttccaaacagaccgaagtcattaaaaatactccttaacccccaaagtcacaaaaaagaagctacccaggtttattatgagaaggttgaacctctgttgaagcttgcaggaataaaaactgatgtaacaataatggaatatgaagggcacgctctgtcactgcttaaggaatgtgaactccagggatttgatggtgttgtctgtgttggtggagatggatctgctagcgaagtagcccatgctttgcttctgagagctcagaagaatgctgggatggaaacagaccgaatcctgactcctgtcagagcacagcttccacttggcttaataccagcaggatctaccaatgtattggcacattctcttcatggagttcctcatgtgataactgcaacattgcacattataatggggcatgtacagctggtcgacgtctgcaccttcagcaccgctggcaagcttcttcgctttgggttctcagccatgtttggctttggtggaagaactttggctctggcagaaaaatatcgatggatgtcccctaaccaacggagagattttgctgttgttaaggcactggcaaaacttaaggcagaagactgtgaaatatcatttttaccatttaacagctctgatgatgtgcaagaaaggagggcacagggatctcccaaatctgactgtaatgatcaatggcaaatgatccagggtcagttcttgaatgtcagcattatggcaattccttgcctgtgttcagtggcacctagaggcttggcacctaataccagattaaataatggaagtatggctcttataattgcccgaaacacttctcggccagaatttataaaacacctgaaaagatatgccagtgtaaaaaatcagttcaattttccatttgttgagacttacactgttgaggaagtaaaagttcatccaaggaataatactggtggatataatccagaggaggaggaggatgaaactgcttcagaaaattgtttcccttggaatgtagatggtgatttaatggaagttgcatcagaggtccatattagattgcatccaagacttatcagtctttatggaggaagcatggaagaaatgattccaaagtaacatgtaattgtttctaaaagaaatgtacaaactagaattttaatataaagaaatgtggccatgctttaaacctgtggtccccaccctttttgggaccagtttcatggaagacaatttttccgtggatgggggaatggtttcaggatgaactgttccacctcagatcatcaggcattagattctcttgaggaacatggcactctagatccctcacataccagttcaccatatggttcgcacttctatgagaatctaatgctgctgctgatctgacagggggaggaactcagtaatgctccattgctctaacctcctgctgtgtggccaaacggatatcctaatagaaattgatgttactaacaattagcctctagggctttaaaagtcaagatgaaatatcaattcaaattctgtttttagatatcaattcaaattcttttttttacaatgtgtttattggacacacaaaaaaactttgcaaccatcataatacatcaatatttaacctagataattctgaaataatttggattctttcatttttcaggatttgagctcatcaattatgttaaatttcctatattctgttacaaatataatacagatttcataagtctgccttgattcactgctccctaatccagagcagttaaatttcaaaatcacatagttatatagcctacctgccaaaaaagaataacccatccctgtcttcttaaagtggtagggttttaaaattcatgatacaagtaacaaagtaagttgataacaaatactattttgaactgggcaaaatctagcccaatatgtaattgtgttccccttgtatctgagaggcctgtgttggacaaccatagtactctgctttcactgtgctcagataacctgaaatatatagttgtttctgagtagttctgagtaggaaagaaccaaatgtaaatttccttagagaccatcctggagaagacagttctaaatcggggcttgatttttcatctatgatcctagatgttctcctgaaagaatgactagcctttttataacgatacaaagttttttaaaaatacataaatgtcataaagtttattcctgtgtatacacactctgggttcaggaggttttgtgcttacatttcactactcaaatgccttcgcaaatctcagaacattcctcaccatcactgcaggcctgtgaacagataactttcatcaattaggatggctggctagtggcagggacttcatataaagaaatctttcccagaattgtttttccacattgccttctaatttgatcactccctataacagatgttcaaaattcggccacagctctcttatgaaggcagagtcagataaaatgatattctgcaattatctagatcataagcataaaataaatattacaaaaatgattgtatttaaagaaattttttaaaatccagaaagtcatttaaaatagaacctcatatagtatgaacaaactataaaaatattttacatttca

SEQ ID NO: 190 - protein, 532 aa, Homo sapiens
MPWRRRRNRVSALEGGREEEAPPEAAAVPPALLTSPQQTEAAAERILLRGIFEIGRDSCDVVLSERALRWRPIQPERPAGDSKYDLLCKEEFIELKDIFSVKLKRRCSVKQQRSGTLLGITLFICLKKEQNKLKNSTLDLINLSEDHCDIWFRQFKKILAGFPNRPKSLKILLNPQSHKKEATQVYYEKVEPLLKLAGIKTDVTIMEYEGHALSLLKECELQGFDGVVCVGGDGSASEVAHALLLRAQKNAGMETDRILTPVRAQLPLGLIPAGSTNVLAHSLHGVPHVITATLHIIMGHVQLVDVCTFSTAGKLLRFGFSAMFGFGGRTLALAEKYRWMSPNQRRDFAVVKALAKLKAEDCEISFLPFNSSDDVQERRAQGSPKSDCNDQWQMIQGQFLNVSIMAIPCLCSVAPRGLAPNTRLNNGSMALIIARNTSRPEFIKHLKRYASVKNQFNFPFVETYTVEEVKVHPRNNTGGYNPEEEEDETASENCFPWNVDGDLMEVASEVHIRLHPRLISLYGGSMEEMIPK

SEQ ID NO: 191 - DNA, 12408 bp, Homo sapiens
gagaccgctgcaagtcccggggccctgcctctatcgtcctaggggttccgcgggcaggagcaacccagaagcaccggtgaggccagcgcgtcctcgcagccatgagcagtgagcaggataaatcggccagcaaagaaaaatccaagaaaccagtaagatttctaccacagctgtctatggagaaattagccagcaaagaaaagttcaaggcaccagcaagagctttaccacagctgtctatggtgagtacaaagccccactggcagcaggcagctccatcattccatttgagtgtaaagcaggatgatgagagtccagaaccatttagtgttaaaaatgaacagtcccatgctgaatacatggaacgttttggaaaaaagggcaaattaccccaccaagttgatgatagttatgttggaccatctacttccaaatcaaagggcaaatctccacataaagaacgagaaaactttagaagtactcttgttaatgtcattatgcaacaagatgctgacttagactcagctgtccctgatggaagcacaattccaaaaccgaccgcttctgctatagagaaagacatcttgagatattactattatattcaccatggaattgatacagaccatgtagccccaatggaagattcttggctagaacacgtactggatttagttccacaacatctgaaagtcttcactgacagcatagttacattatctgatgaaatgagagaggattatcttcttagtgtaaggaaatccatagttgattttgttttaaaagatcctcgagagaaaggagatgataagaagacagatgaacttccagcccatcgtgctgaaatggaaattctgccaaaaccttggaggaaatcttttttagctgcaagcagttatattagggatcacttgaatgcaatgaaccccacaatgctggctgtactagatttgtggcacactaattttaaaaaattacgtttagttgatatcaaagaatttcataattgccaggatgcattagagctgtcaagttttcagaacattatcatgagacacatggactctgccaaagagactctacttaaaatgtggtttccagaagtgcagaatatttattaccaaggtaataaaaaaaagcaattgccaactggtgacagcagtgccaaattggaatcttttttcaactgtgctgctgcacttatgactttacagctgcaggacctcactttagtctccatgcaagatttcacggacttaattgcacaacccccagattctgttagagcttttgaacatccaggtttcatcatgaggctgattcttgataatgacaccattaagtttgaacctgagttgagtgactatatagatatctttctaaatgtttatgacgtcatgattaaagctgtcagttttgtgccaagagttgagacaaaattgtattccaagtgggaaagtaagtctaaaccaacaaccttgaagcccataattctgaatgaaattgtagatgctcacaaagaaaagatcaaggaagttattatgaaagagagtgtggcacctactgagcacctcagactctatgacaagtatgactttttaattaccagaaaagctgagcgagatgttgataacttcctcgcagaaaatcatagttatgaaaaaataatagatgaaatttgcaaataccagaaactaatagaggaaatacagtacacatccataaagactattcgtttaggaatgtttgaaatgcactgtgaggaattaatcagagctttggtgaagcgagcagatattatttgtgggaaacttctagctaaaatgttcagagatcatcaggaagtaaatacaagattatgcgatgaatttgagaggatagctgaaaaagctcttagcactcctccaaatacagcagaactaatggaaatgaaggcttacattcagaaagtggaggtaactgatatgattgaactagaacagagattagtggattccaaaaactgcctcgccttcctcatcgagtatgtcaacttttctccagcagacatgaggctaaataatagtgttttccagtggtatggaaggatgggagaaatttttgaagaacacaggaaaatcattaaagagaaaatagaacaatatcaagaaggtctgaagttacggtgtgaacggtttgtggaggaattggagagttatgctaagcaatcagaagaattttattcatttggagatcttcaggatgttcagcggtacctaaaaaaggctcaaatactgaatggaaagttggatttagctgcagataagattgagcagtttaatgctgaagaggaagcatttggttggctaccatctgtatatcctcaacgtaaaaaaatccaagatggcttgaacccttatcttcgtctttatgaaactgctgtcgaatttagcagcaactatagagcatggacagaagggccatatcataaagtgaatccagaccaagtagaagcagatattggaaattactggagaggattatataaactggagaaaacctttcatgattctccatatgcattggcaatgacaaaaaaagtaagatcaaaggtggaagatttcaagcagcacattcctctcattcaagtgatctgtaatcctggtttgcgccccaggcactgggaggccatgtctgccattgttggttaccctttgcagccatcagatgactccacagtctcctcttttttagacatgaatctggaaccatatatagaccgatttgaaggtattagtgaagcagctagcaaagaatattctcttgaaaaggcgatggagaagatgattactgagtgggatgcagtggaatttgtcatccattcttatagagaaactgggacatttattttggcatcagttgatgaaattcagatgttgttggatgaccatattattaaaacacaaactatgcgaggatctcctttcattaagccttatgaaaaacaaatgagagaatgggagggcaagctcctactgcttcaggagattctggatgaatggctcaaagtccaagccacgtggctgtatctggagcccattttcagctctccagacattatgtctcaaatgcctgaggaaggcagacgatttacagctgtggataagacatggagagatataatgagaagtgtcatgcaggataaacatgttctgacagttgtaaccattgacagaatgctggaaaggctgaaaaaatctaatgaacttttggagctcattcttaaaggacttaatgaatatttggaaaagaaacgcctctttttccccagattcttttttttgtccaatgatgaacttcttgagatactatctgagactaaagatcccactagggtgcaacctcacttgaagaaatgttttgaaggaatcgcaaaggtagaatttacggaaactttagacattactcacatgaagagcagcgaaggagaggttgtagaactcatagagattatttcaacagccaaagccagaggtcaagtggagaagtggttggttgaattagagagagttatgattaactccatccacaaggtaactggagatgcaacttttgcctatacaaaatatgaacgaattaactgggtaagggattggcctggacagactgttctctgtgtatcccaaatcttttggacaaaagaagtacaaacagctattccaatggggataaaggctcttgagcaatacttgaaaacatgtaacagacaaattgatgatattgtcactttggtgcgtggcaaattgtccatgcagaatcgcgtaactctgggagcacttgtggtactggatgtccatgctagagatgtcctctcatcacttgtaaaaaaaaatattagcgatgactctgactttgaatggttaagtcagcttaggtactactggcaagaaaatcatttagaaacaaaaatgatcaatgctggtttgcgatatggatatgaatatctgggtaattcccctaggctggttattacaccactcacggatagatgttacagaaccttatttggagcccttcatttgcaccttggaggagcacctgagggtccagctggcactgggaagactgaaactaccaaggatttggcaaaagctgtagccaaacaatgtgttgttttcaactgctctgatgggttggattatttggctttgggaaaattctttaagggactgttatcttgtggagcctgggcttgctttgatgagtttaacagaattgatttggaagtactctctgtggttgctcaacaaatccttactatccaaagaggtattaatgcaggtgctgatatactgatgtttgaaggaactgaactaaaacttgaccccacatgtgctgtctttataacaatgaaccctgggtatgctgggcgatcagaactgccagataacctgaaggctctctttcggacagtagcaatgatggtacctgactatgccatgattgctgaaatagtcctatactcctgtgggtttgtcactgctcgaccactgtctgtaaaaattgtggctacgtatcgcttgtgttcagagcagctgtcatctcaacatcactacgactatggaatgagagccgtgaagtcagttcttactgctgctgggaatctgaagctgaaatatccaaatgaaaatgaagaaattttgctgcttagatctatcattgatgtaaatctgccaaaatttttatcccatgatttaccactctttgagggaattacttcggatttgtttcctggggtaaaattaccaaaaccagattacaatgatttgctggcagctatcaaagacaattgtgcctccatgaatttgcaaatgactgcattcttttccgagaagattcttcaagtatatgaaatgatgattgtgcgtcatggttttatgattgttggagaaccatttggaggaaaaactagtgcatatcgtgtcttagctggagcactaaatgatatatgtgaaaaggggctaatggaagaaaacaaagttcaaataactgttttaaatcctaagtctgtcaccatgggccaactgtacggacagtttgattcagtgtcccatgaatggtctgatggggtccttgctgtcagttttagagcatttgcctcttcagtgactccagataggaaatggttaatttttgatggcccagtagatgcagtgtggattgagaatatgaacactgtgctggatgacaacaagaagctatgtctgatgagtggggagattattcagatgtcaccacaaatgaatctaatttttgagccaatggatttagaagttgcttcccctgccactgtttccagatgtggcatgatttacatggagcctcacatgttaggctggagaccactgatgttgtcctgggtgaatctgttacctgcgtcagtcagtgttattcaaaaggaattcataatgggcttatttgacagaatggtccctgtttcggttgaatttattagaaagcatacaaaggaattatctcctacttccgatacaaacttggtccggtccttaatgaatctaatagactgttttatggatgattttgctgatgaagtcaaactaaaggagagaaatgatcgagaaacttactctttgcttgagggcatttttctgttttcattgatctggtccgttggtgcttcttgtacagatgatgatcgattgaaatttaataagattcttcgagaactaatggaaagtccaatttcagatcgaactcgaaatacgtttaaattacagagtggtactgagcaaacatcctcaaaggcactaactgtcccatttcctgaaaaaggaacaatttatgattatcaatttgtcactgagggaataggaaaatgggaaccatggataaagaaattgaaagaagctcctccaattcctaaagatgtaatgtttaatgaaatcattgtgccaactctggacacaattcgatactctgcattaatggaattgctgaccacccatcaaaagccttcaatatttgtaggaccaacaggaactgggaaaagtgtttacattacgaattttcttttaaatcaactaaataaggaaatctacaaacctctgctaattaacttctcagcacaaactacagcagctcaaactcagaatattgtcatgtcaaaattggacaagagaagaaagggagtttttggtcctcctttgggcaagagaatggttgtctttgtagatgatgtcaatatgcctgctcgggaggtatatggggctcaacctcccattgagttacttagacagtggttagaccactggaactggtatgatctaaaagattgttccatgattaaactagtggacattcagatcatgtgtgctatgggacctccaggtggtggtcgaaatccagtaactcctcgatacatgcgacatttcaatattataacaatcaatgagtttagtgataaatccatgtatacaatcttctctagaatcttaacttggcatttagaaatctgttataaatttccagatgaatttctagatttgaccacacaaatcgtaaatggcacaatgactctgtataaagaagcaatgaagaatctcttgcctactccagctaaatctcactacttgttcaacctccgtgatttctcccgtgtcattcaaggtgtttgtttgtcaagaccagaaacaacagaaaccacagaagtgattaaacgtctttgggttcatgaggtccttcgagtgtattatgaccgccttctggacaatacagacagaagctggctcatcaactacattcaagaaattttgagaaactacatgtatgaagattttcatgagctttttcagcgtttggattttgataatgatggcatggtggaagcagatgacttacgcagcttaatgttttgtgatttccatgatcccaagagggaggataccaactacagagaaatcgcagatgtggataatcttcgaatgatagtagaaattcacctagaagaatacaacaatataagcaaaaaacccatgaaccttgtcttgtttcgatttgccatagagcacatcagcagaatttccaggatcctgaagcagcctcgcagccatgctctcctagtaggggttggagggagtggaaggcagtctgtcaccagattagctgcccacatggctgattattcagttttccaagttgaaatctctaaggggtatgatactactgaatggcatgaagatttaaaagtgatcttaaggaaatgtgcggaaggtgagatgcagggtgtcttcctgtttacagatactcaaattaaagaagagtcttttctggaagatgtcagtaatctgctaaatgctggggagattccaaatctctttgcattagatgagaagcaagagatatgtgataagatgcgtcagttagatcgccagcgggataaaaccaagcaaacagatggcagccccatagcccttttcaacatgtttattgatcattgccgcagccaactgcatgtggtccttgccatgagtcccattggagatgcatttcggaatcgtcttagaaagttccctgctcttgttaactgctgtaccattgactggtttcagtcatggcctgaagatgcactccaggcagttgcctcacgattcttggaagaaattgaaatgtcagaggaaatacgagatggctgtatcgacatgtgtaaaagcttccacacttctactatagatttatccaaatctttctttgttgaacttcaaagatacaattatgtgactcctacctcttacctcgaattaatctccaccttcaaactgttgttagaaaagaaaagaagtgaagtaatgaaaatgaaaaagagatatgaagtgggtttggagaaactggattctgcttcatctcaagtagccacaatgcagatggagttggaggcactacatcctcaattaaaagttgctagcaaagaggttgatgaaatgatgataatgattgagaaagagtctgtagaagttgccaaaactgaaaaaatagtgaaagctgatgaaacaatagcgaatgaacaagctatggcttccaaagccatcaaagatgagtgcgatgctgacctggcaggtgccttgccaatattagagtcagcactggccgcccttgatactcttactgcacaggatattacagtggtaaaatccatgaagagtcctcctgctggtgtcaagcttgttatggaagctatatgcatcttgaaaggaatcaaagctgacaaaatccctgacccaacaggttcagggaaaaaaattgaggatttctggggcccagctaagagacttcttggtgacatgaggtttctgcagtcacttcatgaatatgacaaggacaatattcctccagcttatatgaatatcataagaaaaaattatattccaaatccagattttgtaccagaaaaaatcagaaatgcttctacagcggccgaaggtctgtgcaaatgggtcatagcaatggattcatatgataaagtggcaaaaatagtagctcccaaaaagataaaactggctgcagctgaaggggagcttaaaattgccatggatggtcttagaaagaagcaggcagcccttaaggaagttcaggacaagctggccaggcttcaagacacacttgaattaaataaacaaaagaaggctgacctggaaaaccaggttgacctttgcagcaaaaaactagaacgagctgaacagttgattggaggccttggaggtgagaaaactcgatggagccacacagctctggagctaggtcagctgtacatcaacttgactggggatatcctcatttcctccggagtggttgcttacctcggagccttcacatccacctatagacagaatcaaactaaagagtggacaactttgtgcaaaggaagagatatcccctgctcagatgattgctctcttatgggtaccctgggagaagctgtgacaattcgaacttggaatattgctggattaccttctgactcattttccattgataatgggataatcataatgaatgcaagaaggtggcctctgatgatagatcctcaaagtcaggctaataaatggatcaagaacatggaaaaagccaatagtctttatgtgattaaacttagtgaacctgactatgtcaggactctggaaaattgcatccagtttggtactcctgtgttgctagaaaatgttggcgaagaactagatcctattttggaacctcttctactaaaacaaacctttaagcagggtgggagtacatgtatccggcttggggactccacaattgaatatgcacctgacttccgcttctatattactaccaagttaagaaatcctcattatcttcctgaaacatcagtaaaggtaacattattaaacttcatgataacccctgagggaatgcaagatcagcttctgggaattgtggtggcacaagaaaggccagaccttgaagaagaaaagcaagccttgatattacaaggagctgaaaataaaaggcagttaaaagaaatagaagacaagattttagaagttctttcatcttcggaaggcaatatattagaagatgaaactgctattaagatattatcttcctccaaggccttggctaatgagatttctcagaagcaggaagtagccgaagagacagagaaaaagattgacaccacccgcatgggctatcgtcctattgccatccattcttccatcctatttttttctcttgctgatttagccaacattgagcccatgtaccagtattcactgacctggtttattaaccttttcatcctgtctattgaaaattcagagaaatcagaaattttggcaaaaaggcttcagattctcaaggatcactttacttattcactgtatgttaatgtctgccggtcactctttgaaaaggataagctgctcttttccttttgtctaaccataaatctactgctgcatgagcgggcgattaataaagctgagtggagatttctgctaactggtggcattggactggataatccttatgccaacctttgtacatggcttcctcagaaatcctgggatgaaatatgtcgattagatgatttgcctgccttcaaaaccattcgtagagagtttatgcgcttaaaggatggatggaagaaagtatatgatagtttggaaccacaccatgaggttttccctgaagaatgggaagataaagcaaatgagtttcaaaggatgcttattattcgttgcttgaggccagacaaggttattccaatgttgcaggaatttataatcaacagattgggacgtgcattcattgaaccacccccctttgatttagccaaggcatttggagacagtaactgctgtgcaccactgattttcgtgctctctcctggagcagatcccatggctgcccttctaaaatttgctgatgaccagggatatgggggatcaaaacttagctctttatctcttggtcaaggccaagggcccattgctatgaagatgttagaaaaagctgtcaaggaaggaacatgggttgttcttcagaattgtcaccttgccacctcttggatgccaacccttgagaaagtctgtgaggagttaagcccagagtcaacacatccagatttccgaatgtggctaacgagttacccatctccaaatttccctgtgtcagtactgcagaatggagtgaaaatgaccaatgaagcaccaaaaggtttacgggctaatatcattcgatcatacctcatggacccgatctctgatccggagttctttggcagctgcaaaaagcctgaggaattcaagaaattgctttatggcctgtgtttctttcatgctttggtacaagaaagacggaaatttggacccctagggtggaatattccttatgagttcaatgagacagatctgagaatcagcgtacagcagctccacatgttcctgaaccagtatgaggaactgccgtatgaggctctgcggtacatgactggcgaatgcaattacggaggcagagtgaccgatgactgggaccggcgcacgctgcgcagcattctaaacaaattcttcaatcccgaattagttgaaaattcagactataagttcgactcaagtggcatctattttgttcctccttctggtgatcacaaaagctacatcgaatacacaaagactctgccactgaccccagcaccagaaatctttgggatgaatgccaatgcagatatcactaaggatcagtcagaaactcagctgctatttgataacattcttcttacacagtctcgttcagcaggtgctggtgcaaaatcatcagatgaagtagtgaatgaggtcgctagtgacatcttgggcaaacttccaaacaacttcgacatcgaggctgccatgaggaggtacccaacaacttatactcagagcatgaacactgtacttgtccaagagatgggacggttcaataagttactgaagaccataagagattcgtgcgtaaatattcaaaaagcaatcaaggggcttgcagtcatgtctacagatcttgaagaagtggttagcagcattttgaatgtcaaaattccagaaatgtggatgggtaaatcctacccaagccttaaaccacttggcagctatgtgaatgacttccttgcaagactaaaattcttgcagcaatggtatgaggttggtcctcctccagtcttctggctttctggcttcttcttcacacaagccttcctgaccggtgcccagcagaactacgccaggaaatacacaattcctattgatcttcttgggtttgactatgaagtgatggaagacaaagaatacaagcatcctcctgaggatggtgttttcattcacggattatttctggatggagcttcctggaatagaaagatcaagaaacttgcagaatcgcatcccaaaattctttatgatacagtgcctgtgatgtggctaaagccctgtaagagggcagatataccaaaacggccaagttatgttgctccattgtataagacaagtgagcggagaggagtattatccaccactggccattccacgaattttgtgattgccatgactcttccctctgaccaacccaaggaacactggattggacgaggtgtagcactgttatgtcaacttaattcataaccagaagacatcatttccttgttcctatttcttgttggctggctgagtagagaaagcatattttactacttaaacctttttttttgtttgtttaaatacatttgactaaagttataattatgaatttacttatgagcaaatgcagctaaacttaatatgactcatacttaaatgtaaggaaatgttctgaaataaagactaaagaaaacacactggcaaaaaaaaaaaaaaa

SEQ ID NO: 192 - protein, 4024 aa, Homo sapiens
MSSEQDKSASKEKSKKPVRFLPQLSMEKLASKEKFKAPARALPQLSMVSTKPHWQQAAPSFHLSVKQDDESPEPFSVKNEQSHAEYMERFGKKGKLPHQVDDSYVGPSTSKSKGKSPHKERENFRSTLVNVIMQQDADLDSAVPDGSTIPKPTASAIEKDILRYYYYIHHGIDTDHVAPMEDSWLEHVLDLVPQHLKVFTDSIVTLSDEMREDYLLSVRKSIVDFVLKDPREKGDDKKTDELPAHRAEMEILPKPWRKSFLAASSYIRDHLNAMNPTMLAVLDLWHTNFKKLRLVDIKEFHNCQDALELSSFQNIIMRHMDSAKETLLKMWFPEVQNIYYQGNKKKQLPTGDSSAKLESFFNCAAALMTLQLQDLTLVSMQDFTDLIAQPPDSVRAFEHPGFIMRLILDNDTIKFEPELSDYIDIFLNVYDVMIKAVSFVPRVETKLYSKWESKSKPTTLKPIILNEIVDAHKEKIKEVIMKESVAPTEHLRLYDKYDFLITRKAERDVDNFLAENHSYEKIIDEICKYQKLIEEIQYTSIKTIRLGMFEMHCEELIRALVKRADIICGKLLAKMFRDHQEVNTRLCDEFERIAEKALSTPPNTAELMEMKAYIQKVEVTDMIELEQRLVDSKNCLAFLIEYVNFSPADMRLNNSVFQWYGRMGEIFEEHRKIIKEKIEQYQEGLKLRCERFVEELESYAKQSEEFYSFGDLQDVQRYLKKAQILNGKLDLAADKIEQFNAEEEAFGWLPSVYPQRKKIQDGLNPYLRLYETAVEFSSNYRAWTEGPYHKVNPDQVEADIGNYWRGLYKLEKTFHDSPYALAMTKKVRSKVEDFKQHIPLIQVICNPGLRPRHWEAMSAIVGYPLQPSDDSTVSSFLDMNLEPYIDRFEGISEAASKEYSLEKAMEKMITEWDAVEFVIHSYRETGTFILASVDEIQMLLDDHIIKTQTMRGSPFIKPYEKQMREWEGKLLLLQEILDEWLKVQATWLYLEPIFSSPDIMSQMPEEGRRFTAVDKTWRDIMRSVMQDKHVLTVVTIDRMLERLKKSNELLELILKGLNEYLEKKRLFFPRFFFLSNDELLEILSETKDPTRVQPHLKKCFEGIAKVEFTETLDITHMKSSEGEVVELIEIISTAKARGQVEKWLVELERVMINSIHKVTGDATFAYTKYERINWVRDWPGQTVLCVSQIFWTKEVQTAIPMGIKALEQYLKTCNRQIDDIVTLVRGKLSMQNRVTLGALVVLDVHARDVLSSLVKKNISDDSDFEWLSQLRYYWQENHLETKMINAGLRYGYEYLGNSPRLVITPLTDRCYRTLFGALHLHLGGAPEGPAGTGKTETTKDLAKAVAKQCVVFNCSDGLDYLALGKFFKGLLSCGAWACFDEFNRIDLEVLSVVAQQILTIQRGINAGADILMFEGTELKLDPTCAVFITMNPGYAGRSELPDNLKALFRTVAMMVPDYAMIAEIVLYSCGFVTARPLSVKIVATYRLCSEQLSSQHHYDYGMRAVKSVLTAAGNLKLKYPNENEEILLLRSIIDVNLPKFLSHDLPLFEGITSDLFPGVKLPKPDYNDLLAAIKDNCASMNLQMTAFFSEKILQVYEMMIVRHGFMIVGEPFGGKTSAYRVLAGALNDICEKGLMEENKVQITVLNPKSVTMGQLYGQFDSVSHEWSDGVLAVSFRAFASSVTPDRKWLIFDGPVDAVWIENMNTVLDDNKKLCLMSGEIIQMSPQMNLIFEPMDLEVASPATVSRCGMIYMEPHMLGWRPLMLSWVNLLPASVSVIQKEFIMGLFDRMVPVSVEFIRKHTKELSPTSDTNLVRSLMNLIDCFMDDFADEVKLKERNDRETYSLLEGIFLFSLIWSVGASCTDDDRLKFNKILRELMESPISDRTRNTFKLQSGTEQTSSKALTVPFPEKGTIYDYQFVTEGIGKWEPWIKKLKEAPPIPKDVMFNEIIVPTLDTIRYSALMELLTTHQKPSIFVGPTGTGKSVYITNFLLNQLNKEIYKPLLINFSAQTTAAQTQNIVMSKLDKRRKGVFGPPLGKRMVVFVDDVNMPAREVYGAQPPIELLRQWLDHWNWYDLKDCSMIKLVDIQIMCAMGPPGGGRNPVTPRYMRHFNIITINEFSDKSMYTIFSRILTWHLEICYKFPDEFLDLTTQIVNGTMTLYKEAMKNLLPTPAKSHYLFNLRDFSRVIQGVCLSRPETTETTEVIKRLWVHEVLRVYYDRLLDNTDRSWLINYIQEILRNYMYEDFHELFQRLDFDNDGMVEADDLRSLMFCDFHDPKREDTNYREIADVDNLRMIVEIHLEEYNNISKKPMNLVLFRFAIEHISRISRILKQPRSHALLVGVGGSGRQSVTRLAAHMADYSVFQVEISKGYDTTEWHEDLKVILRKCAEGEMQGVFLFTDTQIKEESFLEDVSNLLNAGEIPNLFALDEKQEICDKMRQLDRQRDKTKQTDGSPIALFNMFIDHCRSQLHVVLAMSPIGDAFRNRLRKFPALVNCCTIDWFQSWPEDALQAVASRFLEEIEMSEEIRDGCIDMCKSFHTSTIDLSKSFFVELQRYNYVTPTSYLELISTFKLLLEKKRSEVMKMKKRYEVGLEKLDSASSQVATMQMELEALHPQLKVASKEVDEMMIMIEKESVEVAKTEKIVKADETIANEQAMASKAIKDECDADLAGALPILESALAALDTLTAQDITVVKSMKSPPAGVKLVMEAICILKGIKADKIPDPTGSGKKIEDFWGPAKRLLGDMRFLQSLHEYDKDNIPPAYMNIIRKNYIPNPDFVPEKIRNASTAAEGLCKWVIAMDSYDKVAKIVAPKKIKLAAAEGELKIAMDGLRKKQAALKEVQDKLARLQDTLELNKQKKADLENQVDLCSKKLERAEQLIGGLGGEKTRWSHTALELGQLYINLTGDILISSGVVAYLGAFTSTYRQNQTKEWTTLCKGRDIPCSDDCSLMGTLGEAVTIRTWNIAGLPSDSFSIDNGIIIMNARRWPLMIDPQSQANKWIKNMEKANSLYVIKLSEPDYVRTLENCIQFGTPVLLENVGEELDPILEPLLLKQTFKQGGSTCIRLGDSTIEYAPDFRFYITTKLRNPHYLPETSVKVTLLNFMITPEGMQDQLLGIVVAQERPDLEEEKQALILQGAENKRQLKEIEDKILEVLSSSEGNILEDETAIKILSSSKALANEISQKQEVAEETEKKIDTTRMGYRPIAIHSSILFFSLADLANIEPMYQYSLTWFINLFILSIENSEKSEILAKRLQILKDHFTYSLYVNVCRSLFEKDKLLFSFCLTINLLLHERAINKAEWRFLLTGGIGLDNPYANLCTWLPQKSWDEICRLDDLPAFKTIRREFMRLKDGWKKVYDSLEPHHEVFPEEWEDKANEFQRMLIIRCLRPDKVIPMLQEFIINRLGRAFIEPPPFDLAKAFGDSNCCAPLIFVLSPGADPMAALLKFADDQGYGGSKLSSLSLGQGQGPIAMKMLEKAVKEGTWVVLQNCHLATSWMPTLEKVCEELSPESTHPDFRMWLTSYPSPNFPVSVLQNGVKMTNEAPKGLRANIIRSYLMDPISDPEFFGSCKKPEEFKKLLYGLCFFHALVQERRKFGPLGWNIPYEFNETDLRISVQQLHMFLNQYEELPYEALRYMTGECNYGGRVTDDWDRRTLRSILNKFFNPELVENSDYKFDSSGIYFVPPSGDHKSYIEYTKTLPLTPAPEIFGMNANADITKDQSETQLLFDNILLTQSRSAGAGAKSSDEVVNEVASDILGKLPNNFDIEAAMRRYPTTYTQSMNTVLVQEMGRFNKLLKTIRDSCVNIQKAIKGLAVMSTDLEEVVSSILNVKIPEMWMGKSYPSLKPLGSYVNDFLARLKFLQQWYEVGPPPVFWLSGFFFTQAFLTGAQQNYARKYTIPIDLLGFDYEVMEDKEYKHPPEDGVFIHGLFLDGASWNRKIKKLAESHPKILYDTVPVMWLKPCKRADIPKRPSYVAPLYKTSERRGVLSTTGHSTNFVIAMTLPSDQPKEHWIGRGVALLCQLNS

SEQ ID NO: 193 - DNA, 1707 bp, Homo sapiens
ctctccgctgctgtcgccaggagtcacttcacgagaagccaggtcacaaccgtcggcccttgtctggaaaagtaaaagtggatcctgccacgttcggagctccctggcgcctcgcccggctggagctagagaactcgtcctgtggcggcccccggcgtggggcgggacagcggccccctggagggggcagtcccgggagaacctgcggcggccggagcggtaaaaataagtgactaaagaagcagacctgggaatcacctaacatgtcgaggaggagatttgattgccgaagtatttcaggcctactaactacaactcctcaaattccaataaaaatggaaaactttaataatttctatatacttacatctaaagagctagggagaggtaaatttgctgtggttagacaatgtatatcaaaatctactggccaagaatatgctgcaaaatttctaaaaaagagaagaagaggacaggattgtcgggcagaaattttacacgagattgctgtgcttgaattggcaaagtcttgtccccgtgttattaatcttcatgaggtctatgaaaatacaagtgaaatcattttgatattggaatatgctgcaggtggagaaattttcagcctgtgtttacctgagttggctgaaatggtttctgaaaatgatgttatcagactcattaaacaaatacttgaaggagtttattatctacatcagaataacattgtacaccttgatttaaagccacagaatatattactgagcagcatataccctctcggggacattaaaatagtagattttggaatgtctcgaaaaatagggcatgcgtgtgaacttcgggaaatcatgggaacaccagaatatttagctccagaaatcctgaactatgatcccattaccacagcaacagatatgtggaatattggtataatagcatatatgttgttaactcacacatcaccatttgtgggagaagataatcaagaaacatacctcaatatctctcaagttaatgtagattattcggaagaaactttttcatcagtttcacagctggccacagactttattcagagccttttagtaaaaaatccagagaaaagaccaacagcagagatatgcctttctcattcttggctacagcagtgggactttgaaaacttgtttcaccctgaagaaacttccagttcctctcaaactcaggatcattctgtaaggtcctctgaagacaagacttctaaatcctcctgtaatggaacctgtggtgatagagaagacaaagagaatatcccagaggatagcagcatggtttccaaaagatttcgtttcgatgactcattacccaatccccatgaacttgtttcagatttgctctgttagcacttttttctttgactcatttggactgaatttgaaattttatatccactccagtgagattatgatttgtagcttcatatatgacatgtttatattgtaaatgcacttttccatggaataatttagggaagtgttttaatgttaaattactagttgctagcatgttatgatttcatatcctgagatagctctgcagataagaaaatatttaaatatatgacaaaaagtaaaattgtacatgtgagtttacatgttaatgaaataattcaacttcaaatgaacttaccagaatgttttgcatatcaacaaaaaaaaaaaaaaaaaa

SEQ ID NO: 194 - protein, 372 aa, Homo sapiens
MSRRRFDCRSISGLLTTTPQIPIKMENFNNFYILTSKELGRGKFAVVRQCISKSTGQEYAAKFLKKRRRGQDCRAEILHEIAVLELAKSCPRVINLHEVYENTSEIILILEYAAGGEIFSLCLPELAEMVSENDVIRLIKQILEGVYYLHQNNIVHLDLKPQNILLSSIYPLGDIKIVDFGMSRKIGHACELREIMGTPEYLAPEILNYDPITTATDMWNIGIIAYMLLTHTSPFVGEDNQETYLNISQVNVDYSEETFSSVSQLATDFIQSLLVKNPEKRPTAEICLSHSWLQQWDFENLFHPEETSSSSQTQDHSVRSSEDKTSKSSCNGTCGDREDKENIPEDSSMVSKRFRFDDSLPNPHELVSDLLC

SEQ ID NO: 195 - DNA, 716 bp, Homo sapiens
atggcttcttggtggcagagaatggggacctccgtgcaccggagatgtctccagcaccaggagcagctggaggatgcaaggagctgcagcccgtgaccagccatcaggagaactccgcgggtccctggggtccctgtgcagacagttccaatggaggctgcctctgagagccatcaacctcaacttccgtgcaggcccttcctgcaaatgcttggaaaccccagagccagggcagcagggcctccaggctacggctcactcagctaagagtgccttgggtgccatgtcccagagaatccaggagtcctgccaaagtggcaccaagtggctggtggagacccaggtgaaggccaggaggaggaagagacgggcacagaagggcagtggctccccagctcacagcctgagccagaagagcacccggctatctggagatgcccctgcccactcagcccacagacccctgggagaaggagcataactgcctctccgcccggataggctcccatgcctacccattatgacagtcgatgcaggaggctgccttctggagcccctactcctcaacagagccactctgctctcccagccagtctggcagtgacctagagcctatgggggtgggaattcagcatctccagaagctgtcccaagagctagatgaagccattatggcggaagagagtggtgacatcatctctctcattcatggctga

SEQ ID NO: 196 - DNA, 2175 bp, Homo sapiens
atgggcctgaagcttcccttttctcctgcctgcctgccagcccgcccctcaagctctggggagacagggcgggcctcagcagatgccccagaagatgccagctgcctcccttacgacagcccctcaggttgcttcctctccacccttttgttaaagggcctgaccttcaggcgagagttggtggccaagatgagcttccatgcagccgcagcactgatgaaaggctgctcgattagggatggcaccttgcgctgggcacagcgtcgaagcttcactccagccagctttctggcggaaaacacgaatttccctgatgagatggacacatccttctttgcccaggaaggtatcctccatgaagagctgtccacatacccggacgaagtttttgagtccccatcagaggcagcactcaaggactgggagaaggcaccggagcaggagtacctcactggcagggccctggaccgcagtgagcttgagcccagccacctgatgctgcctttggagcgaggctggcggaagcgggaagacaccgcagcctcgcagcccaaggtgcggctccgacaggagatggtgagcaccgcggggccgcggcggaaccagcgcatcgctgtgccggtgcgcaaactcttcgcccgggagaagcggctgtatgggctgagcatggtgggacggctcaacaaccacacctaccacaagcacatcgacagcttcgtcaagcgacagatcgaggacatggacagccacaggcccttcttcacccactggctcaccttcgtgcacttgctcgtcaccattctagccgtgtgcatctatggcatcgtgcccgtggacttctcacagcatgaaacgatggactcgattctgtggaaccactgggtctacgagaacgtcaagtacgtgcagcaggagaacttctggatcgggcccagctcggaggccctcatccacctgggtgccaagttttcgccttgcatatgccaggatccgcaggtgcacagcttcattcgcgcagggcgcgagcacgagaagcactcggcctgctgcatgcacaacgacaggtcgggctgcctgcagacctcggaggaggagtgctcgcccatgctggcaatgtgggtgaagtgacccatccattccagcgccccagagcttgccggccacaagagacagtttggctctgtctgccaccaggatcccagggtatatgatgagccctcttgggaggacccccgtgagtggccagaagacattaccaagtggccgatctgcaccagaaacaaccccgggaaccacaccaaccttccccacatggactgtgtcatcacaggacggccctgctgcattggcaccaacggcgagtgtgagatcacctcccgggagtactgtgacttcatgaggggctatttccatgaggaggccatgctctgctctcaggtgcactgcatggatgatgtgtgtgggctcctgcctttcctcaaccctgaggtgcctgaccagttctaccgcctgtggctgtccctcttcctgcacaccaggatcctgcactacctggtgtccatctgcttccagatgaccatcccgcgggacctggagaagctggcagggtggcaccacatagccatcatctacctgctgagtggtgtcactggcaacctggccagtgccatcttcctgctgtaccgagcagaggtggttccagctggctcccagtttggcatcctggcctgcctcttcatggagctcttccagagctggcagatcctggagcggccctggcatgccttcttcaagctgctggctgtggtgctcttcctctgcacctttgggctgctgccctggatcgacaactttgcccacatttcggggttcatcagtggcctctttctctccttcgccttctagcgctacatcagcttcagcaagttccatctgtactggaaatgctgcctgatcatcatctttcaggtggtcttcctgggcctcctggctggcctggtggtcctcttctacttctatcctgtctgccgtgagtggtgtgagttcctcacctgcatccccttcactgataatttctgcgagaagtacgaactggatgctcagctccaccgagctggctgcgggctccagggaccatgcgctccagcaggccagagccagacacgacaaccctga

SEQ ID NO: 197 - DNA, 957 bp, Homo sapiens
atgtgcacagtctgcggggcctcgaagtcagccattatgccccccaaagtgagcagcggcagtggcaggacccaggcgcgggtcctccttcctcctcccgccccctcgcggtcagacaacaggtacgcggggagcagcccgggcggccccgcgcaggggttgagccgcagcgctgctgtgcaggggcaggcccgggcagggggcagtgcggcgagaaagttgggtgcgacggaccgcagcctcgggggccaaaggacccccaccgtgagcgcggccacctcccgacacccggcgggctggctggagggagcaggtgaggcacgtggccgcctcgccaagccagggctccctccaggagcccgacccgccggccgggccggtggatgccccctcgagggctcagacccttcgctccagcccccggcgggcgccctgccccgggtcccacactcccgcgccccgtgggccccactgctggctttccgggaccaggctccgctccgcagctcgcgtcctgaggtgatcctccaggctccccactttgggaccccctcctgcgcctcgggtgccggcgcctgtcttcgcctcccgcggggaccctccccggcgccccaggcgtgtgcgccccgggccagctcagctctgggtccgccctccgcaccccgcgccgcgcgcgcgctcaccggccgggcagcggccgcgtcttaccttcgtccggcagccgctgcaggcagagcgcgaggttcctccgccagccccgcatccccgcggccgccctgcggcccggcccggcctcgccagcccggccccggccccgcccccgccgggcagggcggcgcagcgcagcgctggggagggccgcgggcccagggagccgcgggcatggacggccgccgagggtgggggtgccggggcggccgccaggcgctccgctccggctcccgagcccgcggctga

SEQ ID NO: 198 - protein, 318 aa, Homo sapiens [sequence omitted]

SEQ ID NO: 199 - DNA, 2975 bp, Homo sapiens
gaagacacttccggttgcgacggaggtaggcttacgaggcctgtgtcgggtagaaagggtccttcctggaccgggaccctctgccacgaccatggaccgtaggaaaaagcctttggacgtcacggcctcctcgttggtagatcttaaggctgaactcttccgaaagcaagaagaattcaaacaagaaaaacttctaaaagattctggagtttttggaaaaccaaaaacaactaacaagaaaccaagtatctggagcaaacagaatgtaggcgtttcaaatcgagctgagaaggatgctgaacagaagattgaagaacagaagactttagacaaagcaagggaaaaattggaagaaaaagccaaattatatgaaaaaatgactaaaggagactttatagatgaagaagtagaggatatgtaccttgtggatttcacacagaagatcatagacaagcgcaaagaaatggaggcatctggtgcccatagagattctcaaaaggcaggagaaagggacgacgatgaggaaaaccttcctgagggagagatccctcctccccaagaccccagtgaagaatgggtggattacgtggactctttggggcgttcccggcgctgtatgagaaaggatttgccagatctgctggagatggataaaaatcttcaggggagactttttattagtcctgctaatgaaaaaaccctattatctgaagatatgagaaaagaacttcagcgccagcaatgggaggaagaagaaagagaggccctgaagaggcccatggggcccgtacattatgaagacattcgggaaaatgaggcccggcaacttggtgttgggtattttgcctttgcccgagacaaagagttgagaaacaagcagatgaaaaccttagagatgctgcgtgaacagacaacagatcagagaacaaaacgagaaaacataaaggaaaagcgaaaggctatcttagaggcaagacttgccaaacttcgacaaaaaaagatgaaaaaatcaaaagaaggtggaacagaagaagaaaatagagatggagatgttattgggcctttgccaccggagccagaggctgtgccaaccccacgtcctgctgcccagagtagcaaagtagaagtcattgtccaggagaggaaggacaccaagcctggagtgccacacatccgggagtgggaccgcggaaaagaattttcctttggatactggtcgaagaggcagtcagatctccgggctgagagagatcctgagtttgccccgccgtcagattactttgtgggtcagaagagaactggtttttccagcagccaggcatggagcagacctgggccagcacagagtgacccagggcagtgccctgaccagagccacggacctagccctgaacatacgtcacccactcctgcccccgacaacccaccacaagcccccacagttactttcaaaactctggatgacatgatttcctattacaaacaagtgacatgatctttcaaagcacgctgacttgggtttgtactttgacagtgcctttctctcccagagggagaaataactttaggaactgaattgtacctttgtcctgtcctttccctaggaggcacagacttcgggttggatttgtcagcaaggaggaaagttatggaaactttggccacttggctgttcattttattctaagtgggatagggacatacctacctggatttacatgtgagctgcgatagaatagaagtatttattctgtaaaattagacactgagatgtgcttataaccctgtttcatatctactcccacgacttactcatatttaagggttcttttccattccttttgcaaatccgagcatgcaggtgtctttattccaagggttcagcttccagatcagccgatggaccataggtcacgaggaatttctccctgtcaagcagtggaaaactgcatgggaggcaaaatgctctgttctccaagaggacccggaagtaatcacataggaaatgataaggaagaccaggaggagctcttcgtagtccagaaaggtagaagtgggagttgtttacttaattttactgtcataccatgctattacctacactcctgtgtgcagtgggcattcagtaaatgtgtgttgaaggactgggacgtacgtggaggctgctggacctggtcagagactgatgtgccttagcggcaatggttagagcttttcagtgcatcccacctccctgtcgcccccatgctcggcttcctcacattcaggagcctgacttggatcagacttggggctgcacagtggagcaggtgggttcccgtgtcattagtaataaggagagggttgggggtgggcagggctccagaaagtcagcagtgtgcctgggcacccaccccatcctctacctgccacacctcagagggttcctacagctgcacacaagcagttgagagttgatgaccaggcccatagggctcccacagctggttcccaggccagtgagtgctgtgagaatacagtagcacaagtccttgttctctgaagagtgggaaggagaggagtgagtgaagtagcctgtcccctgcaggtcctctgcgatggcattgtctcggttcccgcagtgctgcagtgtggaagggagtgccccatcctcattacagatgacacactggagtgtggaggggtcgatgacttgtgcagggtcatatggtacctaaggggcagatctcagacttaaacacaattgatgtctaacccctagacagtctttttagtgccctctgctctcagtcttgttgccctagtatcaagcaatcttagacaaacatcctgaattcttacaaacttacctctaaactctgaggataaagttgccagtccttttaatggtcagcctaatcattctgtcagcctaatcgggtaattgctttttttaataaatacacataaaaaccaactaaaaaaaaaaaaaaaaa

SEQ ID NO: 200 - protein, 467 aa, Homo sapiens
MDRRKKPLDVTASSLVDLKAELFRKQEEFKQEKLLKDSGVFGKPKTTNKKPSIWSKQNVGVSNRAEKDAEQKIEEQKTLDKAREKLEEKAKLYEKMTKGDFIDEEVEDMYLVDFTQKIIDKRKEMEASGAHRDSQKAGERDDDEENLPEGEIPPPQDPSEEWVDYVDSLGRSRRCMRKDLPDLLEMDKNLQGRLFISPANEKTLLSEDMRKELQRQQWEEEEREALKRPMGPVHYEDIRENEARQLGVGYFAFARDKELRNKQMKTLEMLREQTTDQRTKRENIKEKRKAILEARLAKLRQKKMKKSKEGGTEEENRDGDVIGPLPPEPEAVPTPRPAAQSSKVEVIVQERKDTKPGVPHIREWDRGKEFSFGYWSKRQSDLRAERDPEFAPPSDYFVGQKRTGFSSSQAWSRPGPAQSDPGQCPDQSHGPSPEHTSPTPAPDNPPQAPTVTFKTLDDMISYYKQVT

SEQ ID NO: 201 - DNA, 1674 bp, Homo sapiens
aaagcttcccgagagccatggttggtccaggcaggcagtcggagcacctcgtggagcggctgctaacccagggtggggtggggtggggtggaggggtctgcttgtagtactctcagtcctgatgtcacaggcgcggcaaggacatcgcaaggaggagtcggattacagtaaggatgggcagtgcagcaggcagcccgagcgcactctccagccgccggggatcttagccctggaaaggcagcctgcaaggcgctcatcccgcggaggaggcacgctctcggcgctcactgctctccacgccggggacatttccaccgaatgtagcatgaaagggctctgctctacgtgccagccttgggtgagagctgatgctgaagacaccgcggtgggattccagctgtctgattaatgagaaacataatgtattttggtggtacatgccagagtcctgctctcccggcccttgtccgtccaccagcccctcctttgcaaccatcgctggatattaaaccatttcttccctttcctcttgacactgcagctgcagtcaacctcttccccaatttcaatgcgatggacccgattcagaaagctgtaataaaccatacattcggggttcctcttccccaccgaagaaagcaaatcatatcatgcaacatttgccagttgagatttaattctgatagccaggctgcggcccactacaaaggcacgaaacatgccaagaagctcaaagcactggaagccatgaaaaataagcagaaatctgtaactgccaaggacagcgcaaagactaccttcacctccatcactaccaataccatcaataccagctctgacaaaacagacggtactgcagggacaccagcaatatcaacgacgacaactgtggaaatccgcaaaagcagtgttatgacaactgagatcacctctaaagtggaaaaaagcccaacgacagccactggcaatagctcatgtccttctactgagaccgaggaagaaaaggcaaaacggcttctttactgttcgctatgcaaggttgctgtcaactctgcctcgcagctggaggcgcacaacagtggtactaagcacaaaaccatgttagaagcccggaatggaagtggcactatcaaagcctttcctagggcaggagtgaaaggcaaaggacctgttaataaaggaaacacaggcctccaaaataaaacatttcactgtgaaatctgtgatgtgcacgtcaactcggaaacgcaacttaaacagcacattagcagtagaaggcacaaagacagagctgctgggaagcccccgaaacctaaatacagtccttacaacaaactacagaagacagcacatccactgggggtaaaattagtattttcaaaagaaccttcaaagccattggctccacgaattctaccaaaccctctagcagctgcagcagccgcagcagcagtggcagtgagttcccccttcagtcttcgaactgctccagcagcaacactgttccagacttctgcgcttcctccggcactcctgcggccagctcccggacccattcggaccgcccacactcctgtgctgtttgctccttactaaattccaaataggagtaattgtactgcaataatttttcaaaaaacaaaaaacaaaacaaaaaaaaaaaaaaaaaaaaaa

SEQ ID NO: 202 - protein, 395 aa, Homo sapiens
MRNIMYFGGTCQSPALPALVRPPAPPLQPSLDIKPFLPFPLDTAAAVNLFPNFNAMDPIQKAVINHTFGVPLPHRRKQIISCNICQLRFNSDSQAAAHYKGTKHAKKLKALEAMKNKQKSVTAKDSAKTTFTSITTNTINTSSDKTDGTAGTPAISTTTTVEIRKSSVMTTEITSKVEKSPTTATGNSSCPSTETEEEKAKRLLYCSLCKVAVNSASQLEAHNSGTKHKTMLEARNGSGTIKAFPRAGVKGKGPVNKGNTGLQNKTFHCEICDVHVNSETQLKQHISSRRHKDRAAGKPPKPKYSPYNKLQKTAHPLGVKLVFSKEPSKPLAPRILPNPLAAAAAAAAVAVSSPFSLRTAPAATLFQTSALPPALLRPAPGPIRTAHTPVLFAPY

SEQ ID NO: 203 - DNA, 3954 bp, Homo sapiens
agggggaggtgggcagccggccagggaagcacggtccaggcggctacattcggcccggccatggcagcggcgcccctgaaagtgtgcatcgtgggctcggggaactggggttcagctgttgcaaaaataattggtaataatgtcaagaaacttcagaaatttgcctccacagtcaagatgtgggtctttgaagaaacagtgaatggcagaaaactgacagacatcataaataatgaccatgaaaatgtaaaatatcttcctggacacaagctgccagaaaatgtggttgccatgtcaaatcttagcgaggctgtgcaggatgcagacctgctggtgtttgtcattccccaccagttcattcacagaatctgtgatgagatcactgggagagtgcccaagaaagcgctgggaatcaccctcatcaagggcatagacgagggccccgaggggctgaagctcatttctgacatcatccgtgagaagatgggtattgacatcagtgtgctgatgggagccaacattgccaatgaggtggctgcagagaagttctgtgagaccaccatcggcagcaaagtaatggagaacggccttctcttcaaagaacttctgcagactccaaattttcgaattaccgtggttgatgatgcagacactgttgaactatgtggtgcgcttaagaacatcgtagctgtgggagctgggttctgcgacggcctccgctgtggagacaacaccaaagcggccgtcatccgcctgggactcatggaaatgattgcttttgccaggatcttctgcaaaggccaagtgtctacagccaccttcctagagagctgcggggtggccgacctgatcaccacctgttacggagggcggaaccgcagggtggccgaggccttcgccagaactgggaagaccattgaagagttggagaaggagatgctgaatgggcaaaagctccaaggaccgcagacttctgctgaagtgtaccgcatcctcaaacagaagggactactggacaagtttccattgtttactgcagtgtatcagatctgctacgaaagcagaccagttcaagagatgttgtcttgtcttcagagccatccagagcatacataaagtgaatcatgcaacgtgttgggggaagttctgcctttctgatcaatcttttgggttcacgtggaaaccaggacttggcaacatgatgtttgactgtaatctcatcacggatatgtatgaatttttacaggttcgtttttgaattgtgagaggcagttcattagcaaagatgtactgggcagtaactaaacacacatgcaaacatgtgaatggtggtttattcctcattctgtggatgtttctatgagccaaaatttgatgtctttttttcaaaattgcttatgaaatttccacacaatcgtagcttataagattggaacgatctcagccaaatattttaggtgtaattcatatgtatttgagtggaggattttttttctcatttttctagtgttaaattttaaccagcattaacatggtagagtggaggagtgagtgtgttcaaagatcaacatatttaacttttaaacactatctcaaagccagcataattaactactttgattgtgggctgacctttgtttttttaacaatcaggcatttttaattagataatccactcatgtatttccccctcactgcagttgtctgcatttttagcctcttttctcttcgttagttgtcagaatatgccttcgtcaaggctcagaggtaacaagacagaaaattcatctgggattttcctgctgtggctggcacattcttctgattaacagacacttgtatgatgctttaggctagttagtgcattttttagcaaacatttatcttaaacatcacagatccactggggggtgcaaggggctactgttagtcctcttgttagatgcagtcactcctcctggtcacctagtgagcagggacagagccaggagtcaagtgcagtgccaaggtgcatgaccctctgagaagtcactgggctgatttgacctccgactcattggttgtgcaaatgccatgtgcagcctttcctgaggccataggagggcttcctgcagctgagatctatgcaggccatcctctcaacaagtgccactccaagggcggtcctcggtgcagcagcatcagcttcacttgtgggggggtgggggaaggggcggtctcagaaatgcaggttcccaggtcccaccctggacttctgaaggggtgtggcatctgtgtttctgatgcttactacaatatgtgaaccactactttagaaaatctgctttaacttggtattcctctaattgtgttccctaggaaatgactgtcccaagagccagtgattattccaggtgttccctggaaaggtcaagtgagtctgggaaacactatgtctgtacacctcttgaaggtgtcgaatgtatgtttatacatcagtggaacccatttttctagcctagcaagtcccaaacacattacactgaagagattttggtgaggaaacttgctggagttttcagggaacactgttctaggcttaggtgaccttaggatcactcaagtagacgcttcactccctgcgagaaattaggatgaataactacctgtggcattgttggttctgaacttttacagttcaggcctgctgtgaatctttgatgaagctttaaggtgacactgttgtacaagatgtcagctttgctgaaacgcacattacctggaataagtgctttaattgtagaattagaatgggatttactgtactgttttaaatgagattggcttcagaatccattacagttaccttacatagcacttgatacgtgttaaatgaacatatgaatgtaatttatatattcctagaatttaagttactttgtgagatttgggcctgtccctcaatgccagtttaggatttctttttttctataccttgaaatgattataaaatagattttcatgggaattttaaaaactctatccaaaacatttttggagcattttaaagccccatacacagaagtatacgaaagcacacaaaacactccaagtttcagcagttttagcgccaccattaacccactttgcttgtctcatgaaaaatctttgttaaagtttgtacacaggtaacaaaaagttactttaaaagatatataaagggctgtaagctaattgtggtgtctagtaagtagcataatgagatgtgaggagttggaactttgcgtgttttgcgtattttcatctgcattcagcttcttactctgggtttgtactcgagtgttatttctttacaaatgcccttgtaattaccactctgaagtctgctgactgtgtctcttgaacatacttaggatattctgcacattatggaaaaaggtaaattttagaagtttctgctctactaactgtagatatttatgactctgcgagttatctatttttataaccacctgtggtccattgttcattttaattcacatttcttatgaagtatggtaacagggagggagacacctagattagcagctcaatttgtactacttcagccaatctgtgaatgtaaaaactacactgttgccttgctaggatccaccctcctataatatggaacaaatatctgaatgaaatccaccctaggagacggagtcaaactaaacttgtggtttttcatttaacttttgactacagcatggccccatggcatccacaccaagagggtgttgtgatgaggtgccggtgtgcaaagggaactttagtttttccactggttcttatctgctagccttttacatacatgtgtactatatttgtttatagactgtaggtggatatataatttaaaagcttgatttaataaacatttaaccccataaaaaaaaaaaaaaaaaaaaaaaaagaaaaaaaaaaaaaaaa

SEQ ID NO: 204 - protein, 351 aa, Homo sapiens
MAAAPLKVCIVGSGNWGSAVAKIIGNNVKKLQKFASTVKMWVFEETVNGRKLTDIINNDHENVKYLPGHKLPENVVAMSNLSEAVQDADLLVFVIPHQFIHRICDEITGRVPKKALGITLIKGIDEGPEGLKLISDIIREKMGIDISVLMGANIANEVAAEKFCETTIGSKVMENGLLFKELLQTPNFRITVVDDADTVELCGALKNIVAVGAGFCDGLRCGDNTKAAVIRLGLMEMIAFARIFCKGQVSTATFLESCGVADLITTCYGGRNRRVAEAFARTGKTIEELEKEMLNGQKLQGPQTSAEVYRILKQKGLLDKFPLFTAVYQICYESRPVQEMLSCLQSHPEHT

SEQ ID NO: 205 - DNA, 1548 bp, Homo sapiens
gccctaggagataaagatatgacaaggttcttgccttcaaggagctgtcagtctgagacagaaagagacaggaagtcagagagacataacaatctatgatggtcatctcacagggtgaaatggaggcaaagaggagggggttcagcaatggtttcgccatgaatgtgacccttaaaatgtggctgggagcaacctggacattacagcaggaaataacaaaagtcattcagaactgggatgaccatatgtcctagtttccccaggataatatgtttgcttctgttgtcacagtttgagtatcagtagcacccttttttcctctcaaaatacatgtttgatatatgcatgctttcaaagtatttccctaaaaaattgttggaattatgaaggaaaaaaatagtaactttgcagtagagaaatctggcagatgcttaatccagtaatgaagattaatatcttcacagatggtaccaatgaacatcatgtgcctcctgttaagatttgctcagaactttccacgctacccacagaggggtgcatacagcattgttctggattccagtcgtaacttaaacggaaactttcacaatgtccggagcccttgatgtcctacaaatgaaggaggaggatgtccttaagttccttgcagcaggaacccacttaggtggcactaatcttgacttccagatggaacagtacgtctataaaaggaagtgatggcatctacatcctaaatctgaagaggacctgggagaagcttctgctggcagctcgtgccattgttgccattgaaaaccctgctgatgtcagtgtcatatcctccaggaatactggccagagggctgtgctgaagtttgctgctgctggaaccactccaattgctgaccgcttcacccctggaaccttcaccaatcagatccaggcagctttccgggagccatggcttcttgtgtttactgaccccagagctgaccaccagcctctcccggagacatcttatgttaacctacctaccattgctctgtaacacagattctcctctgtgctatgtggacattgccatcccatgcaacaacaagggagctcactcagtgggtctgatgtggtggatgctggctcgggaagttctgcgcatgcgtggcaccatttcccgtgaacacccataggaggtcatgcctgatctctgcttctacagagatcctgaagagattgaaaaagaagagcaggctgctgctgaaaaggctgtgaccaagaaggaacttcagggcgaatggactgctccagctcctgagttcactgctactcagcctgaggttgcagactggtctgaaggtgtgcaggtgccctctgtgcctatccagcagatccctactgaagactagagctctcagcatgccacggaagactggtctacagctcccactgctcaggccactgaatgggtaggagcaaccactgaatggtcttaagctgttcttgcacaggctcttaagcaacatggaaataaggctgatggaaaataaacatcagtttctaaaaaaaaaaaaa

SEQ ID NO: 206 - DNA, 1185 bp, Homo sapiens
ggcctccaccgccttccccggctgcccggcagcctcccctcgctcgctctcctcttcctctagggccccagcgcagctcgggagcccgcgcaccgaggcgctaggggcaccgcgcactagagggacacccgccgcgcctggacagcccccggcgggcgcccccctcgcacctcctgccccgcgcgggccgcgctcccctcccccgcgcctgtgtccccagggcgcagggccgcgcgtccagccccagacccgccggggtccctggggacgcgccagcccggcagtggctcgacgatggaggagccgcagcgcgcccgctcgcacacagtcaccaccaccgccagctccttcgcagagaacttctccaccagcagcagcagcttcgcctacgaccgggagttcctccgcaccctgcccggcttcctcatcgtggccgagatcgttctggggctgctggtatggacgcttattgctggaactgagtacttccgggtccccgcatttggctgggtcatgtttgtagctgtattttactgggtcctcaccgtcttcttcctcattatctacataacaatgacctacaccaggattccccaggtgccctggacaacagtgggcctgtgctttaacggcagtgccttcgtcttgtacctctctgccgctgttgtagatgcatcttccgtctcccctgagagggacagtcacaacttcaacagctgggcggcctcatcgttctttgccttcctggtcaccatctgctacgctggaaatacatatttcagttttatagcatggagatccaggaccatacagtgatttaccattttgataattaaaaggaaaaaaaaaggaagactctcactgtaaaaacagctgtaggtataatgtatattcccagagaattgtatttaactaattaatgttttttatattcttaaatttgctcacaaattgtggtttgttacaattaaactggatacttatttgcaaagtgttgtagcttataatgaactcttaagtatcttattaatgtattaatgtcttcatagatcatattttcttagacaatgtttaaatagataaattgctaatattgagaatgtgtcaagtttgtaaacctaacttttaagatgccagattcttttttgattaaatgttgcaaaatcccaaaaaaaaaaaaaaaaa

SEQ ID NO: 207 - protein, 173 aa, Homo sapiens
MEEPQRARSHTVTTTASSFAENFSTSSSSFAYDREFLRTLPGFLIVAEIVLGLLVWTLIAGTEYFRVPAFGWVMFVAVFYWVLTVFFLIIYITMTYTRIPQVPWTTVGLCFNGSAFVLYLSAAVVDASSVSPERDSHNFNSWAASSFFAFLVTICYAGNTYFSFIAWRSRTIQ

SEQ ID NO: 208 - DNA, 1606 bp, Homo sapiens
atgtcttgctgtgggagaaattcagcttgttgggtcctctcggtggcggcggcagatcctgggagcaggaagcttggcttagtggctattgagtttgtgttgagtgtcagagacacctggtgcctttctcacctgatctccacgtggatggcctcctccctgaaaataaagcttcctaagatcaggggaagaggaaagggcttctttcttttcctaattatctccctggtagtaacattgagcgtgagcttcaccactcgttccaccttctcctccaactgccagtccgtgggctctgtccaggggcccagctactggcatccagccagtcagcagtgcagcaagcatctatgcaggcgccggagggcagggggtggctctggttcccggatcaccgtgtcctgctccaccagcttccagggtggcatggggtccggggacctggccgcagggacggccaggggtctggcagaaatgggaggcatccagagcgggaaggagaccacgcacagcctgaacgactgcctggcctcctacctggacaaagtgaagagcctggagaccgtgaactggaggctggagagcaaaatcccctgaagggaccccaggtcagagactgggccattacttcaagaccatcaaagacctgagggctcaggtcttctcaaatactgtggacaatgcccgcattgttctgcagattgacaatgcctgtcttgctgctgatgactttagagtcaagtatgagacagaactggccatgtgccagtctttggagaatgacattcatgggctcttcaaggtcattgatgacaccaatgtcactcggctgcagctggagacagagatcgaggctctcaagaaggaactgctcttcatgaagaagaaccatgaagaggaagtaaaaggcctacaagcccagattgccagctctgggttgaccgtggaggtagatgcccccaaatctcaggaccttgccaagatcatggcagacatccaggcccaatatgacgagctggctcggaagaactgagaggagctggacaagtactggtctcagcagattgaggagagcaccacagtggtcaccacacagtccgccgaggttggagctgctgagatgccactcacggagctgagacatgcagtccagtccttggagattgacctggactccatgagaaatgtgaaggccagcctggagaacagcctgagggaggtggaggcccgctacaccctgcagatagagcagctcaacgggatcctgctgcacctggagtcagagctggcactgacccaggcagagggacagcaccaggcccaggagtacaaggccctgctgaacatcaaggtcaagctggaggctgagatcgccagctaccatcgcctgttggaagatggcgaggacttcaatcttggtgatgccctggacagcagcaactccatgcaaaccatccaaaagaccaccacctgccggagagtggatggcaaagtggtgtctgagaccaacgacaccaaagttctgagacattaagccagcagaagcagggtaccctttggggatcaggaggccaataaaaagttcagaggtcattggaaaaaaaaa

SEQ ID NO: 209 - DNA, 3291 bp, Homo sapiens
acaatccaagttaataatacatatcttgtgtattgtcataaaaatgtgttaaatatttaccgtgtgccagaatctgtgtctagcccttagaatatagtggtaaatagcacctttctatgtttatttaaacaaatgatcaattataggaattaagacatgtaaagaaaaatatgcttaaaaatatattaaattatagtaggaaaaactcaagttttcaaatttgaggtgaaattcaagaggcatttattccttgtaggcatttggtcctttattcaccccatagagagggttaaatctaaaatttgacaggaaaataccatttgtttgtttgtttttgctaagatttatgagtagcactgtttctaggaaggtgcccgtacttttccttagatgagcactctaccatttaaagggttttcacgttcattgtctcagttgataataaaccagtcccaggttatggggaatccctcctttctttcatttccatttctacttgaaccatgatttgaggaaacagttcttaaataacacatgaatgagtcaaccacacccttgtggagttcagtgtgaaacaaatgccatccgattgcttgtccatcctctgtacacacccatgagattcatggtgccagcctagtaatatgtccctttcatgggaaagtagaatattcattgtcttagagttcaactgaagatgacaatctactgtagctggttgaagccgcaagggatttattatgcatcattagttggcttccaaaatttttggtagggttggaggagcaggctctaggctgagcttccaggagcacctactggaatcataccatggaactggcctgccatcagaaggaagacgaggaagcaggatctactctcatgtctgctgggtcctggatgtccattgtccccattgcgagtcatgatatcacatggctgccccctgacttgcctctcaacaccacgaagcgaggaatgggacgctgggatttcagttttctgtggactgccacagaaaaagaagtaccttcttggctatgtctgccagcaggaacaaagaggcatccaaagcatgtcctttgggccatggcattgtctttttccttctaagtctaggatgggtgtgtctgctgaagctacatcattgtgtggaacctgagctgtggtccagctttccagcctctagtgagcagtaaggcacactgcaaggggaatgtggcagaggtgagtggatccacatggagtatttactacatccacttcattggattctacctggatcactgtgttggaggtggaaggccatctgtgatttgtggtgcttctaaaacattctaaggacgtgccctatttcagttaagacacacatttgatttctagctatgcaacctttacaactgacctgatacttcctgaacttccatctgtaataatgagaaagataatgacgatgtcacatgttagtagaagataaagtgagcaaaaatacaccgaagctctgtctcagaggaaaatattagcttatttcttgggttactgtaggcttatttcttcccttttttaatcagccggtccaaatattgtacattaattccccctggactgggctgtatttggaatgagtggtcatatcagcttctagtgagttttcacacactcagcaatgagcgggaacatagaatttagcctctctggtacatactagggttaggattaggatcatacttgtaactaaagaaagcttaaaagctatattaaaaaccacagagcagggcagttccaaaatagccgaataggaacagctccaatctacagctcccagtgtgaacgatgcagaagacagatgatttctgcatttccaactgagattggaagacagtagcggttctctcagcacgcagcttgagatctgagaacggacagactgcctcttcaagtgggtccctgacccctgagtagcctaactgggaggcaccccccagtaggggcagactgacacctcacacagctgggtacccctctgagacaaaacttcaagaggaacaatcaggcagcaacgtttgcatttcaccaatattcgctgttctgcagcctccgctgctgatacccaggcaaacggtctggagtggacctccggcaaactccaacagacctgcagctgagggtcctgactgttagaaggaaaactaacaaacagaaaggacatccacaccaaaaccccatctgtacgtcaccatcatcaaagaccaaaggtagataaaaccacaaagatggggaaaaaaacgagcagaaaaactgaaaattctaaaaatcagagcgcctctcctcctccaaaggaacgcagctcctcaccagcaacagaacaaagctgggccgagaatggctttgacgagttgagagaagaaggcttcagacaatcaaacttctccgagctaaaggaggaagttcgaacccatggtaaggaagttaaaaaccttgaaaaaagattagacgaatggctaactagaataaccaatgcagagaagtccttaaaggacctcatggagctgaaaaccacggcacgagaactacgtgacgaatgcacaagcctcagtagccaattcgatcaaccggaagaaagggtatcagtgatggaagatcaaatgaatgaaataaagcgagaagagaagtttagagaaaaaagaataaaaagaaacgaacaaagcctccaagaaatatgggactatgtgaaaagaccaaatctatgtctgattggtgtacctgaaagtgacaaggagaatgcaaccaagttggaaaacactctgcaggatattatccaggagaacttccccaatctagcaaggcaggccaacattcaaattcaggaaatacagagaactccacaaagatactccttgagaagagcaactccaagacacataattgtcagattcaccaaagttgaaatgaaggaaaaaatgttaagggcagccagagagaaaggtcgggttacccacgaggggaagcccatcagactaacagctgctctctcagcagaaactctacaagccagaagagagtgggggtcaatattcaaaattcttaaagaaaagaatttttaacccagaatttcatgtccagccaactaagtaagcttcgtaagtgaaggagaaataaaatcctttacagacaagcaaatgctgagcgattttgtcaccactaggcctgccctacaagagctcctgaaggaagcactaaacgtggaaaggaaacccgtaccagccactgcaaaaacatgccaaattgtaa

SEQ ID NO: 210 - DNA, 5787 bp, Homo sapiens
atgttacttcctgtatggaggcatggccagtttccagcgccgcgctcttcgttccttcccagcctgcgccggagccacaactttcaggagcatggactgaaggcgccctcgccccagcgcccctctgagatcctttgtgttttcctccgtttcctccggccgtttctattttggggggctctccgctccccctgcctctcccctccccttcccctctcgcaaacatgcctccttccttcccggggccctggaaggagctgcctgcctgaagcccggagacgccgcgccgcgctcagccccgccgccgcccgccggctctcgggctgtgctgcgctgccgactcaagttggggatcctcggctgctcgccgccgccgcccgcggtccctgtctgccccaggcccggggcatcgccgccggccgccgactccgcgccctgcccgatcggctctctcctttttaaacggaaagcagcctttctccgccgagaggatcgtccccagcgtggctctgcgttcccggtcactttttgagattttccggggggcgctcggcggcttcccggattccaaggggactcgggccgccgagcgcggggggcccgtggagcgggcgagccggggaagcgccccggcttagcggaggctcgcacggaggcaagaacttattcaacaagtttacctccctgctttcctcttttcgatgtgcgttttcggacatgcggaggttactggaaccgtgttggtggattttgttcctgaaaatcaccagttccgtgctccattatgtcgtgtgcttccccgcgttgacagaaggctacgttggggccctgcacgagaatagacacggcagcgcagtgcagatccgcaggcgcaaggcttcaggcgacccgtactgggcctactctggtgcctatggtcctgagcactgggtcacgtctagtgtcagctgtgggagccgtcaccagtctcctattgacattttagaccagtatgcgcgtgttggggaagaataccaggaactgcaactcgatggcttcgacaatgagtcttctaacaaaacctggatgaaaaacacagggaaaacagtcgccatccttctgaaagacgactattttgtcagtggagctggtctacctggcagattcaaagctgagaaggtggaatttcactggggccacagcaatggctcagcgggctctgaacacagcatcaatggcaggaggtttcctgttgagatgcagattttcttttacaatccagatgactttgacagctttcaaaccgcaatttctgagaacagaataatcggagccatggccatattttttcaagtcagtccgagggacaattctgcactggatcctattatccacgggttgaagggtgtcgtacatcatgagaaggagacctttctggatcctttcgtcctccgggacctcctgcctgcatccctgggcagctattatcggtacacaggttccttgaccacaccaccgtgtagcgaaatagtggagtggatagtcttccggagacccgtccccatctcttaccatcagcttgaggctttttattccatcttcaccacggagcagcaagaccatgtcaagtcggtggagtatctgagaaataactttcgaccacagcagcgtctgcatgacagggtggtgtccaagtccgccgtccgtgactcctggaaccacgacatgacagacttcttagaaaacccactggggacagaagcctctaaagtttgcagctctccacccatccacatgaaggtgcagcctctgaaccagacggcactgcaggtgtcctggagccagccggagactatctaccacccacccatcatgaactacatgatctcctacagctggaccaagaatgaggacgagaaggagaagacgtttacaaaggacagcgacaaagacttgaaagccaccattagccatgtctcacccgatagcctttacctgttccgagtccaggccgtgtgtcggaacgacatgcgcagcgactttagccagacgatgctgtttcaagctaataccactcgaatattccaagggaccagaatagtgaaaacaggagtgcccacagcgtctcctgcctcttcagccgacatggcccccatcagctcggggtcttctacctggacgtcctctggcatcccattctcatttgtttccatggcaactgggatgggcccctcctccagtggcagccaggccacagtggcctcggtggtcaccagcacgctgctcgccggcctggggttcggcggtggtggcatctcctctttccccagcactgtgtggcccacgcgcctcccgacggccgcctcagccagcaagcaggcggctaggccagtcctagccaccacagaggccttggcttctccagggcccgatggtgattcgtcaccaaccaaggacggcgagggcaccgaggaaggagagaaggatgagaaaagcgagagtgaggatggggagcgggagcacgaggaggatggagagaaggactccgaaaagaaggagaagagtggggtgacccacgctgccgaggagcggaatcagacggagcccagccccacaccctcgtctcctaacaggactgccgagggagggcatcagactatacctgggcatgagcaggatcacactgccgtccccacagaccagacgggcggaaggagggatgccggcccaggcctggaccccgacatggtcacctccacccaagtgccccccaccgccacagaggagcagtatgcagggagtgatcccaagaggcccgaaatgccatctaaaaagcctatgtcccgcggggaccgattttctgaagacagcagatttatcactgttaatccagcggaaaaaaacacctctggaatgataagccgccctgctccagggaggatggagtggatcatccctctgattgtggtatcagccttgaccttcgtgtgcctcatccttctcattgctgtgctcgtttactggagagggtgtaacaaaataaagtccaagggctttcccagacgtttccgtgaagtgccttcttctggggagagaggagagaaggggagcagaaaatgttttcagactgctcatttctatgtggaagacagcagttcacctcgagtggtccctaatgaaagtattcctattattcctattccggatgacatggaagccattcctgtcaaacagtttgtcaaacacatcggtgagctctattctaataaccagcatgggttctctgaggattttgaggaagtccagcgctgtactgctgatatgaacatcactgcagagcattccaatcatccagaaaacaagcacaaaaacagatacatcaacattttagcatatgatcacagtagggtgaagttaagacctttaccaggaaaagactctaagcacagcgactacattaatgcaaactatgttgatggttacaacaaagcaaaagcctacattgccacccaaggacctttgaagtctacatttgaagatttctggaggatgatttgggaacaaaacactggaatcattgtgatgattacgaaccttgtggaaaaaggaagacgaaaatgtgatcagtattggccaacagagaacagtgaggaatatggaaacattattgtcacgctgaagagcacaaaaatacatgcctgctacactgttcgtcgtttttcaatcagaaatacaaaagtgaaaaagggtcagaagggaaatcccaagggtcgtcagaatgaaagggtagtgatccagtatcactatacacagtggcctgacatgggagttcccgagtatgcccttccagtactgactttcgtgaggagatcctcagcagctcggatgccagaaacgggccctgtgttggtgcactgcagtgctggtgtgggcagaacaggcacctatattgtaatagacagcatgctgcaacagataaaagacaaaagcacagttaacgtcctgggattcctgaagcatatcaggacacagcgtaactacctcgtccagactgaggagcagtacattttcatccatgatgccttgttggaagccattcttggaaaggagactgaagtatcttcaaatcagctgcacagctatgttaacagcatccttataccaggagtaggaggaaagacacgactggaaaagcaattcaagctggtcacacagtgtaatgcaaaatatgtggaatgtttcagtgctcagaaagagtgtaacaaagaaaagaacagaaactcttcagttgtgccatctgagcgtgctcgagtgggtcttgcaccattgcctggaatgaaaggaacagattacattaatgcttcttatatcatgggctattataggagcaatgaatttattataactcagcatcctctgccacatactacgaaagatttctggcgaatgatttgggatcataacgcacagatcattgtcatgctgccagacaaccagagcttggcagaagatgagtttgtgtactggccaagtcgagaagaatccatgaactgtgaggcctttaccgtcacccttatcagcaaagacagactgtgcctctctaatgaagaacaaattatcatccatgactttatccttgaagctacacaggatgactatgtcttagaagttcggcactttcagtgtcccaaatggcctaacccagatgcccccataagtagtacctttgaacttatcaacgtcatcaaggaagaggccttaacaagggatggtcccaccattgttcatgatgagtatggagcagtttcagcaggaatgttatgtgcccttaccaccctgtcccagcaactggagaatgaaaatgctgtggatgttttccaggttgcaaaaatgatcaatcttatgaggcctggagtattcacagacattgaacaataccagttcatctataaagcaaggcttagcttggtcagcactaaagaaaatggaaatggtcccatgacagtagacaaaaatggtgctgttcttattgcagatgaatcagaccctgctgagagcatggagtccctagtgtgactggaatcctgaaagggcacttaatttgtaaacttctgaagactgagaacttttttgaggccttttttgccagactctaggttatacaataacccagttacttttttacactgataaaagttttgatatttattttttgccattttatgtcttaatggtatcctactgagcatttgcacctctgttcatttcacacagtgaaacgcaattttacctagtttgcactatatgatcagtgttactgcctataatcttatacaacagcaaaccctgatgtgacattccatgacgacatacatgctacttttttttagttcaatacagtgaaggtctttgttatgacagtgaatattgcttttattattattattgctgaagtggttgcattctactagcaggcaatgctgtacttttcttcagtcctcctctcctttttattttaggcactgttcaatactgtatgccttctgtattttaatggagtggatagcattgttttcttttacagactagcaggctactgggacctaaaaaggtctgttaatgtcatggccttgaaacagttccatttatgctggttaagagatcccttaagaagttagaaggcttaagaactgcttcatgtgaacatcccttattagttacaaagttatattcacagttttttaaaaatgtgtcaaaataaaggataactctgtattacagctttcccagtaaaaaaaaaaaaaaaaa

SEQ ID NO: 211 - protein, 1445 aa, Homo sapiens
MRRLLEPCWWILFLKITSSVLHYVVCFPALTEGYVGALHENRHGSAVQIRRRKASGDPYWAYSGAYGPEHWVTSSVSCGSRHQSPIDILDQYARVGEEYQELQLDGFDNESSNKTWMKNTGKTVAILLKDDYFVSGAGLPGRFKAEKVEFHWGHSNGSAGSEHSINGRRFPVEMQIFFYNPDDFDSFQTAISENRIIGAMAIFFQVSPRDNSALDPIIHGLKGVVHHEKETFLDPFVLRDLLPASLGSYYRYTGSLTTPPCSEIVEWIVFRRPVPISYHQLEAFYSIFTTEQQDHVKSVEYLRNNFRPQQRLHDRVVSKSAVRDSWNHDMTDFLENPLGTEASKVCSSPPIHMKVQPLNQTALQVSWSQPETIYHPPIMNYMISYSWTKNEDEKEKTFTKDSDKDLKATISHVSPDSLYLFRVQAVCRNDMRSDFSQTMLFQANTTRIFQGTRIVKTGVPTASPASSADMAPISSGSSTWTSSGIPFSFVSMATGMGPSSSGSQATVASVVTSTLLAGLGFGGGGISSFPSTVWPTRLPTAASASKQAARPVLATTEALASPGPDGDSSPTKDGEGTEEGEKDEKSESEDGEREHEEDGEKDSEKKEKSGVTHAAEERNQTEPSPTPSSPNRTAEGGHQTIPGHEQDHTAVPTDQTGGRRDAGPGLDPDMVTSTQVPPTATEEQYAGSDPKRPEMPSKKPMSRGDRFSEDSRFITVNPAEKNTSGMISRPAPGRMEWIIPLIVVSALTFVCLILLIAVLVYWRGCNKIKSKGFPRRFREVPSSGERGEKGSRKCFQTAHFYVEDSSSPRVVPNESIPIIPIPDDMEAIPVKQFVKHIGELYSNNQHGFSEDFEEVQRCTADMNITAEHSNHPENKHKNRYINILAYDHSRVKLRPLPGKDSKHSDYINANYVDGYNKAKAYIATQGPLKSTFEDFWRMIWEQNTGIIVMITNLVEKGRRKCDQYWPTENSEEYGNIIVTLKSTKIHACYTVRRFSIRNTKVKKGQKGNPKGRQNERVVIQYHYTQWPDMGVPEYALPVLTFVRRSSAARMPETGPVLVHCSAGVGRTGTYIVIDSMLQQIKDKSTVNVLGFLKHIRTQRNYLVQTEEQYIFIHDALLEAILGKETEVSSNQLHSYVNSILIPGVGGKTRLEKQFKLVTQCNAKYVECFSAQKECNKEKNRNSSVVPSERARVGLAPLPGMKGTDYINASYIMGYYRSNEFIITQHPLPHTTKDFWRMIWDHNAQIIVMLPDNQSLAEDEFVYWPSREESMNCEAFTVTLISKDRLCLSNEEQIIIHDFILEATQDDYVLEVRHFQCPKWPNPDAPISSTFELINVIKEEALTRDGPTIVHDEYGAVSAGMLCALTTLSQQLENENAVDVFQVAKMINLMRPGVFTDIEQYQFIYKARLSLVSTKENGNGPMTVDKNGAVLIADESDPAESMESLV

SEQ ID NO: 212 - DNA, 2369 bp, Homo sapiens
ctgccccgtgccgagtttcctgtttaagatggcgtcccccgtagcagcgcaggccgggaagcttctgcgagccctagcgctgcggccccgcttcctggcggccgggtcccaggcagttcaattaacctccagaagatggctgaacctgcaggaataccagagcaagaaactgatgtctgacaacggagtgagagttcaaagattctttgtagcagacactgcaaatgaagctctcgaggctgctaagagactaaatgcaaaagaaattgttttaaaagcccagatcttagctggaggaagaggaaaaggtgtcttcaatagtggtttgaaaggaggtgttcatttaacaaaagaccctaatgttgtgggacagctggctaaacagatgattgggtacaatctagcgacaaaacaaactccaaaagaaggtgtgaaagttaacaaggtgatggttgctgaagccttggatatttccagagaaacctacctggcaattctgatggaccggtcctgcaatggccccgtgctggtgggcagcccccaggggggcgtcgacattgaagaggtggctgcttcaaacccggagctcatttttaaggagcaaattgacatttttgaaggaataaaggacagccaagctcagcggatggccgaaaatctaggcttcgttgggcctttgaaaagccaggctgcagatcaaattacgaagctgtataatctcttcctgaaaattgatgctactcaggtggaagtgaatccctttggtgaaactccagaaggacaagttgtctgttttgatgccaagataaactttgatgacaacgcagaattccgacaaaaagacatatttgctatggacgacaaatcagagaatgagcccattgaaaatgaagctgccaaatatgatctaaaatacataggactagatgggaacattgcctgctttgtgaatggtgctgggctcgccatggctacttgtgatatcattttccttaatggtgggaagccagccaacttcttggatcttggaggtggtgtaaaggaagctcaagtatatcaagcattcaaattgctcacagctgatcctaaggttgaagccatccttgtcaatatatttggtggtatcgtcaactgtgccatcattgccaatgggatcaccaaagcctgccgggagctagaactcaaggtgcccctggtggtccggcttgaaggaaccaacgtccaagaggcccagaagatactcaacaacagcggactccccattacttcagccattgacctggaggatgcagccaagaaggctgtggccagtgtggccaagaagtgatgtctttgtcctgatccaatggagaaagaaagccatttttccgtaaaaagggatggttcatcattgtgaaagaaatggttatctcattggggaagaaaaggggagggggaaggcaagaatcactgaaaaatcttaaatctgtgttttctggaataagatatctagacagcctaaatctgattttggtctttataaaaataatatcttgtgttctcatacttttctgtcactgtaagcctgcccagtaggcagtgttttgcagactttggggagtggtctatgtggccaaatattgtgtgtatagacagaatttgaaatcaagtcctgcttcatttacaagaattttggtgggcatctaatcctacataatgaaaaagaaaaacagaccatttaaaaactcagacaagattatatttaatatattaattactaaaaaggcataagattacactgaacatattagctactaaaaaggcactgctaagacattcaagcaaatagctattacacactactgcagattttacaggtttctaattctaacatatgtttgaaaaatccgtgagtattccaaaatatatttaataatggaatatctgcattaatataccatccatgtgtttttaccatttgccttaatattgaatatactgtttacctcacactaaaaagaaaaccagaagccttatttgtgattttgggagtggaagcttccatttttgtgtcaaaaatgaatcctgattcttatggaaatctctgttattaagatatttcaagatgagacaacactgaagatcaaattgtgtttagtatcactatcttctctcctcgtttctctcttactcctcatcctcccagaatctaccagtttatggtagaaagatgggaaccttatttgaatgtgttttttttttccatgatgtccaattttgttgtgggaaaggatttggataaaatttttgtttaaattttggtagatttttatctatacaaatttaaataaaattatgttttgtaagctgtaaaaaaaaaaaaaaaaaaa

SEQ ID NO: 213 - protein, 432 aa, Homo sapiens
MASPVAAQAGKLLRALALRPRFLAAGSQAVQLTSRRWLNLQEYQSKKLMSDNGVRVQRFFVADTANEALEAAKRLNAKEIVLKAQILAGGRGKGVFNSGLKGGVHLTKDPNVVGQLAKQMIGYNLATKQTPKEGVKVNKVMVAEALDISRETYLAILMDRSCNGPVLVGSPQGGVDIEEVAASNPELIFKEQIDIFEGIKDSQAQRMAENLGFVGPLKSQAADQITKLYNLFLKIDATQVEVNPFGETPEGQVVCFDAKINFDDNAEFRQKDIFAMDDKSENEPIENEAAKYDLKYIGLDGNIACFVNGAGLAMATCDIIFLNGGKPANFLDLGGGVKEAQVYQAFKLLTADPKVEAILVNIFGGIVNCAIIANGITKACRELELKVPLVVRLEGTNVQEAQKILNNSGLPITSAIDLEDAAKKAVASVAKK

SEQ ID NO: 214 - DNA, 5722 bp, Homo sapiens
atttttaacttcgcaacacttggactatttctgttgaagttttctctcctttccctgccttcccaacagaacgctgtcctctactgcagctgatgcaacccagccacctcccggcaatccgcttacttgcaatcaagggttcaggtgcaagcagatgctgactcagcctgttccattaagagctaagaagcaagaagaaattggggcgccatggggaaagcccgcagatccccgccagggcaccacaggcattgtgagggatgcttcaaccgccactgccacattcctgtggaacccaacacctcctgcctggtaataagctgccacctgctctgtggtgccaccttccacatgtgcaaagaggcagagcaccagctcctctgccctttagagcaggttccgtgcctcaactccgaatatggctgccctctgtccatgtcccgccacaaactggccaagcacctgcaggtgtgccccgccagcgtggtctgctgctccatggagtggaaccgctggccaaatgtggactctgaaaccacccttcatgaaaacatcatgaaagagacccccagtgaggagtgtttggacacagccctggccctgcaggatcagaaggtcctcttcagatccttgaaaatggtggaacttttcccagaaactagagaggctactgaggaggaaccaactatgaatggtgaaaccagtgtggaggaaatgggaggagcagtgggtggagtggatatcggtttggtaccacatggtctgtcagcaactaatggggagatggcagagctaagtcaagaagaacgggaggtgctagccaaaaccaaagaagggatggacctggtcaagtttggccagtgggaaaatattttcagcaaagagcacgcagcctctgctttaacaaattcatcagcgagctgtgagagcaagaacaagaatgactccgagaaagaacagatttccagtggccataacatggtagaaggagagggcgctcccaaaaagaaagaaccacaggaaaatcagaagcagcaggacgttcgtacagccatggaaaccacagggcttgccccttggcaggatggtgttctggaaagactgaaaacagctgtggatgcaaaggactataacatgtatctagtgcacaatgggcggatgctgatacactttggtcagatgcctgcttgtacacccaaggagagagactttgtttatggcaagctggaggctcaggaagttaagactgtttacaccttcaaagttcctgtgagctactgtggaaagcgagctcgacttggagatgccatgttgagttgtaagccaagtgaacacaaggcagtggatacttcagatttggggatcactgtggaggacctgcccaaatcagatctcatcaagaccaccctccagtgtgctttggaaagagaactcaaaggccacgtcatctctgaatccagaagcattgatggactgttcatggattttgccacacaaacatacaactttgagccagaacagttttcctctgggacagtgctggctgacctaaccgctgccaccccagggggactccacgtggagctccacagcgagtgtgtgaccaggagacacaacaaaagcagctctgccttcactttcacttgcaacaaattcttcaggagggatgagttccccctgcacttcaagaatgtccacacagacattcagtcatgtctcaatggctggttccagcatcgatgccccctcgcctacttgggatgtacatttgttcaaaaccatttccgtcccccagggcaaaaggcaaaagtaatctatagccaggagctcaagacctttgccattaagccggaggttgctccagagctgagcgagggaaggaagaacaaccatcttttgggtcatggaggaaaaagccagaattctttaaccagcctgcccctggagattttgaagtacattgctgggttcttggacagcgtcagcctggcccagctctcccaggtgtctgtgctgatgaggaatatctgtgccactttgttacaagagagaggaatggtccttttgcaatggaagaaaaagaggtattcccatggaggcacctcctggagagtccacagagagatctggcagttcagcagcctcttctccaaaatcaagagctgggagtttaatgaagtcacctccatgtctgagcacctgaagtcctgtcctttcaacattgtagagcacaaaactgacccgattcttttgactagcatgtgtcagccccgtgagcaggcccgagagagcttagtctccacctttagaatcagaccacgaggaagatacgtctcctaaaaattcagatgccactcgatgcacccttcttggatttcttctcggagttcctgaagtaggacagagtgtgtggttttgaggactcccttctgtaaactgcctatttgcttatcggggtgtattggaacacgcaatgtccttcgaaacctcaacacgaggcctaagaatttcctaagccatgtcttgtaccatagtgccacattgatgacttgtttccttttttcttttcttttcttttcttttttctttctttctaaaatagattggtctgagaagaaaataagtaatttgaggccatttggaagatgggcccaatttcttaagtgatgagagagcacgaaattccataaccagtacaggcctgtgcttttacatgggctttttagttcacaaagcactttcaaatttatgggacaggaaatgcaggatgggactccccagggaacgcagggtgaagggaacaaagctggaggctctggagctgggtctgttttgacggtcaagtccagggctcattttggttattctactgcctctaggccagggtagtcctaacacagcctgacataggagagcccctggctgagcatggcagccttgaagacaccacaggccaaaacatgaggggcagaaatgggatcacagagtctgttgctagaatcttggcaacatacagcaggaaagccttgataaatcgggagtccaaaggagacaccatatttatggagaacattaggacaaaaagtcaccaacttactttgtaacattttaataatgacttaagggtcaagatttttttcttctgaaaattatgttctgagttaggcagaacatagccatggccctgggccaccctgtgctatctgaaatgacctcaatacactaatgccaacctcagcgtcatgccagaatgcacagggcagcccagggagatcacacctttggcaaagtccagacaaggcccactgcagttcctatggcgccagtcaccagctcctagacagcacttgggtaccccattggggtcttggagaggaagacatgtgaacataacggctccctgaaattgctcctacccatccatatttctggtcatgctttcagtctgacaaaaatggatgatactgctgtttttggtaacaaacagtgaatattcataagaacaaaagtaaaagaaaaaaagacacagtagaaactggcatcccctaaagcagggcttcttagccttggaactattgacatttttaaatggataattctttttttttttttctaggtggggaggggatggagttcactcttgttgcccaggctggagcgcaatgacatgatctcggctcaccgcaacctccgcctcctgggttcaagcgattctcctgcctcagcctcccgagtagctgggattactcgcctggctaattttgtatttttagtagagacgggctttctccatgttgttcaggctggtctcaaactcccgacctcaggtgactcgcccgccttggccttccaaagtgctgggtttacaggtgtgagccactgcgccctgcctgaactggataattctttgttgcaagggactgttctgtgtactacaggatacttggcagcatccttggcctatccattaaatgtcagtagcacccccacagtggcaacaatcaaaaatgtcaccagacattgctaaatattggggagcaaaatggctccccgttgaaaatccctaaaggatgtcatactagtgacaataagttaggatatgcttattttttagtacagcaaaatcttatcgcacatagctatccacaatagttatgatttaatgcagctctttatttatgaaataggttttagacatgtggtgattttaagttgggaaccagaaggaaatgattcgtttggtatggcttcatgtccttcagccacccccaagaatgtatcctttcagctctctttggttatacctgaagccaggagcgttgagttattagccttgtgtttatattcctctcactgtaattggtgtcattttcccagcagtcctagcagtcctcaagcaagtgggaaatcggaaaagaaaaggacaggcattgtagggaagcagaggataaagaatttagccaacaaaagaaacaatctagtcaatctgggtgcttttatttcctgggttctctctaaacatggctcagagctggtgtagatgaagtaggtgaaacctctgaaaagagtctagaaggcagtagagcaagtcccagaccagaaacatgctcatcttttcatcgtaatgtgccactcggtactatttggtaatgtcactctatttttcctaatcccatcctttggtttgtatttcatatttgtatataaggcaccattttctaaaaatatgactagggtgtgacctaaggttttattctgtgaagatgagtaactggaaagaagctaacactgcagtgggaaggaaggaagagagttgtccaggtggtagttcgacgtgttttgaatctagtccttcctacatggaggataaaagctcctaaagtccactctgggtttgtgattttaatagaaatagaaagggaaactatagaccaatggagatgaaaatcaggggctatcgacagatggaggagaaataaggtgctacatagagaaaggaagagggcagaaggctttcccttcccaaactgggtgagctggggaagccttggttcaggagagtggcactgcccacaactgctttgtgggttgtgcacttccagccgcactctccccctccagttgctgccttcagagccgtactgaagcacgagcttcaataagacaagcacacttcatagtgagagggcagcggtaccaaagcctttcagagagactatggattagacagaaatgatttgtgagaggaagctggagtgaacagcatgaacagcgagtgttacctgacagaggcaagacagctagaagtggcttcagatttagaaacagctgaggggagcaaagacggactgtgtacacagggagggaggatgtctatgggcagagcccttggtgagtatcatcaccaagaaaggcagtccagagtagagatcagccgaatatggaggctgaggtctgtagaactgggccagagaggaccttactgccttagtagcataagggtctggaaaagaagtttctatctcacaacaaaggaaaaagtgaaaagcaaggtggaacttgaagatacgtcacgaaaatcactataaaagtctgatttatgtgtgatgtcaaatcaaactgaaatgaagaatgagattgagtatatctgtggtgactgacctctgtatactagaaacctcaacatctctagaagaggaaataaaagctgctttgcactctg

SEQ ID NO: 215 - protein, 709 aa, Homo sapiens
MGKARRSPPGHHRHCEGCFNRHCHIPVEPNTSCLVISCHLLCGATFHMCKEAEHQLLCPLEQVPCLNSEYGCPLSMSRHKLAKHLQVCPASVVCCSMEWNRWPNVDSETTLHENIMKETPSEECLDTALALQDQKVLFRSLKMVELFPETREATEEEPTMNGETSVEEMGGAVGGVDIGLVPHGLSATNGEMAELSQEEREVLAKTKEGMDLVKFGQWENIFSKEHAASALTNSSASCESKNKNDSEKEQISSGHNMVEGEGAPKKKEPQENQKQQDVRTAMETTGLAPWQDGVLERLKTAVDAKDYNMYLVHNGRMLIHFGQMPACTPKERDFVYGKLEAQEVKTVYTFKVPVSYCGKRARLGDAMLSCKPSEHKAVDTSDLGITVEDLPKSDLIKTTLQCALERELKGHVISESRSIDGLFMDFATQTYNFEPEQFSSGTVLADLTAATPGGLHVELHSECVTRRHNKSSSAFTFTCNKFFRRDEFPLHFKNVHTDIQSCLNGWFQHRCPLAYLGCTFVQNHFRPPGQKAKVIYSQELKTFAIKPEVAPELSEGRKNNHLLGHGGKSQNSLTSLPLEILKYIAGFLDSVSLAQLSQVSVLMRNICATLLQERGMVLLQWKKKRYSHGGTSWRVHREIWQFSSLFSKIKSWEFNEVTSMSEHLKSCPFNIVEHKTDPILLTSMCQPREQARESLVSTFRIRPRGRYVS

SEQ ID NO: 216 - DNA, 698 bp, Homo sapiens
gctgatggcatctcaccaaaatgcggtgcaataaaagcaaatccttgaagagtggaaaccttgcagccaggttcatggaagggctcaagaatattgctgtgctacggtgcttctgcaggcaggttcaccatctgtgtaactgtggctaccaccttccatcttgaactcagacacagacctctcctccgagctccagatccatatatccaatctccttctcaatagtcacttgcaagtctcagccatttcaaagtcaacccaaagtggtaatcttcaaatctttcccatttcaacaagtgacaccaccatccactaattgtaaaagtcagaaacctggatgccatctttgctccactgtgagaggctgctcacaccaccccctacatgccctgaggagtctccaggggcacccacagcctcctctggctttctctgggtgacccagggagggctaggccctgtgagccacaccggggcagcagcactcaccagctcacaagtgcttccctcttctgcctttgctgacaacagtcccccaggccttccattctccttccgatgaggctgatgtattctgttgcagttggatgcacctacaaaaatcctcttcaaaatcccatcacttcaccaccaaggaattactaaaataccatgaaggaggtgctcaaaggcgatatggggcagaggaaggaataagt

SEQ ID NO: 217 - protein, 74 aa, Homo sapiens
MPSLLHCERLLTPPPTCPEESPGAPTASSGFLWVTQGGLGPVSHTGAAALTSSQVLPSSAFADNSPPGLPFSFR

SEQ ID NO: 218 - DNA, 4912 bp, Homo sapiens
acagtagaaagtcagaaggtcacaaagcttgcagggtaagtgacacaacttgaaactgcttggccctctttaaaaagaaataataaaatgggagagaatgaagcaagtttacctaacacgtctttgcaaggtaaaaagatggcctatcagaaggtccatgcagatcaaagagctccaggacactcacagtacttagacaatgatgaccttcaagccactgcccttgacttagagtgggacatggagaaggaactagaggagtctggttttgaccaattccagctagacggtgctgagaatcagaacctagggcattcagagactatagacctcaatcttgattccattcaaccagcaacttcacccaaaggaaggttccagagacttcaagaagaatctgactacattacccattatacacgatctgcaccaaagagcaatcgctgcaacttttgccacgtcttaaaaatactttgcacagccaccattttatttatttttgggattttgataggttattatgtacatacaaattgcccttcagatgctccatcttcaggaacagttgatcctcagttatatcaagagattctcaagacaatccaggcagaagatattaagaagtctttcagaaatttggtacaactatataaaaatgaagatgacatggaaatttcaaagaagattaagactcagtggacctctttgggcctagaagatgtacagtttgtaaattactctgtgctgcttgatctgccaggcccttctcccagcactgtgactctgagcagcagtggtcaatgctttcatcctaatggccagccttgcagtgaagaagccagaaaagatagcagccaagacctgctctattcatatgcagcctattctgccaaaggaactctcaaggctgaagtcatcgatgtgagttatggaatggcagatgatttaaaaaggattaggaaaataaaaaacgtaacaaatcagatcgcactcctgaaattaggaaaattgccactgctttataagctttcctcattggaaaaggctggatttggaggtgttcttctgtatatcgatccttgtgatttgccaaagactgtgaatcctagccatgataccttcatggtgtcactgaatccaggaggagacccttctacgcctggttacccaagtgtcgatgaaagttttagacaaagccgatcaaacctcacctctctattagtgcagcccatctctgcacccctcgttgcaaaactgatctcttcgccaaaagctagaaccaaaaatgaagcgtgtagctctctagagcttccaaataatgaaataagagtcgtcagcatgcaagttcagacagtcacaaaattgaaaacagttactaatgttgttggatttgtaatgggcttgacatctccagaccggtatatcatagttggcagccatcatcacactgcacacagttataatggacaagaatgggccagtagtactgcaataatcacagcgtttatccgtgccttgatgtcaaaagttaagagagggtggagaccagaccgaactattgttttctgttcttggggaggaacagcttttggcaatattggctcatatgaatggggagaggatttcaagaaggttcttcagaaaaatgttgtggcttatattagcctccacagtcccataagggggaactctagtctgtatcctgtagcatcaccatctcttcagcaactggtagtagagaaaaataatttcaactgtaccagaagagcccagtgcccagaaaccaatatcagttctatacagatacaaggtgatgctgattatttcatcaaccatcttggagttcccatcgtgcagtttgcttacgaggacatcaaaacattagagggtccaagttttctctccgaggcccgtttttctacacgagcaacaaaaattgaagaaatggatccctctttcaaccttcatgaaaccattactaagctctcaggagaagtgattttgcaaattgccaacgaacctgttctgccctttaatgcacttgatatagctttagaagttcaaaacaaccttaaaggtgatcaacccaacactcatcaactgttagccatggcgttacgcctgcgggagagtgctgaactttttcagtctgatgagatgcgacctgctaatgatcccaaggagagagcacccatccgcatccggatgctgaatgacattctccaagacatggagaaaagctttctggtaaagcaggcaccaccaggtttttatagaaacatcctctaccaccttgatgaaaagacaagccggttttcaatacttatagaggcttgggaacactgcaaaccccttgcatcaaatgagacccttcaagaagccctgtcagaggtgttgaacagcattaattcagctcaggtttacttcaaagcaggacttgatgtgttcaagagtgtcttggatgggaagaattgagaaaactctgagcatttttaaaagtttgtttacaattccacaagcaaaagctctaatttaaccagattttctgacattgaaggcttattttccccaatggctttttgacaagtataaagctattattacattgtattttttaaatgtaaatatagaaagaacattttgcacatttaatatttttcttatatctacatttctgaatatgtaaagcaagttattgaaataggacttaagaattacctattaaaaagaaatctgatatataaaaatatgtactattttaaggaaaaatttccaagaagttctggactatctttgttcctatggggagggcatataggaacacagtttattctctctgatagagctattaatgacttagtttctgtaaaagaaatggagagttgatatggttcagattaacttcactattaagtgttcaatatgaagaattcaagtattctgactgagtgattggttgacctaaaccactttgaatgtttctattttatgaaatgaagtttctcttcttaacacaactagatgtagtaatacactggttatgaaattgtatttttttaagtattaatgaaaaaagagccataagcattccaggagaaaatctcaagggagctacatagagcaatttaaatgcaaatttttttcctaacaacttacaaggtgactagctttgaaacccctaatttgcctcagttgattttctaagaatttcaggagtgatgtatgtcttaagagggagaaaaaaatatttcttattactttttctcttgtttctgttggaaacactgaagcagggactctaaaatgaaagcatctcacattggttttctttcttgtatcttttctgaaactccttgctgtaaggcagctttctcagagtactatatattttcaacagtaaagtagcagagtttctctttgaaacccaaaatgtcttctaaagaatcaaatttctatttctgcctctgacaaaaagaacttactatgaaagaaatagttgttttatcaataaaagccccttaatattatgaagaaacttttcatattttttcttctttatccttaattgtgactaagatggaaatctagaaaatattcatgcttctaagtttctgcagtgttactgtaagagagtgtctcgtctacacttcagttcttctctcatgtggaaaactaagctttttatattgacattgccattgaatagctctagcaactattattattcccccaaaccctaaaattctacctattaggtgtcaggttaaagttctaatttatctttagaaatttatgtgaaaaatggttttcctatactggataaagcaattccccttaggaaacatagcctcagagtatttcatataaattttctctatctaattcaaacatatctccccatgatacaccgccagagtgacattgcagacagtctgtgtatgtttaaattttcactttttatggatgagcataaacctagtcttagtttaaaggcaaactaaagttgaggggaaataattaatcaatactgattaattgatttataaggttcaacactgtctaccctaaataatttttatatgctcaaggcaaagcagggaatagaggcaattagctagataattcaagcagaaatccattttcatcgaaattgcctgtgtgcacatatttttagatgaaaaatgaaactaccttacaatattatttttttaaccaatgtatttgtttgcaaacatttgccatgttgaagagtgtgtataggaaaggtctagaaataaataggcttgtgcatacctaggcattcatgctctttcttcctcttcagagatcatcagaaaagaggtgggaatacacaagcaggtgcatgtaagcccaaaagctagaaagccttatatttaaccaaaggttgatgtgttcattccagttattcacttacagatgaaactaaaacaaataaaggcaagctattatcagtttggtagttcattattttagaacaaatttctaaattaatttattcccataacctacaatagcactgagaacagaaaacatgtttcttcttcattttgtttaaagattgcgtacctaggtaagtcacactgtatagataaaaaccttcttctgtattcctcacctctaaattatatgttatttgctatttgaaaactgtagttaactatggttttttattagtctattaaaagatacgtggagatattaaattatacctaaagcagacgtccaacaaattctgtacatgctgctttacatctttgcaacaaacctcttaactagcagcattatttctatagtgtgattacctgagggtgcctccaaatgtatatcatttcactcccctcccctccccacccccaatagattcaaataaataaaatcctgagcaaattaa

SEQ ID NO: 219 - protein, 795 aa, Homo sapiens
MGENEASLPNTSLQGKKMAYQKVHADQRAPGHSQYLDNDDLQATALDLEWDMEKELEESGFDQFQLDGAENQNLGHSETIDLNLDSIQPATSPKGRFQRLQEESDYITHYTRSAPKSNRCNFCHVLKILCTATILFIFGILIGYYVHTNCPSDAPSSGTVDPQLYQEILKTIQAEDIKKSFRNLVQLYKNEDDMEISKKIKTQWTSLGLEDVQFVNYSVLLDLPGPSPSTVTLSSSGQCFHPNGQPCSEEARKDSSQDLLYSYAAYSAKGTLKAEVIDVSYGMADDLKRIRKIKNVTNQIALLKLGKLPLLYKLSSLEKAGFGGVLLYIDPCDLPKTVNPSHDTFMVSLNPGGDPSTPGYPSVDESFRQSRSNLTSLLVQPISAPLVAKLISSPKARTKNEACSSLELPNNEIRVVSMQVQTVTKLKTVTNVVGFVMGLTSPDRYIIVGSHHHTAHSYNGQEWASSTAIITAFIRALMSKVKRGWRPDRTIVFCSWGGTAFGNIGSYEWGEDFKKVLQKNVVAYISLHSPIRGNSSLYPVASPSLQQLVVEKNNFNCTRRAQCPETNISSIQIQGDADYFINHLGVPIVQFAYEDIKTLEGPSFLSEARFSTRATKIEEMDPSFNLHETITKLSGEVILQIANEPVLPFNALDIALEVQNNLKGDQPNTHQLLAMALRLRESAELFQSDEMRPANDPKERAPIRIRMLNDILQDMEKSFLVKQAPPGFYRNILYHLDEKTSRFSILIEAWEHCKPLASNETLQEALSEVLNSINSAQVYFKAGLDVFKSVLDGKN

SEQ ID NO: 220 - DNA, 2321 bp, Homo sapiens
atgaactggcaaagggaggaggacaagacagggggttctcatgcatatgcctaccgacttgaccatcgctgtgcaaatggtgttttcccagtcagaggtaccatcattgatggcatggaagattttgatggtctgatgtacgccttactgtttaaggcggaggctgggcggggtgggaatggggtgctggaggccggcctggggcacagcgcaggaggcagctacagtggctgcagcagcagcagcctgagtgccaggaggcggcagccgtggcagcggggcagtcggttgcatggtggcaggcacaggtgtaatggagaggtaacagagaagacctcctcccttcctagtcagggcattagcaagactgaatgcttcctgcccccaccagcagcgccagtgaacaccgcaggatggagcatggcagcgggcttacccagacccccagctctgaagagatcagtcctactaagtttcctggactgtaccgcactggccagccctcacgtccccatggcatcctccataagcctcctgatatagtgcctgatgatgagaaagaccatgggaagaaaaaaggaaaatttaagaaaaaggaaaagaggactgacggctatgcagcctttcaggaatatagctctggagatgaggcagaaagtccttccaaaatgaagaggctcaagggaatccatgttttcaagaagcccagcttttctaaaaagaaagagaaggattttaaaataaaacagaaacccaaagaagaaaagcataaagaagaaaagcacaaagaagaaaaacataaagagaagaagtcaaaagacctgacagaagctgatgttgttaaacagtggaaggaaaagaagaaaaagaaaaaccaattcaggagccagaggtgcctcagattgatgttccaaatctcaaacccatttttggaattcctttggctgatgcagtagagaggaccatgatgtatgatggcattcggctgccggccattttctgtgaatgtatagatcacttagagaagtatggcatgatgcgaaggcatctacagagtatcaggaattgaatcaaaggtggatgagctaaaagcagcctatgaccggaaggagtctaccaacttggaagaatatgagcttaacactgtagccagtttgctgaagcagtatttgtgagaccttccagagaatttggttaccaaagagcttatgccgagatttgaagaagcttgtgggaggaccacggagactgagaaagtgcaggaattccagcgtttactcaaagaactgccagaatgtaactatcttctgatttcttggctcattgtgcacatggaccatgtcattgcaaatgaactggaaacaaaaatgaataaacagaacatttctatagtgctcaacccaactgtgcagatcagcaattgagtcctgtatgtgtttttcacacatgcgcaagaactctttggaaatgttgtactaaagcaagcgacgaaacctctgcgatggtctaacatggccacgatgcccacgctgccagagacccaggcaggtatcaaggaggagatcaggagacagggttttcttttgaattgtttacatcgatatctgcagtgtgggataaaggatttatctaaagaagaaagattatggaaagtccaaagaattttgacagccctcaaaagaaaactgagagacgcttaaagacaggagtgtgaaaccaagattacacaaaagatagccagtcttttaaaagaggatgtttccaaagaagagatgaatgaaaatgaagaagttataaatattctccttgcttgggagaatgagatcctgactgaataggaggagctcctgaccatggagcagtttctatgccggcagacttcctcagaaaaagaagagatgggatgcctcagagccgagattgctgaaattcagagtcaccagcagcacggccgaagtgagactgaggagtactcctccgagagcgagagtgaggatgaggaggagctgcagattattctggaatatttacagagacagaacgaagagctggaaataaagagcaatcatttgaatcaagcagttcaagaggagcgcgaggtcatcatcgagctgcgcgtacagttccggctgctccagatggagggaaccaaggctgagcagcaggtgcaggaggaccaggagcctgagtggcgcggtggtgccgtccagtcgcccagagactgtgtcctcaggccaaaagaagctaaagagcagccaaaggcaggcaaagagccggtgaagccatcacccagcagggacaggaaggagacgtccatctga

SEQ ID NO: 221 - DNA, 5818 bp, Homo sapiens
gcagtgccgtagtagcgggccacggagatagacagctttggagctgctgaactccgagcacagggtgaagaccccggcgctaccaaccacagcctggcagcctggtctccgcggcacccactggggctgcatccccctcccccgagagggctgcgcaggcgggaagacgcccagaggccagcttcggtcccccttctgtctctcggttcctctttcctcccaagtaagggaataaaccgcgaagaaggagcgccccgggccaccgcgcaaccaagtgttgcctggtgaggaagagccaggacttctgaatttaccttgaatacagacaggaggatgttgcctaaggaatagcagagatcttgtctcatcttctgagaggtgcctgctgctgctgtatacacttgagtgctcccagaagtctcctgaaaggcttacatcgcaaacctgcaatgagccaggccctgggctgggcctccacttcagcctagtgaacaaaactccatcactgccctttagccactcacataaagtttaaaaatgggtgaagaacggtgggtctccctcactccagaagaatttgaccaactccagaaatattcagaatattcctccaagaagataaaagatgccttgactgaatttaatgagggtgggagcctcaaacaatatgacccacatgagccgattagctatgatgtcttcaagctgttcatgagggcgtacctggaggtggaccttccccagccactgagcactcacctcttcctggccttcagccagaagcccagacacgagacctctgaccacccgacggagggagccagcaacagtgaggccaacagcgcagatactaatatacagaatgcagataatgccaccaaagcagacgaggcctgtgcccctgatactgaatcaaatatggctgagaagcaagcaccagctgaagaccaagtggctgcgacccccctggaaccccccgtccctcggtcttcaagctcggaatccccagtggtatacctgaaggatgttgtgtgctacctgtccctgctggagacggggaggcctcaggataagctggagttcatgtttcgcctctatgattcagatgagaacggtctcctggaccaagcggagatggattgcattgtcaaccaaatgctgcatattgcccagtacctggagtgggatcccacagagctgaggcctatattgaaggagatgctgcaagggatggactacgaccgggacggctttgtgtctctacaggaatgggtccatggagggatgaccaccatcccattgctggtcctcctggggatggatgactctggctccaagggggatgggcggcacgcctggaccatgaagcacttcaagaaaccaacctactgcaacttctgccatatcatgctcatgggcgtccgcaagcaaggcctgtgctgcacttactgtaaatacactgtccacgaacgctgtgtgtccagaaacattcctggttgtgtcaaaacgtactcaaaagccaaaaggagtggtgaggtgatgcagcacgcatgggtggaagggaactcctccgtcaagtgtgaccggtgccacaaaagtatcaagtgctaccagagtgtcaccgcgcggcactgcgtgtggtgccggatgacgtttcaccgcaaatgtgaattatcaacgttgtgtgacggtggggaactcagagaccacatcttactgcccacctccatatgccccatcacccgggacaggccaggtgagaagtctgatggctgcgtgtccgccaagggcgaacttgtcatgcagtataagatcatccccaccccgggtacccaccccctgctggtcttggtgaaccccaagagtggagggagacaaggagaaagaattcttcggaaattccactatctgctcaaccccaaacaagttttcaacctggacaatggggggcctactccagggttgaactttttccgtgatactccagacttccgtgttttggcctgtggtggagatgggacagttggctggattttggattgcattgataaggccaactttgcaaagcatccaccagtggctgtcctgcctcttggaacaggaaatgaccttgcccgttgtctccgctggggaggaggttatgaagggggcagcttgacaaaaatcctgaaagacattgagcagagccccttggtgatgctggaccgctggcatctggaagtcatccccagagaggaagtggaaaacggggaccaggtcccatacagcatcatgaacaactatttctccattggtgtggacgcttccattgcacacagattccatgtgatgagagagaaacatcctgaaaaattcaacagcaggatgaagaacaagctgtggtactttgaatttggcacctcggagacttttgcagcgacctgcaagaaactccacgaccacattgagttggagtgtgatggggttggggtggacctgagcaacatcttcctggaaggcattgccattctcaacattcccagcatgtacggaggcaccaatctctggggagaaaacaagaagaaccgggctgtgatccgggaaagcaggaagggtgtcactgaccccaaagaactgaaattctgcgttcaagacctcagtgaccagctccttgaagtggtggggctagaaggagccatggagatggggcagatctacaccggcctgaagagtgcaggcaggaggctggcccagtgcgcctctgtcaccatcaggacaaacaagctgctgccaatgcaagtggatggagaaccctggatgcagccatgttgcacgattaaaattactcacaagaaccaagcgcccatgatgatggggcctccccagaagagcagcttcttctcgttgagaaggaagagccgttcaaaagactaaacagtgtgccaaacaccagctaaaccaagagagaaagcaagaaactataatgcacactcacacacaatttatgtgcacactcacacatgcacacacacacacacatacacactcttctctaaccagtggaagcaaagccacccttcgggaagaaaacgtcaccttgccatacattctgtttcaacagtgggtacacccctaacagagccagtgccaacaaaacattttgaatggacttagggcccatgaggttgtggctggcttaggcagcaacctccacattcccacaggccttgagcagaattttctgagactgaagggaaatccccctttctttctaccagccctgcaagtttcctcatggacgctcgcgaggagcaggctgcaggtttcctgcctatggtgagatcagatgtggccaagggaaggagctctggttccagagaatttgcacaaagttccctctgtacagagacaaaacggcctccggctctcagagcataatccttggcagggctcagcaggcgcacgttggtttcttggtcgtcctttgagtgacaacttctccgtgaacctgctgaagaggcagaaaggctgtggaaagctgtatttccattcttgggtttctgcgccgtcggtgggcacttgttattttccaggaaccttctcctggtgtctacatgtttgcttagaggcggctccaagagcccccagagctgcctgcatagcacaccttagatgtggtatttattttcttagttctgtgaacacctgggagggagagcggagaaactgggatttatttttcaaattggtgtcataatattgtgtaaaaagggaaggaaaaaaaaaaccacccccagcttctttctttttcaagccaaagcgtgtttcctgtttgagttccaagccctggtggcagactattcctgaaggcagaaaagatgggaaggaaggaactttgctggggaaaccaggagacggttccctcctgcttctttgcactcaccactcccagagtatgacctgaaggaccttctgatggtcttaacgtgtgtgcgcgcgtgtgtgtgtgtgtgtgcgtgtatatatatatatttagcctatatatttatatatatatatatataaatatttatttactgatggacttttcctcattggaaaaaaaaaacataggtagtatgagacagaaagtggtaaggaaaaagaaggttctcactcccccactccaccgtttcattgtcaggacgcatctccctgtggtgatcacaagggttaaggggaatgaaagtagctccctattatgaacgaagagaccgagaactcctattctggatcctcaaaacaagcatgaaagacctgctgggctggatttactctcccatttgtcagataagaaaattgagtctcagaaaagttcagagacttttccatggtgtcttggctaatgcagcttgagagtaggtgccgttacaaagatatttaatggagaaaagaacccacacatctcagagtagggtcatttctggtcactgaaaagtgagtccacttggatccaggttgccagggaggaacaaacgtacagcacatgcgtggatgggatatccccacacaagaaaacgagcgcctcatgctgcttcccagaggttctctctgacctgaatggaaaagaagttggtctgagatcgaaggtactaaacagatcatcagactgaactctccacatgtcacctcatcatggtcatcatagtctcttagtttggaaacaaccttggctgcagggatgacctcagtggagagtcacaagaaggactgaggcgtcttctgcaagatactgccagccaggacagaggggtctcagcagagctcagtgggcttcattcagcaagtgccagcattaccatcctttcccaagggcaaggccatgcagagcttcattgggcctccatccctctctgagatttatcagtggaaacttggacccacttgatatcgttccactgagctgcctctaatcttgcattggacaggagctttggacaaagaagggaatattaagattgtgtgtacaaatggcacttaactgtgaaggaccacctaggagcaagatcttggaccattctgctcaacctaacagtgcagaatgctaagtaaggggaaaaccaggccacctgaagaatatctttaatgatggtattcttggtgatgggaccaacaagctccagaattactacaggtactatcttggaagccacttgtttctgaaactgaggcaggttcaggtttggggtcactgattctaagacatttacagaagttcgtgcatgtgtttcagccatgatccccaagattgaggctattgagacatggcactatcaacaggtgaaattgattctcagagactcacaggtctcatgaaggggcagtgcagaaaatggcccttacctgctgcaccctagtgcacaggacttgcaatgttgcttgagagacatatcccaagtccttcttagaggcatggagtataacaacttcagtggaattgcacttccagtttggtaaccttagtaaatcttgtgttgttgtttaatcgtgccttgcaaatcatcctttaaacactatgactgtggtttcttgtggtggagtccctcatcatagtgaccctcatagcaacctctgaggttagcagagaaggtattattatctcgatctcaatgaggagaacaaggcttaatgaggtttagtgacttctcaaagccacatggttagtcaggggagaacctaatcccttatttcttatcttattctgattctggccatgctacaaacatgttctcacctgccccccatgcttctaccccaacagcaataaaaactgtaaagcaggaaaaaaaaaaaaaaaaaa

SEQ ID NO: 222 - protein, 791 aa, Homo sapiens
MGEERWVSLTPEEFDQLQKYSEYSSKKIKDALTEFNEGGSLKQYDPHEPISYDVFKLFMRAYLEVDLPQPLSTHLFLAFSQKPRHETSDHPTEGASNSEANSADTNIQNADNATKADEACAPDTESNMAEKQAPAEDQVAATPLEPPVPRSSSSESPVVYLKDVVCYLSLLETGRPQDKLEFMFRLYDSDENGLLDQAEMDCIVNQMLHIAQYLEWDPTELRPILKEMLQGMDYDRDGFVSLQEWVHGGMTTIPLLVLLGMDDSGSKGDGRHAWTMKHFKKPTYCNFCHIMLMGVRKQGLCCTYCKYTVHERCVSRNIPGCVKTYSKAKRSGEVMQHAWVEGNSSVKCDRCHKSIKCYQSVTARHCVWCRMTFHRKCELSTLCDGGELRDHILLPTSICPITRDRPGEKSDGCVSAKGELVMQYKIIPTPGTHPLLVLVNPKSGGRQGERILRKFHYLLNPKQVFNLDNGGPTPGLNFFRDTPDFRVLACGGDGTVGWILDCIDKANFAKHPPVAVLPLGTGNDLARCLRWGGGYEGGSLTKILKDIEQSPLVMLDRWHLEVIPREEVENGDQVPYSIMNNYFSIGVDASIAHRFHVMREKHPEKFNSRMKNKLWYFEFGTSETFAATCKKLHDHIELECDGVGVDLSNIFLEGIAILNIPSMYGGTNLWGENKKNRAVIRESRKGVTDPKELKFCVQDLSDQLLEVVGLEGAMEMGQIYTGLKSAGRRLAQCASVTIRTNKLLPMQVDGEPWMQPCCTIKITHKNQAPMMMGPPQKSSFFSLRRKSRSKD

SEQ ID NO: 223 - DNA, 3388 bp, Homo sapiens
tgcggcggcgctgcctggcgtgtgcgcaaggagcgggcgcggagccggcgggcgggcggaggatagcgcgggcgcggcacctgcgggcccgagggtctggctgtcgcagcgccgggccgccccgactccgagcggctgctgagatgagtgcagtgtcgcagccccaggctgctcccagcccgctggagaagtcgcccagcacggcgatcctgtgcaacacgtgtgggaatgtgtgcaagggcgaggtgctgcgggtgcaggacaagtacttccacatcaagtgcttcgtctgtaaagcatgtggctgcgacctggccgagggcggcttcttcgtgcggcagggcgagtacatctgcacgctggactaccagaggctctacggcacccgctgcttcagctgcgaccagttcattgagggtgaggtggtgtcggcgctgggcaagacctaccaccccgactgcttcgtgtgtgccgtctgccggctgcccttcccccccggggaccgagtgaccttcaacgggaaggaatgcatgtgccagaagtgttccctgcccgtatcggtgggcagcagcgcgcacctgtcccagggcctccgaagttgtgggggctgcggcacagaaatcaagaatggccaggccctggtagccttggacaagcactggcacttgggctgttttaagtgcaagagctgtgggaagctcctgaatgccgagtacatcagcaaggatgggctgccctactgcgaagctgactatcacgccaagttcggcatccgctgtgacagctgtgagaaatacatcacggggcgcgtgctggaggccggagagaagcactaccacccttcctgcgcgctatgtgtcaggtgcggccagatgtttgcagaaggcgaagagatgtatcttcaaggttcctccatctggcatccggcgtgtcgacaagcagccagaactgaagacagaaacaaggaaaccagaacttcctcagagagcatcatttctgtccctgcttccagcacctcagggtctccgagccgtgtgatttatgccaagcttggtggtgagatcctggactacagggacttggcagcccttcctaaaagtaaggccatctatgacatcgaccgccccgacatgatctcctactcaccctacatcagccactctgcaggggacaggcagagctacggcgagggggatcaggatgaccggtcctacaagcagtgtcggacctccagcccaagctccactgggtcggttagcctcgggcgctacactccgacctcacggtcaccacagcactacagccgtccagctgccaggcgatcggatggggaggatggaagcttggaccaggataacaggaagcagaagagcagctggctgatgctcaagggggatgcagacacaaggaccaattctccagacctggacacccagtccttgtcccacagcagcgggaccgacagagaccctctccaaaggatggcaggggacagctttcactcacaatacaagatctatccgtatgactccctcatcgtcacaaaccgaattcgcgtgaaactgcccaaagacgtggaccggacgagactggagagacacttgtcgcccgaggagttccaggaagtgtttgggatgagcatcgaggagtttgaccgcctggccctctggaagaggaatgaccttaagaagaaagcccttttgttctgacggctgccagcctgccccactggtgtgtgccgggcgccgaggccaggggcccctggcgagaaccgcacacacccctcccacacaccttgctctggcttctctgtgtccatggggtgggcgggagggggtcccccagcaggtgcggcccctgcacctgccggcgacactcctgccggtagtttagggccgagacggctagcttcacgccacccttccccgctgtggcttggtgtcagggagaggctgtagagtggctgtgtcgggcatcagatggagcacacaggtggctgcagcccagcccaccttcccagcgttctcgaggtgccctggccccggtgctgggcacgtgggggacagaggtggccgggacgtgagctgtgaggcttgttgatgatggttgctgacaccatcatcgggggtgggcacacggcccttcggagcctgggcagcctggcctcacaggcagactcgcagacggggcagtgagcgtctgggacagtgccaagagtggggtgtgtgatttttgcaggcgtctgtgatgggtctctttagggacaaatgtcaacaagggacaagacagggcaccttccgccagcgcccctccatgcgctgcgttcctcctccagatcgacccctagatgcctacacaatatctttaaagtaacacagaagtttttattttattaaaaagtatagcctacttaaacgcgagatgacatatatagagtttaattttacggtccctccgcaggggagcggcctccagccttattctccaccgctcggatctgtgtggtttcagtctgttcttggtgtggtcctcatacacagagctccctgtctagtttcttttctttttcttttttctttttctcgtcacacaggtaaccttaaagacagacccctctaaagaacgctttgtaaatacatgtgaggtatagccaccactgttttccttgctgttatttttccaagtcttggggagaaaacatcctcctctgatggccaaagccctggaatcaagggtttccacgtaccctgcctaatacccgacgtagctcttgatgcaccgtccttgtgctgtggctggcggtgtctcagcctgaaacataaaccccacatgccccaggagcgatgtgctccctgaaacagacaaccacacgctgttggggagagaaggatggagataggatggagataggatggagatgtggctcttctcatctttgaagccagcagggcatcccggagcaggaggctggccgggctccccaagcgaaggcgttggtgtctgtcattaggtgtgtgttagggtgcagcaccggccgtcacaggatgctgataagcgcgctgagaggtggatgaaacaccaaagtctgtttccccgtccgcagtgggtgttgcctctttgtgtgtgtcccgatgttcctgcctgtgagtcggccttactccgtttccttagcgcccatgacacgccaagtcccgtttcgcactcggcttctcacccgcccagctcggctagggagggggagtttttagcacctaatatgcttcctgccattgcgcaatctgagcctgagcaactggaaacccccatttctcattagtgcaatgtcatatctgatcccaggaagcctggaaaataaaagacgatgcattataacttgcggaagtacaag

SEQ ID NO: 224 - protein, 521 aa, Homo sapiens
MSAVSQPQAAPSPLEKSPSTAILCNTCGNVCKGEVLRVQDKYFHIKCFVCKACGCDLAEGGFFVRQGEYICTLDYQRLYGTRCFSCDQFIEGEVVSALGKTYHPDCFVCAVCRLPFPPGDRVTFNGKECMCQKCSLPVSVGSSAHLSQGLRSCGGCGTEIKNGQALVALDKHWHLGCFKCKSCGKLLNAEYISKDGLPYCEADYHAKFGIRCDSCEKYITGRVLEAGEKHYHPSCALCVRCGQMFAEGEEMYLQGSSIWHPACRQAARTEDRNKETRTSSESIISVPASSTSGSPSRVIYAKLGGEILDYRDLAALPKSKAIYDIDRPDMISYSPYISHSAGDRQSYGEGDQDDRSYKQCRTSSPSSTGSVSLGRYTPTSRSPQHYSRPAARRSDGEDGSLDQDNRKQKSSWLMLKGDADTRTNSPDLDTQSLSHSSGTDRDPLQRMAGDSFHSQYKIYPYDSLIVTNRIRVKLPKDVDRTRLERHLSPEEFQEVFGMSIEEFDRLALWKRNDLKKKALLF

SEQ ID NO: 225 - DNA, 2240 bp, Homo sapiens
acttccccgccctcgccccaaaggagcagcagctccttcttgcctctccattgccgccgccgcaccggcggagctcctctctcgcgcgtctctcctccgatggagctcgggcgccgccgacgccgccgctgccccgaaccctgagcggggccgccccggtcggaggaacgcgccgcccagtccgagggcgcagagcgccaggagcacgcggagggctggggcgcgggctccgggaacgagaaagtgcagctctctcgggtcactgggccggcggcggggggactatggctctgaaggacacgggcagcggcggcagcaccatcctgcccattagcgagatggtttcctcgtccagctcgcccggcgcgtcggccgccgccgccccggggccctgcgcaccctcgcccttccctgaagtagtggagctgaacgtaggcggccaggtttatgtgaccaagcactcgacgctgctcagcgtcccggacagtactttggccagcatgttctcgccctctagtccccgtggcggcgcccggcgccggggcgagctgcccagggacagccgggcgcgcttcttcatcgaccgggacggcttccttttcaggtacgtgctggattatctgcgggacaagcaactcgcgctgccggagcacttccccgagaaggagcggctgctgcgcgaggccgagtatttccagctcaccgacttggtcaagctgctgtcgcccaaggtcaccaagcagaactctctcaacgacgagggctgccagagcgacctggaggacaacgtctcgcagggtagcagcgacgcgctgctgctgcgcggggcggcggccgccgtgccctcgggcccgggagcgcacggtggtggcggcggcggcggcgcgcaggacaagcgctcgggcttcctcacgctgggctaccggggctcctacaccaccgtgcgcgacaaccaggccgacgccaaattccggcgtgtggcgcgcatcatggtgtgcgggcgcatcgcgctggccaaggaggtcttcggggacacgctcaacgagagccgcgaccccgaccggcagccggagaagtacacgtcccgcttctacctcaagttcacctacttggagcaggcctttgatcgcctgtccgaggccggcttccacatggtggcgtgtaactcctcgggcaccgccgccttcgtcaaccagtaccgcgacgacaagatctggagcagctacaccgagtacattttcttccgaccacctcagaaaatagtatcacctaaacaagaacatgaagataggaaacatgacaaagtcactgataaaggaagtgaaagtgggacttcctgtaatgagctctccacttccagttgtgacagccattcagaggcaagcactccccaggacaacccatccagtgcccagcaggcaacagctcaccaacctaacactttaacattggatcgcccctctaaaaaagcacctgtacaatggatacccccaccagacaaacgcagaaacagtgaactctttcagaccctcatcagcaagtcccgggaaacaaatctgtccaaaaagaaagtctgtgagaagctaagtgtggaagaagaaatgaaaaagtgtattcaggattttaaaaaaatccacattccagattattttccagagcgcaaacgccaatggcaatctgaactgttgcagaagtatgggttatagtaattgtcacattcctgcagtattttgatgacattcaatgtttactacagtgtcaccacctgactgatgtcctaacaatggtcagtgtgattcttgctgctcttccttgttgtgaacagtggatgtgggacagtattttcttttatgttttagttgttgttctttttagaaacatgattaaaaaggaaaaaatattaaatcaataagtgttaaatcaaaatggaatatctgattcaaaccattttacaagaatgaaagtaaaatgtgcatgatcaagcttagtatcttggtttttgaactctggtcaactggatatgtttgtcattttgtaacttaccaaaaacaaaccatcatatcataccaactaaaatgatatatggatgaagcaacatcaagtaaaattttagacgatggctataggacccaaatctaaagctgtctaaatgttaattcaatgaaacaagtattatttttgcatgaatacaatgttacaaataaatcacaagaaatagggaagatctgtttgttgcttgg

SEQ ID NO: 226 - protein, 473 aa, Homo sapiens
MALKDTGSGGSTILPISEMVSSSSSPGASAAAAPGPCAPSPFPEVVELNVGGQVYVTKHSTLLSVPDSTLASMFSPSSPRGGARRRGELPRDSRARFFIDRDGFLFRYVLDYLRDKQLALPEHFPEKERLLREAEYFQLTDLVKLLSPKVTKQNSLNDEGCQSDLEDNVSQGSSDALLLRGAAAAVPSGPGAHGGGGGGGAQDKRSGFLTLGYRGSYTTVRDNQADAKFRRVARIMVCGRIALAKEVFGDTLNESRDPDRQPEKYTSRFYLKFTYLEQAFDRLSEAGFHMVACNSSGTAAFVNQYRDDKIWSSYTEYIFFRPPQKIVSPKQEHEDRKHDKVTDKGSESGTSCNELSTSSCDSHSEASTPQDNPSSAQQATAHQPNTLTLDRPSKKAPVQWIPPPDKRRNSELFQTLISKSRETNLSKKKVCEKLSVEEEMKKCIQDFKKIHIPDYFPERKRQWQSELLQKYGL

SEQ ID NO: 227 - DNA, 6769 bp, Homo sapiens
aattctgctgggagtcgcatcctacctgtttgggaggtgcactgcctttccacactctcccttctgtactcagccagctgctgctgaggtgggaggaaaagtcctggctgggagaattgagctagtgcagcacacgtaaaaaagcgattccgatgggtcctttgaaagcttttctcttctccccttttcttctgcggagtcaaagtagaggggtgaggttggtcttcttgttactgaccctgcatttgggaaactgtgttgataaggcagatgatgaagatgatgaggatttaacggtgaacaaaacctgggtcttggccccaaaaattcatgaaggagatatcacacaaattctgaattcattgcttcaaggctatgacaataaacttcgtccagatataggagtgaggcccacagtaattgaaactgatgtttatgtaaacagcattggaccagttgatccaattaatatggaatatacaatagatataatttttgcccaaacctggtttgacagtcgtttaaaattcaatagtaccatgaaagtgcttatgcttaacagtaatatggttggaaaaatttggattcctgacactttcttcagaaactcaagaaaatctgatgctcactggataacaactcctaatcgtctgcttcgaatttggaatgatggacgagttctgtatactctaagattgacaattaatgcagaatgttatcttcagcttcataactttcccatggatgaacattcctgtccactggaattttcaagctatggataccctaaaaatgaaattgagtataagtggaaaaagccctccgtagaagtggctgatcctaaatactggagattatatcagtttgcatttgtagggttacggaactcaactgaaatcactcacacgatctctggggattatgttatcatgacaattttttttgacctgagcagaagaatgggatatttcactattcagacctacattccatgcattctgacagttgttctttcttgggtgtctttttggatcaataaagatgcagtgcctgcaagaacatcgttgggtatcactacagttctgactatgacaaccctgagtacaattgccaggaagtctttacctaaggtttcttatgtgactgcgatggatctctttgtttctgtttgtttcatttttgtttttgcagccttgatggaatatggaaccttgcattattttaccagcaaccaaaaaggaaagactgctactaaagacagaaagctaaaaaataaagcctcgatgactcctggtctccatcctggatccactctgattccaatgaataatatttctgtgccgcaagaagatgattatgggtatcagtgtttggagggcaaagattgtgccagcttcttctgttgctttgaagactgcagaacaggatcttggagggaaggaaggatacacatacgcattgccaaaattgactcttattctagaatatttttcccaaccgcttttgccctgttcaacttggtttattgggttggctatctttacttataaaatctacttcataagcaaaaatcaaaagaagtctgactaaattcagtagaatcttttgtgcttcagtaacttgaagtttaaatttaaaatgcagagagaccaatggttaaaatgtgaatagtattgtaactattttaaggccttcagaagtaaataaagtagcagctttcaggctaatttacgtgaaactgattagttgcaaaatccagtaggttaaaatactcacatatttttacttaaattttctttaatttacttatatgttattataattttgaatttttaagttctatgattcatgttttaaagatggaataattttaatacatattttgtttaaatataatctataattgttttgtaatgtaagactaattactaatatttatgtagcaacttttgtgccagaaaaaagactgttaatttgttttttcttgcttttcatttgattaccctgcttgaaatacagttagttgataacataaagccatagttttcttggattttcttccaagatattgtattcccaagaagaaattgatttatttttaaactatcagttactgaagacttatgaaaaggtcaatttttacctgtcttttaatccagtccattttctgacacaatattaaacagaacgccagttgcatttactttggtgatttgcaaacttggaatgaagccaccagtcattttttaagaatgcaagatgaaaaaatcaggtaaaatctaaccattttattctctgcttcatagcatttataatgtatgatgaggttaacactgaaatattaaaatctgcaaatgcacattaatgcaaattaaatgcagagagaaatgattatttttttctttatgttttatgaaagtgttgcagtccctaaaataaaaatattgaggaacattgcttgtatttactcacgtggttaaaaaattattacctggcaaactgagttgccggtcatattgaggacaaaatcttaaatatgtgctattagcattgtttttagactagtaatatgcagaaaacagttttaggcctgcgttacatattgcctcttccagctccaaagttttggaccctgtcagttttgcaactacattatacattattataatattcttttttttttctagaaactgggggcagcctcaaaatcatgttaaagagggagttttgttagaggcatctttaatgaacatgaatgtgagtgctctctaaattcttagcatctcactggatgtaaaatctatcagttaatagttttaaaaatgtctcttttgttaagaataaatttaggcttcaatcattataatcctgtaagtagcttgacataccaattgtttataagattcatcacataaatttctggagaaccaccaggtttagcttggaaataacctttaaagattgtttctgttgccaagaccaatgaccatgatgaagagttttatgatcacagcctatcttacttaaggtttgagaggaaacctgtcacctctgcaattgttactctagtttttaatgttataattccgctgcgtggttagtgaatgtctggcatgattatacacgtgtattggaaatatctagttttttaaatttttaattaatttatttataatttactgtgtgttcccagctaactctattttttttttcacttgctcataaacttctggaaaaaaataagcatgaatcaaatggtaatgcccaatatccaccgacactgcttttcttgaatgaacagccaaactaaactttggccatctatatattcatttacagattattcatacattcattttaataacattgagtactgatggatgttttgaaagtgagcattcatttaaggataaataaaaaataaagtagtaataaagaataaaatactttactaaaatattgtatggctattttcatgtttgaagctatagcttactatcatgagacagttttgattttgggactctttcaagtgtatctgagcatgactgtattttaaaatacttaaaagtgcttgatataaatagcttttccttctgaaccacgttctatgtaaaagaaaaaaaatagctttgattttctcactggtgtttcattaacttggttttaaatgttgacaatatttacaagtggaaataaaatttgtaaatatatgaaagatgcctttccttgtatataccatcaagcaagcactttgttttcaaagcaagtggtattttgatcagttttatttaaatgtgtgatcagaaagaatggcgtacaaatcttattatttctaaaaataagaataaaaaggtaaaactacatttagacttctttctcaagaaatcaaatacagctttttttcaaagctgattcagttcatttcctgttcctctattccaagtataagtttcaccaccttgagaaataatttttttaaaaaatcttcctctttctctggggagttatataataatttattgaatttattggaacttgattttcctggatgctttcaatgtttttaatgctaacatagaccccaaaattagatataaagaattgggaaggatacctggagcacaaggaataagatcatttgtaaaaatgtttgtttatatagacctatcctctaaatatgtgacaaggatctagaaattctgagaggggaaaatgtgattttggatttacaatgacagggtaatattttatttatcttcgaattccatggacaaaattaggctcacttaaattaatttttgtaaacccaagtaagttctaaaaaaaagtaaaaaatacatagaatacttgagaatttagcagggacagggaaaaatttcccagtaagtctgaagtcttgatgtaagtgggaattagataactaattggaggcattttattttaagttaaagacagatttctttaataagtttttaaaattgatcaactttaaattaagcacagtaaatgtgtataaatatgaaggcaatcataaggattttttcacttgtgtttccatattctggcattagtatatcatcataaaatagacaatgtttttgtctcaagaacaagaataaaattgaaatctgcattcatgccaattcagcataaaaaagaataggctacagttctctcacaccaagggccccatagttataaatgtgaaattatattccaggtcaaaatttgtgaaaaatacacaaaacactttgattttacaagagaggagctttaaataagatgattttagtagattgaaataaataaccagtatttaagtaaatgtataacgaatgaataaatacatgcataatattttcaaagttctataccagtacctatttttactcttacaaaatttcctgtaaaaaaatactacatttgaaattatttcattggttttagaactggcattgaaggtacccagtagactcttaagcctttactgcttgtctcactagaaacatttatttctgacctaccaagttttcttcacatcatcaaatttattcagcttctcagtgctgtaccgtatgatggcaagacatacttggtatttccatttttgttggtcattctttattgctttttactgctaggaaggtcttgccaggcttctatacagttacaaaaaccattaccaaactttatcaaggactttccaaatggagttttcaaatactattgaccacattgctctagttaatgtaaggtcagctctgactttttgtgtttgcatttcggaagtgaggtaacctcattcaaatatatatgcagcactttctgtgtacaaagtactgttctaaatacaaaagggaatataaagatgactttcaaggaacatataatgtagtcagaaagatgagaggattagttatacaatttaaggaagggaggataactttgggaaggttttgtggaggatatgtgtttagagatgcgagctggggattcaacaggtaagagggagagagatcacaatttccaactgggtaaacagcttgaaaaaagaaacagaagcctgggcacaaatgaaaattccatattaattggaagttaagattcatatagagacaatgaaaggttaggttagaacaataaactgagaagtacgaatgtggacttcaggaggctaggggaaattacgaagtcataaaaagttcacagagatacttgagtacaaaagatacattattaaaatttctgcagaagtttcatcttatttgtgtgtgatggtttggaatataacaagccagttaggcgtataagcttatagtggctaatatgaggatgaaatccgtactcttgtgacacaagtcttcagcggagatgggggatgataggcccaaatagaaagaaaagtggcagacattaagctttgactaacagacaacataactgagagacatggtgtgttgggtggaagggatcctgtagtagatacttgcttgcatgtagatgggtacaaagacaccataaggaaattctgaatgtaatacaaaggcttatttttcctgttgatttatctttttcacacataaaagatgaagaaaaaaataatctgaaatgtaaatcctaaagtgatctgtctagattcttattttttgaaaaatgttcctcactaaaagagttttctattcaaataaccatttccagttttctaactgagacatacatacatatatatatgtataaaattatatatatatttggacaaagagaataagagaattgcaggtagaaatagtctactgtgtgtagacaaatccagaaagttgatttctgttcctcaaacaatttctgaaatatttatgtcagaataaataaaagaattgttattgttggacaatgaaacatacctggaccctttgagtgtgtgaatagtaaaggctgtgataactgaaatgcagctaagcaaaaagggctaattagaagacttttgagacatgatttacctaaatggaaatagtttggttttcaatccttcactgtaataacaattatttgcatctattaagtgtttgtagtcactttgtataataaagttttatggcttgtgattataatggcttctgttattctgctactgcctcattgttttgaggaacatttgtaattttgtggcaaaggtgtctcaatttttcagtgttctttactctcatgatccttagaacaaaaaaaataccagtaacttgttataaataaagagtcacattctcttaaa

SEQ ID NO: 228 - protein, 465 aa, Homo sapiens
MGPLKAFLFSPFLLRSQSRGVRLVFLLLTLHLGNCVDKADDEDDEDLTVNKTWVLAPKIHEGDITQILNSLLQGYDNKLRPDIGVRPTVIETDVYVNSIGPVDPINMEYTIDIIFAQTWFDSRLKFNSTMKVLMLNSNMVGKIWIPDTFFRNSRKSDAHWITTPNRLLRIWNDGRVLYTLRLTINAECYLQLHNFPMDEHSCPLEFSSYGYPKNEIEYKWKKPSVEVADPKYWRLYQFAFVGLRNSTEITHTISGDYVIMTIFFDLSRRMGYFTIQTYIPCILTVVLSWVSFWINKDAVPARTSLGITTVLTMTTLSTIARKSLPKVSYVTAMDLFVSVCFIFVFAALMEYGTLHYFTSNQKGKTATKDRKLKNKASMTPGLHPGSTLIPMNNISVPQEDDYGYQCLEGKDCASFFCCFEDCRTGSWREGRIHIRIAKIDSYSRIFFPTAFALFNLVYWVGYLYL

SEQ ID NO: 229 - DNA, 2189 bp, Homo sapiens
cctagcgctcctctccggcttccaccagcccatcgctccacgctctcttggctgctgcagtctcggtctctctctctctctctctctctctctctctctctctctctctctctctctctctctctctctctctctcccaagtttcctatctcgtcaagatcagggcaaaagaagaaaacaccgaattctgcttgccgtttcagagcggcggtgatgaagacaaaattgaacatctacaacatcgagttcctgctttttgttttcttggtgtgggaccctgccaggttggtgctggctaacatccaagaagatgaggctaaaaataacattaccatctttacgagaattcttgacagacttctggatggttacgataatcggcttagaccaggactgggagacagtattactgaagtcttcactaacatctacgtgaccagttttggccctgtctcagatacagatatggaatatacaattgatgttttctttcgacaaaaatggaaagatgaacgtttaaaatttaaaggtcctatgaatatccttcgactaaacaatttaatggctagcaaaatctggactccagataccttttttcacaatgggaagaaatcagtagctcataatatgacaatgccaaataagttgcttcgaattcaggatgatgggactctgctgtataccatgaggcttacagttcaagctgaatgcccaatgcacttggaggatttcccaatggatgctcattcatgtcctctgaaatttggcagctatgcatatacaacttcagaggtcacttatatttggacttacaatgcatctgattcagtacaggttgctcctgatggctctaggttaaatcaatatgacctgctgggccaatcaatcggaaaggagacaattaaatccagtacaggtgaatatactgtaatgacagctcatttccacctgaaaagaaaaattgggtattttgtgattcaaacctatctgccttgcatcatgactgtcattctctcccaagtttcattctggcttaacagagaatctgtgcctgcaagaactgtgtttggagtaacaactgtcctaacaatgacaactctaagcatcagtgctcggaattctctccccaaagtggcttatgcaactgccatggactggtttattgctgtttgttatgcatttgtgttctctgccctaattgaatttgcaactgttaattacttcaccaaaagaggatggacttgggatgggaagagtgtagtaaatgacaagaaaaaagaaaaggcttccgttatgatacagaacaacgcttatgcagtggctgttgccaattatgccccgaatctttcaaaagatccagttctctccaccatctccaagagtgcaaccacgccagaacccaacaagaagccagaaaacaagccagctgaagcaaagaaaactttcaacagtgttagcaaaattgacagaatgtccagaatagtttttccagttttgtttggtacctttaatttagtttactgggctacatatttaaacagagaacctgtattaggggtcagtccttgaattgagacccatgttatctttgggatgtatagcaacattaaatttggtttgttttgctatgtacagtctgactaataactgctaatttgtgatccaacatgtacagtatgtatatagtgacatagcttaccagtagacctttaatggagacatgcatttgctaactcatggaactgcagacagaaagcactccatgcgaaaacagccattgccttttttaaagatttaccctaggacctgatttaaagtgaatttcaagtgacctgattaatttcctattcttccaaatgagatgaaaatggggatcctgtacaaccctttgtggacccttttggtttagctcttaagtaggggtattttctactgttgcttaattatgatggaagataacattgtcattcctagatgaatcctttgaagtaacaaacattgtatctgacatcagctctgttcatgagtgctcagagtccctgctaatgtaattggaagcttggtacacataagaaaaactagagatttgaaatctagctatgaattactctatatagtatctatagccatgtacatattacagcatgacaagctcgaaataattatgagtcagcccgaaagatgttaat

SEQ ID NO: 230 - protein, 451 aa, Homo sapiens
MKTKLNIYNIEFLLFVFLVWDPARLVLANIQEDEAKNNITIFTRILDRLLDGYDNRLRPGLGDSITEVFTNIYVTSFGPVSDTDMEYTIDVFFRQKWKDERLKFKGPMNILRLNNLMASKIWTPDTFFHNGKKSVAHNMTMPNKLLRIQDDGTLLYTMRLTVQAECPMHLEDFPMDAHSCPLKFGSYAYTTSEVTYIWTYNASDSVQVAPDGSRLNQYDLLGQSIGKETIKSSTGEYTVMTAHFHLKRKIGYFVIQTYLPCIMTVILSQVSFWLNRESVPARTVFGVTTVLTMTTLSISARNSLPKVAYATAMDWFIAVCYAFVFSALIEFATVNYFTKRGWTWDGKSVVNDKKKEKASVMIQNNAYAVAVANYAPNLSKDPVLSTISKSATTPEPNKKPENKPAEAKKTFNSVSKIDRMSRIVFPVLFGTFNLVYWATYLNREPVLGVSP

SEQ ID NO: 231 - DNA, 566 bp, Homo sapiens
tccaggctgtaaaacggaaaggttcggaatttgcctctgcgccgtctttttttgcctgttacctgtgacgtccttggaagcagaatctgaaactttctgaggagagcatttgagcttcagatttctaacagcctctttgcaacaaaatagaccagtagctgaaggcaactgcaatccttcatgatgtttcccttggccagaaatgcactaagcagtctcaagattcaaagcattctgcaaagcatggcaagacatagccatgtaaaacactcaccagattttcatgataaatatggtaatgctgtgctagccagtggaactgctttctgtgttgctacatgggtgtttacagccactcagattggaatagaatggaacctatcccctgttggcagagttaccccaaaagagtggaaacatcagtaaccatcacagttgctgtaatgacagaattgtttaaaaaaccaacttgtcatgtaagcactctactgcttattaaaatatagcacaattgaaaaaataaaatgtgttttaaatctttaaaaaaaaaaaaaaaaaaaaaaaaa

SEQ ID NO: 232 - protein, 81 aa, Homo sapiens
MMFPLARNALSSLKIQSILQSMARHSHVKHSPDFHDKYGNAVLASGTAFCVATWVFTATQIGIEWNLSPVGRVTPKEWKHQ

SEQ ID NO: 233 - DNA, 1634 bp, Homo sapiens
gggtggggaagcttagagaccggtgagggagcagagctggggcgcctgtgtacagggatagagcccggcggcagcagggcgcggcttccctttcccggggcctggggccgcaatcaggtggagtcgagaggccggaggaggggcaggaggaaggggtgcggtcgcgatccggacccggagccagcgcggagcacctgcgcccgcggctgacaccttcgctcgcagtttgttcgcagtttactcgcacaccagtttcccccaccgcgctttggattagtgtgatctcagctcaaggcaaaggtgggatatcatggcatctatctgggttggacaccgaggaacagtaagagattatccagactttagcccatcagtggatgctgaagctattcagaaagcaatcagaggaattggaactgatgagaaaatgctcatcagcattctgactgagaggtcaaatgcacagcggcagctgattgttaaggaatatcaagcagcatatggaaaggagctgaaagatgacttgaagggtgatctctctggccactttgagcatctcatggtggccctagtgactccaccagcagtctttgatgcaaagcagctaaagaaatccatgaagggcgcgggaacaaacgaagatgccttgattgaaatcttaactaccaggacaagcaggcaaatgaaggatatctctcaagcctattatacagtatacaagaagagtcttggagatgacattagttccgaaacatctggtgacttccggaaagctctgttgactttggcagatggcagaagagatgaaagtctgaaagtggatgagcatctggccaaacaagatgcccagattctctataaagctggtgagaacagatggggcacggatgaagacaaattcactgagatcctgtgtttaaggagctttcctcaattaaaactaacatttgatgaatacagaaatatcagccaaaaggacattgtggacagcataaaaggagaattatctgggcattttgaagacttactgttggccatagttaattgtgtgaggaacacgccggcctttttagccgaaagactgcatcgagccttgaagggtattggaactgatgagtttactctgaaccgaataatggtgtccagatcagaaattgaccttttggacattcgaacagagttcaagaagcattatggctattccctatattcagcaattaaatcggatacttctggagactatgaaatcacactcttaaaaatctgtggtggagatgactgaaccaagaagataatctccaaaggtccacgatgggctttcccaacagctccaccttacttcttctcatactatttaagagaacaagcaaatataaacagcaacttgtgttcctaacaggaattttcattgttctataacaacaacaacaaaagcgattattattttagagcatctcatttataatgtagcagctcataaatgaaattgaaaatggtattaaagatctgcaactactatccaacttatatttctgctttcaaagttaagaatctttatagttctactccattaaatataaagcaagataataaaaattgttgcttttgttaaaagtaaaaaaaaaaaaaaaaaa

SEQ ID NO: 234 - protein, 323 aa, Homo sapiens
MASIWVGHRGTVRDYPDFSPSVDAEAIQKAIRGIGTDEKMLISILTERSNAQRQLIVKEYQAAYGKELKDDLKGDLSGHFEHLMVALVTPPAVFDAKQLKKSMKGAGTNEDALIEILTTRTSRQMKDISQAYYTVYKKSLGDDISSETSGDFRKALLTLADGRRDESLKVDEHLAKQDAQILYKAGENRWGTDEDKFTEILCLRSFPQLKLTFDEYRNISQKDIVDSIKGELSGHFEDLLLAIVNCVRNTPAFLAERLHRALKGIGTDEFTLNRIMVSRSEIDLLDIRTEFKKHYGYSLYSAIKSDTSGDYEITLLKICGGDD

SEQ ID NO: 235 - DNA, 2681 bp, Homo sapiens
cggggcccaggctgtgcgcttggggagcgcggaatgtgaggcttggcgggccgcagcacgctcggacgggccaggggcggcgacccctcgcggacgcccggctgcgcgccgggccggggacttgcccttgcacgctccctgcgccctccagctcgccggcgggaccatgaagaagttctctcggatgcccaagtcggagggcggcagcggcggcggagcggcgggtggcggggctggcggggccggggccggggccggctgcggctccggcggctcgtccgtgggggtccgggtgttcgcggtcggccgccaccaggtcaccctggaagagtcgctggccgaaggtggattctccacagttttcctcgtgcgtactcacggtggaatccgatgtgcattgaagcgaatgtatgtcaataacatgccagacctcaatgtttgtaaaagggaaattacaattatgaaagagctatctggtcacaaaaatattgtgggctatttggactgtgctgttaattcaattagtgataatgtatgggaagtccttatcttaatggaatattgtcgagctggacaggtagtgaatcaaatgaataagaagctacagacgggttttacagaaccagaagtgttacagatattctgtgatacctgtgaagctgttgcaaggttgcatcagtgtaagactccaataattcaccgggatctgaaggtagaaaatattttgttgaatgatggtgggaactatgtactttgtgactttggcagtgccactaataaatttcttaatcctcaaaaagatggagttaatgtagtagaagaagaaattaaaaagtatacaactctgtcatacagagcccctgaaatgatcaacctttatggagggaaacccatcaccaccaaggctgatatctgggcactgggatgtctactctataaactttgtttcttcactcttccttttggtgagagtcaggttgctatctgtgatggcaacttcaccatcccagacaattctcgttactcccgtaacatacattgcttaataaggttcatgcttgaaccagatccggaacatagacctgatatatttcaagtgtcatattttgcatttaaatttgccaaaaaggattgtccagtctccaacatcaataattcttctattccttcagctcttcctgaaccgatgactgctagtgaagcagctgctaggaaaagccaaataaaagccagaataacagataccattggaccaacagaaacctcaattgcaccaagacaaagaccaaaggccaactctgctactactgccactcccagtgtgctgaccattcaaagttcagcaacacctgttaaagtccttgctcctggtgaattcggtaaccatagaccaaaaggggcactaagacctggaaatggccctgaaattttattgggtcagggacctcctcagcagccgccacagcagcatagagtactccagcaactacagcagggagattggagattacagcaactccatttacagcatcgtcatcctcaccagcagcagcagcagcagcagcagcaacagcaacagcagcagcagcaacagcaacagcagcagcagcagcagcagcagcagcaccaccaccaccaccaccaccacctacttcaagatgcttatatgcagcagtatcaacatgcaacacagcagcaacagatgcttcaacaacaatttttaatgcattcggtatatcaaccacaaccttctgcatcacagtatcctacaatgatgccgcagtatcagcaggctttctttcaacagcagatgctagctcaacatcagccgtctcaacaacaggcatcacctgaatatcttacctcccctcaagagttctcaccagccttagtttcctacacttcatcacttccagctcaggttggaaccataatggactcctcctatagtgccaataggtcagttgctgataaagaggccattgcaaatttcacaaatcagaagaacatcagcaatccacctgatatgtcagggtggaatccttttggagaggataatttctctaagttaacagaagaggaactattggacagagaatttgaccttctaagatcaagtaagggacacttgaaggcttattttgcttcacagtaaaataacagctctattattattcagcaaggccaaagacttttgagaatgtgtatggaaaattctttttgtgcatttgagggcaaaattcaggccatcttcttatacatatactatcaaattatgttgtgtgcattagaaatcagttgcttgatagtagctattaaacccaatattgctgatagtatgctaatatcctaaaacttaaatattgcatatctatgaatgttaaattcagaatatctctaaaacatggaaaattgatgtttcaataaaaagggagacattttattattttgccttactaatgattttgcagctctgtttttctgcacactcaatagaaaatattgtgggtctgagatgccctttgaaaatgcctgaaagaaaacatgggctactacattatgttaatgttttgtaatgtccttttaatgagtggtgacataaaagggctgctttgttgtcctgatatggcaaaaattaaataaattctttttcactttaaatcagaaaaaaaaaaaaaaaa

SEQ ID NO: 236 - protein, 662 aa, Homo sapiens
MKKFSRMPKSEGGSGGGAAGGGAGGAGAGAGCGSGGSSVGVRVFAVGRHQVTLEESLAEGGFSTVFLVRTHGGIRCALKRMYVNNMPDLNVCKREITIMKELSGHKNIVGYLDCAVNSISDNVWEVLILMEYCRAGQVVNQMNKKLQTGFTEPEVLQIFCDTCEAVARLHQCKTPIIHRDLKVENILLNDGGNYVLCDFGSATNKFLNPQKDGVNVVEEEIKKYTTLSYRAPEMINLYGGKPITTKADIWALGCLLYKLCFFTLPFGESQVAICDGNFTIPDNSRYSRNIHCLIRFMLEPDPEHRPDIFQVSYFAFKFAKKDCPVSNINNSSIPSALPEPMTASEAAARKSQIKARITDTIGPTETSIAPRQRPKANSATTATPSVLTIQSSATPVKVLAPGEFGNHRPKGALRPGNGPEILLGQGPPQQPPQQHRVLQQLQQGDWRLQQLHLQHRHPHQQQQQQQQQQQQQQQQQQQQQQQQQQQHHHHHHHHLLQDAYMQQYQHATQQQQMLQQQFLMHSVYQPQPSASQYPTMMPQYQQAFFQQQMLAQHQPSQQQASPEYLTSPQEFSPALVSYTSSLPAQVGTIMDSSYSANRSVADKEAIANFTNQKNISNPPDMSGWNPFGEDNFSKLTEEELLDREFDLLRSSKGHLKAYFASQ

SEQ ID NO: 237 - DNA, 3859 bp, Homo sapiens
cggggcccaggctgtgcgcttggggagcgcggaatgtgaggcttggcgggccgcagcacgctcggacgggccaggggcggcgacccctcgcggacgcccggctgcgcgccgggccggggacttgcccttgcacgctccctgcgccctccagctcgccggcgggaccatgaagaagttctctcggatgcccaagtcggagggcggcagcggcggcggagcggcgggtggcggggctggcggggccggggccggggccggctgcggctccggcggctcgtccgtgggggtccgggtgttcgcggtcggccgccaccaggtcaccctggaagagtcgctggccgaaggtggattctccacagttttcctcgtgcgtactcacggtggaatccgatgtgcattgaagcgaatgtatgtcaataacatgccagacctcaatgtttgtaaaagggaaattacaattatgaaagagctatctggtcacaaaaatattgtgggctatttggactgtgctgttaattcaattagtgataatgtatgggaagtccttatcttaatggaatattgtcgagctggacaggtagtgaatcaaatgaataagaagctacagacgggttttacagaaccagaagtgttacagatattctgtgatacctgtgaagctgttgcaaggttgcatcagtgtaagactccaataattcaccgggatctgaaggtagaaaatattttgttgaatgatggtgggaactatgtactttgtgactttggcagtgccactaataaatttcttaatcctcaaaaagatggagttaatgtagtagaagaagaaattaaaaagtatacaactctgtcatacagagcccctgaaatgatcaacctttatggagggaaacccatcaccaccaaggctgatatctgggcactgggatgtctactctataaactttgtttcttcactcttccttttggtgagagtcaggttgctatctgtgatggcaacttcaccatcccagacaattctcgttactcccgtaacatacattgcttaataaggttcatgcttgaaccagatccggaacatagacctgatatatttcaagtgtcatattttgcatttaaatttgccaaaaaggattgtccagtctccaacatcaataattcttctattccttcagctcttcctgaaccgatgactgctagtgaagcagctgctaggaaaagccaaataaaagccagaataacagataccattggaccaacagaaacctcaattgcaccaagacaaagaccaaaggccaactctgctactactgccactcccagtgtgctgaccattcaaagttcagcaacacctgttaaagtccttgctcctggtgaattcggtaaccatagaccaaaaggggcactaagacctggaaatggccctgaaattttattgggtcagggacctcctcagcagccgccacagcagcatagagtactccagcaactacagcagggagattggagattacagcaactccatttacagcatcgtcatcctcaccagcagcagcagcagcagcagcagcaacagcaacagcagcagcagcaacagcaacagcagcagcagcagcagcagcagcagcaccaccaccaccaccaccaccacctacttcaagatgcttatatgcagcagtatcaacatgcaacacagcagcaacagatgcttcaacaacaatttttaatgcattcggtatatcaaccacaaccttctgcatcacagtatcctacaatgatgccgcagtatcagcaggctttctttcaacagcagatgctagctcaacatcagccgtctcaacaacaggcatcacctgaatatcttacctcccctcaagagttctcaccagccttagtttcctacacttcatcacttccagctcaggttggaaccataatggactcctcctatagtgccaataggtcagttgctgataaagaggccattgcaaatttcacaaatcagaagaacatcagcaatccacctgatatgtcagggtggaatccttttggagaggataatttctctaagttaacagaagaggaactattggacagagaatttgaccttctaagatcaaataggctcgaggagagagcatcctcagataagaatgtagactcactttctgctccacataaccatcctccagaagatccttttggttctgttcctttcatttctcattcaggttctcctgaaaagaaagctgaacattcatctataaatcaagaaaatggcactgcaaaccctatcaagaacggtaaaacaagtccagcatctaaagatcagcggactggaaagaaaacctcagtacagggtcaagtgcaaaaggggaatgatgaatctgaaagtgattttgaatcagatcccccttctcctaagagcagtgaagaggaagagcaagatgatgaagaagttcttcagggggaacaaggagattttaatgatgatgatactgaaccagaaaatctgggtcataggcctctcctcatggattctgaagatgaggaagaagaggagaaacatagctctgattctgattatgagcaggctaaagcaaagtacagtgacatgagctctgtctacagagacagatctggcagtggaccaacccaagatcttaatacaatactcctcacctcagcccaattatcctctgatgttgcagtggagactcccaaacaggagtttgatgtatttggcgctgtccccttctttgcagtgcgtgctcaacagccccagcaagaaaagaatgaaaagaacctccctcaacacaggtttcctgctgcaggactggagcaggaggaatttgatgtattcacaaaggcgccttttagcaagaaggtgaatgtacaagaatgccatgcagtggggcctgaggcacatactatccctggttatcccaaaagtgtagatgtatttggctccactccatttcagcccttcctcacatcaacaagtaaaagtgaaagcaatgaggacctttttgggcttgtgccctttgatgaaataacggggagccagcagcaaaaagtcaaacagcgcagcttacagaaactgtcctctcgccaaaggcgcacaaagcaggatatgtccaaaagtaatgggaagcggcatcatggcacgccaactagcacaaagaagactttgaagcctacctatcgcactccagagagggctcgcaggcacaaaaaagtgggccgccgagactctcaaagtagcaatgaatttttaaccatctcagactccaaggagaacattagtgttgcactgactgatgggaaagatagggggaatgtcttacaacctgaggagagcctgttggaccccttcggtgccaagcccttccattctccagacctgtcatggcaccctccacatcagggcctgagcgacatccgtgctgatcacaatactgtcctgccagggcggccaagacaaaattcactacatgggtcattccatagtgcagatgtattgaaaatggatgattttggtgccgtgccctttacagaacttgtggtgcaaagcatcactccacatcagtcccaacagtcccaaccagtcgaattagacccatttggtgctgctccatttccttctaaacagtagatacttctgatggattctcggcattaactcctgtttcaaaaaagtgtgaacagttttatgaatttgaaagaaaatttggtagctctttatagcattcattcttaaagatcagtcagaataggtgatttctaaataaaccaaatagaagaatgaaaaaaaaaaaaaaaaaaaaaaaaaaaaaaaaaaaaaaaaaaaaaaaaaaaaaaa

SEQ ID NO: 238 - protein, 1161 aa, Homo sapiens
MKKFSRMPKSEGGSGGGAAGGGAGGAGAGAGCGSGGSSVGVRVFAVGRHQVTLEESLAEGGFSTVFLVRTHGGIRCALKRMYVNNMPDLNVCKREITIMKELSGHKNIVGYLDCAVNSISDNVWEVLILMEYCRAGQVVNQMNKKLQTGFTEPEVLQIFCDTCEAVARLHQCKTPIIHRDLKVENILLNDGGNYVLCDFGSATNKFLNPQKDGVNVVEEEIKKYTTLSYRAPEMINLYGGKPITTKADIWALGCLLYKLCFFTLPFGESQVAICDGNFTIPDNSRYSRNIHCLIRFMLEPDPEHRPDIFQVSYFAFKFAKKDCPVSNINNSSIPSALPEPMTASEAAARKSQIKARITDTIGPTETSIAPRQRPKANSATTATPSVLTIQSSATPVKVLAPGEFGNHRPKGALRPGNGPEILLGQGPPQQPPQQHRVLQQLQQGDWRLQQLHLQHRHPHQQQQQQQQQQQQQQQQQQQQQQQQQQQHHHHHHHHLLQDAYMQQYQHATQQQQMLQQQFLMHSVYQPQPSASQYPTMMPQYQQAFFQQQMLAQHQPSQQQASPEYLTSPQEFSPALVSYTSSLPAQVGTIMDSSYSANRSVADKEAIANFTNQKNISNPPDMSGWNPFGEDNFSKLTEEELLDREFDLLRSNRLEERASSDKNVDSLSAPHNHPPEDPFGSVPFISHSGSPEKKAEHSSINQENGTANPIKNGKTSPASKDQRTGKKTSVQGQVQKGNDESESDFESDPPSPKSSEEEEQDDEEVLQGEQGDFNDDDTEPENLGHRPLLMDSEDEEEEEKHSSDSDYEQAKAKYSDMSSVYRDRSGSGPTQDLNTILLTSAQLSSDVAVETPKQEFDVFGAVPFFAVRAQQPQQEKNEKNLPQHRFPAAGLEQEEFDVFTKAPFSKKVNVQECHAVGPEAHTIPGYPKSVDVFGSTPFQPFLTSTSKSESNEDLFGLVPFDEITGSQQQKVKQRSLQKLSSRQRRTKQDMSKSNGKRHHGTPTSTKKTLKPTYRTPERARRHKKVGRRDSQSSNEFLTISDSKENISVALTDGKDRGNVLQPEESLLDPFGAKPFHSPDLSWHPPHQGLSDIRADHNTVLPGRPRQNSLHGSFHSADVLKMDDFGAVPFTELVVQSITPHQSQQSQPVELDPFGAAPFPSKQ

SEQ ID NO: 239 - DNA, 4445 bp, Homo sapiens
gtcagcgctgcctgagctcgtcccctggatgtccgggtctccccaggcggccacccgccggctcccatcgtgacctccagccgcagcgcctcccacgccggccgccgcgcgaggggagcgctcgggcgcgccgggtgtggttgggggaaggggttgtgccgcgcgcgggctgcgtgctgtgcccactcaaaaggttccgggcgcgcaggagggaagaggcagtgcccgccactcccactgagattgagagacgcggcaaggaggcagcctgtggaggaactgggtaggatttaggaacgcaccgtgcacatgcttggtggtcttgttaagtggaaactgctgctttagagtttgtttggaaggtccgggtgactcatcccaacatttacatccttaattgttaaagcgctgcctccgagcgcacgcatcctgagatcctgagcctttggttaagaccgagctctattaagctgaaaagataaaaactctccagatgtcttccagtaatgtcgaagtttttatcccagtgtcacaaggaaacaccaatggcttccccgcgacagcttccaatgacctgaaggcatttactgaaggagctgtgttaagttttcataacatctgctatcgagtaaaactgaagagtggctttctaccttgtcgaaaaccagttgagaaagaaatattatcgaatatcaatgggatcatgaaacctggtctcaacgccatcctgggacccacaggtggaggcaaatcttcgttattagatgtcttagctgcaaggaaagatccaagtggattatctggagatgttctgataaatggagcaccgcgacctgccaatttcaaatgtaattcaggttacgtggtacaagatgatgttgtgatgggcactctgacggtgagagaaaacttacagttctcagcagctcttcggcttgcaacaactatgacgaatcatgaaaaaaacgaacggattaacagggtcattcaagagttaggtctggataaagtggcagactccaaggttggaactcagtttatccgtggtgtgtctggaggagaaagaaaaaggactagtataggaatggagcttatcactgatccttccatcttgttcttggatgagcctacaactggcttagactcaagcacagcaaatgctgtccttttgctcctgaaaaggatgtctaagcagggacgaacaatcatcttctccattcatcagcctcgatattccatcttcaagttgtttgatagcctcaccttattggcctcaggaagacttatgttccacgggcctgctcaggaggccttgggatactttgaatcagctggttatcactgtgaggcctataataaccctgcagacttcttcttggacatcattaatggagattccactgctgtggcattaaacagagaagaagactttaaagccacagagatcatagagccttccaagcaggataagccactcatagaaaaattagcggagatttatgtcaactcctccttctacaaagagacaaaagctgaattacatcaactttccgggggtgagaagaagaagaagatcacagtcttcaaggagatcagctacaccacctccttctgtcatcaactcagatgggtttccaagcgttcattcaaaaacttgctgggtaatccccaggcctctatagctcagatcattgtcacagtcgtactgggactggttataggtgccatttactttgggctaaaaaatgattctactggaatccagaacagagctggggttctcttcttcctgacgaccaaccagtgtttcagcagtgtttcagccgtggaactctttgtggtagagaagaagctcttcatacatgaatacatcagcggatactacagagtgtcatcttatttccttggaaaactgttatctgatttattacccatgaggatgttaccaagtattatatttacctgtatagtgtacttcatgttaggattgaagccaaaggcagatgccttcttcgttatgatgtttacccttatgatggtggcttattcagccagttccatggcactggccatagcagcaggtcagagtgtggtttctgtagcaacacttctcatgaccatctgttttgtgtttatgatgattttttcaggtctgttggtcaatctcacaaccattgcatcttggctgtcatggcttcagtacttcagcattccacgatatggatttacggctttgcagcataatgaatttttgggacaaaacttctgcccaggactcaatgcaacaggaaacaatccttgtaactatgcaacatgtactggcgaagaatatttggtaaagcagggcatcgatctctcaccctggggcttgtggaagaatcacgtggccttggcttgtatgattgttattttcctcacaattgcctacctgaaattgttatttcttaaaaaatattcttaaatttccccttaattcagtatgatttatcctcacataaaaaagaagcactttgattgaagtattcaatcaagtttttttgttgttttctgttcccttgccatcacactgttgcacagcagcaattgttttaaagagatacatttttagaaatcacaacaaactgaattaaacatgaaagaacccaagacatcatgtatcgcatattagttaatctcctcagacagtaaccatggggaagaaatctggtctaatttattaatctaaaaaaggagaattgaattctggaaactcctgacaagttattactgtctctggcatttgtttcctcatctttaaaatgaataggtaggttagtagcccttcagtcttaatactttatgatgctatggtttgccattatttaataaatgacaaatgtattaatgctatactggaaatgtaaaattgaaaatatgttggaaaaaagattctgtcttatagggtaaaaaaagccaccgtgatagaaaaaaaatctttttgataagcacattaaagttaatagaacttactgatattcctgtctagtggtataatatctcaggaatcttggctgagggtttggaactgtgggtagagtagagggccaggagtccagtaatagaattcttgcaccatttctggaacattctagctctgggaggtcacgtaaccttcttggggtagttcagtggtttagtggtttataatccaggtgtgcgtcagaatcatctgaggaactttgctaaaatacaaaaatctggcctaagtagctccagatctaccttcataaaggaatctgaccactcctggatttggtaatttccaagttctgaaaattttacttaggatttaataactattaacatctgtccctacataggttttctttcctacttatataccttatgttctcttcattctaaccttcatcagtaatagggaaatgttttaattttatttttttagttgaagggtaatgtaccaaaaaatatagttcagtgaattaaaatgaacacacatgtgcaaccatcaattcaggtcaagaaatagaagattgtagcacacaaaagcctactcagccattctcccagtcactacttccttccttacccctgggttatttttgaaatgacacttgatgtatttccctctgttgctgttatgagaacattgctacagccaagtgttgtgtttctgtgtgcataggttgatacttaattatctccccactttttaataaacttttaatttggaaataattttagattgacagaaaagttgcaaagatagtgaggaaagttcctgtctactctttgctcagcttcccttaatgttaacattttatatagcaagatgcatttgtcaaagctaacaagttaacattggtacaatcactgttaattaaactgcacacaatattcagatttcaccacttttccactaatattctttcattgttctaggattcaattcaggagaccacatttcatctagccctcttttttaaaagtaaatacttttcagcacttacaggagttaactgagctggggcatcatggtgtatagacgccctgacactggtcatcttggaattcatttagtttgtcagtgggtgccctgacattctgtcacaacatcaatttgggaacatggcattatatttttatctttgaacttttttctttttggatgacatttgattaatgcgtcatcttggaacacattatcttttttcttggttatgtgatcaggaagattaatcagtttttcctgttcttggtataattcctgcttttcacatacctgtcccttacagttctctatatatacccttcccttattacacagagagaaatatctatctatactttttacacaaaatatacttcaaaagaaacaaaacagccacaattattaactttttaaataaatgagaatttaattatatcctaaaaaaaaaaaaaaa

SEQ ID NO: 240 - protein, 655 aa, Homo sapiens
MSSSNVEVFIPVSQGNTNGFPATASNDLKAFTEGAVLSFHNICYRVKLKSGFLPCRKPVEKEILSNINGIMKPGLNAILGPTGGGKSSLLDVLAARKDPSGLSGDVLINGAPRPANFKCNSGYVVQDDVVMGTLTVRENLQFSAALRLATTMTNHEKNERINRVIQELGLDKVADSKVGTQFIRGVSGGERKRTSIGMELITDPSILFLDEPTTGLDSSTANAVLLLLKRMSKQGRTIIFSIHQPRYSIFKLFDSLTLLASGRLMFHGPAQEALGYFESAGYHCEAYNNPADFFLDIINGDSTAVALNREEDFKATEIIEPSKQDKPLIEKLAEIYVNSSFYKETKAELHQLSGGEKKKKITVFKEISYTTSFCHQLRWVSKRSFKNLLGNPQASIAQIIVTVVLGLVIGAIYFGLKNDSTGIQNRAGVLFFLTTNQCFSSVSAVELFVVEKKLFIHEYISGYYRVSSYFLGKLLSDLLPMRMLPSIIFTCIVYFMLGLKPKADAFFVMMFTLMMVAYSASSMALAIAAGQSVVSVATLLMTICFVFMMIFSGLLVNLTTIASWLSWLQYFSIPRYGFTALQHNEFLGQNFCPGLNATGNNPCNYATCTGEEYLVKQGIDLSPWGLWKNHVALACMIVIFLTIAYLKLLFLKKYS

SEQ ID NO: 241 - DNA, 2103 bp, Homo sapiens
tctccatctggtcaactgcgggagaaaaattttcgagaatttccagcaggcaaggcagtggccgctttgactgcttgcttcggagatccgagacgacggagaaggcactcttatttaccgaccaagaaagctcctcccccgtcctccgttagctaattaaaacatttttcagggacgtagccatccagagacattccattattgttccattgacctttccctcatcactgagtcctttggagctgagttatgtcaacagctgccttaattactttggtcagaagtggtgggaaccaggtgagaaggagagtgctgctaagctcccgcctgctgcaggacgacaggcgggtgacacccacgtgccacagctccacttcagagcctaggtgttctcggtttgacccagatggtagtgggagtccagctacctgggacaattttgggatctgggataaccgcattgatgagccaattctgctgccacccagcattaagtatggcaagccaattcccaaaatcagcttggaaaaggtggggtgcgcctcacagattggcaaacggaaagagaatgaagatcggtttgacttcgctcagctgacagatgaggtcctgtactttgcagtgtatgatggacacggtggacctgcagcagctgatttctgtcatacccacatggagaaatgtattatggatttgcttcctaaggagaagaacttggaaactctgttgaccttggcttttctagaaatagataaagccttttcgagtcatgcccgcctgtctgctgatgcaactcttctgacctctgggactactgcaacagtagccctattgcgagatggtattgaactggttgtagccagtgttggggacagccgggctattttgtgtagaaaaggaaaacccatgaagctgaccattgaccatactccagaaagaaaagatgaaaaagaaaggatcaagaaatgtggtggttttgtagcttggaatagtttggggcagcctcacgtaaatggcaggcttgcaatgacaagaagtattggagatttggaccttaagaccagtggtgtcatagcagaacctgaaactaagaggattaagttacatcatgctgatgacagcttcctggtcctcaccacagatggaattaacttcatggtgaatagtcaagagatttgtgactttgtcaatcagtgccatgatcccaacgaagcagcccatgcggtgactgaacaggcaatacagtacggtactgaggataacagtactgcagtagtagtgccttttggtgcctggggaaaatataagaactctgaaatcaacttctcattcagcagaagctttgcctccagtggacgatgggcctgattaccagctgggacttagagtttctgtgcaacagtttttcactgagcatgtcaagaaactgataagatcaaaaaggtctcctaactcactagatcagcgcacaagtcagtgtaaaccacttagatagtagttttttcataaatgctcatcatatttatgttccgctgtacatgttcagtataaatatatgtgtagtgaagctactgtgagtctttaaatggaaagagcaaatgagaagtggtttggatacacttgatgagagatgagagtgtcacattaataatttttaagactcttaggcagctatgggtttcttcttaatcatttttgttctttattcatttgaacacgtttttgaagttcttcaaaactagtcagtttgaattttgacagctattcaatatgtgatctccaagtttaaaaaaatttttttccagacttccctaatcctaaaatgcgagtttttatttttaataactgtaccaaggaataagtatgaaaacagttctctgttaccatattttgtattctggaccacttactggtgaaagcaaccatgcaaaagaaattaatttggccaggcacagtggctcatgcctgtaatcccagcactttgggaggccaaggtgggtagatcatctgaggtcaggaattcaagaccagcctggccaacatggtgaaaccctgtctctagtaaaaatccaaaaaaaaaaaaaaaaaaaaaaaaaaaaaaaa

SEQ ID NO: 242 - protein, 372 aa, Homo sapiens
MSTAALITLVRSGGNQVRRRVLLSSRLLQDDRRVTPTCHSSTSEPRCSRFDPDGSGSPATWDNFGIWDNRIDEPILLPPSIKYGKPIPKISLEKVGCASQIGKRKENEDRFDFAQLTDEVLYFAVYDGHGGPAAADFCHTHMEKCIMDLLPKEKNLETLLTLAFLEIDKAFSSHARLSADATLLTSGTTATVALLRDGIELVVASVGDSRAILCRKGKPMKLTIDHTPERKDEKERIKKCGGFVAWNSLGQPHVNGRLAMTRSIGDLDLKTSGVIAEPETKRIKLHHADDSFLVLTTDGINFMVNSQEICDFVNQCHDPNEAAHAVTEQAIQYGTEDNSTAVVVPFGAWGKYKNSEINFSFSRSFASSGRWA

SEQ ID NO: 243 - DNA, 3045 bp, Homo sapiens
actaagaccgcaaggcattcatttcctcctacggtggatgcggacgccgggaggaggagagccccagagagaggagctgggagcggaggcgcaggcaatgctcagccctggatgtagctgagaggctgggagaagagacgaccgctggagaccgagcggcgtggggaagacctaggggggtgggtgggggaagcagacaggagaacactcgaaatcaagcgctttacagattattttattttgtatagagaacacgtagcgactccgaagatcagccccaatgaacatgtcagtgttgactttacaagaatatgaattcgaaaagcagttcaacgagaatgaagccatccaatggatgcaggaaaactggaagaaatctttcctgttttctgctctgtatgctgcctttatattcggtggtcggcacctaatgaataaacgagcaaagtttgaactgaggaagccattagtgctctggtctctgacccttgcagtcttcagtatattcggtgctcttcgaactggtgcttatatggtgtacattttgatgaccaaaggcctgaagcagtcagtttgtgaccagggtttttacaatggacctgtcagcaaattctgggcttatgcatttgtgctaagcaaagcacccgaactaggagatacaatattcattattctgaggaagcagaagctgatcttcctgcactggtatcaccacatcactgtgctcctgtactcttggtactcctacaaagacatggttgccgggggaggttggttcatgactatgaactatggcgtgcacgccgtgatgtactcttactatgccttgcgggcggcaggtttccgagtctcccggaagtttgccatgttcatcaccttgtcccagatcactcagatgctgatgggctgtgtggttaactacctggtcttctgctggatgcagcatgaccagtgtcactctcactttcagaacatcttctggtcctcactcatgtacctcagctaccttgtgctcttctgccatttcttctttgaggcctacatcggcaaaatgaggaaaacaacgaaagctgaatagtgttggaactgaggaggaagccatagctcagggtcatcaagaaaaataatagacaaaagaaaatggcacaaggaatcacacgtggtgcagctaaaacaaaacaaaacatgagcaaacacaaaacccaaggcagcttagggataattaggttgatttaacccagtaagtttatgatccttttagggtgaggactcactgagtgcacctccatctccaagcactgctgctggaagaccccattccctctttatctatcaactctaggacaagggagaacaaaagcaagccagaagcagaggagactaatcaaaggcaaacaaaggctattaacacataggaaaatatgtatttactaagtgtcacatttctctaagatgaaagatttttactctagaaactgtgcgagcacaacacacacaatcctttctaactttatggacactaaactggagccaatagaaaagacaaaaatgaaagagacacagggtgtatatctagaacgataatgcttttgcagaaactaaagcctttttaagaaatgccagctgctgtagaccccatgagaaaagatgtcttaatcatccttatgaaaacagatgtaaacaactatatttcaactaacttcatcttcactgcatagcctcaggctagtgagtttgccaaaaccaaagggggtgaatacttccccaagattcttcctgggaggatggaaacagtgcagcccaggtcccatgggggcagctccatcccagagcatttctgatagttgaactgtaatttctactcttaagtgagatatgaagtattatccttttgttcagttgccccgggcttttgaacagaagagtaaatacagaattgaaaaagataaacactcaaccaaacaatgtgaaaacgggttctgtagtatttgtaaaaaggcccggcccaggaccactgtgagctggaaaagggagaaaggcagtgggaaaagaggtgagccgaagatcaattcgacagacagacggtgtgtatgcccctccctgtttgacttcacacacactcataactttccaaatgaaaccccacagtatagcgcatattttcgatatttttgtgaattccaaaaggaaatcacagggctgttcgaaatattgggggaacactgtgtttctgcatcatctgcatttgctccccaagcaatgtagaggtgtttaaagggccctctgctggctgagtggcaatactacaacaaacttcaaggcaagtttggctgaaaacagttgacaacaaagggcccccatacacttatccctcaaattttaagtgatatgaaatacttgtcatgtctttggccaaatcagaagatattcatcctgcttcaagtcagcttcagaaatgttttaaaagggactttagctctggaactcaaaatcaatttattaagagccatattctttaaaaaaaaaagctggataatattatctgtaatatttcagtcctttacaagccaaatacatgtgtcaatgtttctagtatttcaaagaagcaattatgtaaagttgttcaatgtgacataatagtattataattggttaagtagcttaatgattaggcaaactagatgaaaagattaggggcttccacactgcatagatcacacgcacatagccacgcatacacacacagacacacagatgtggggtacactgaatttcaaagcccaaatgaatagaaacacattttctggctagcagaaaaaaacaaaacaaaactgttgtttctctttcttgctttgagagtgtacagtaaaagggattttttcgaattatttttatattattttagctttaattgtgctgtcgttcatgaaacagagctgctctgcttttctgtcagagatggcaagggctttttcagcatctcgtttatgtgtggaatttaaaaagaataaagttttattccattctgaaaaaaaaaaaaaaaaa

SEQ ID NO: 244 - protein, 265 aa, Homo sapiens
MNMSVLTLQEYEFEKQFNENEAIQWMQENWKKSFLFSALYAAFIFGGRHLMNKRAKFELRKPLVLWSLTLAVFSIFGALRTGAYMVYILMTKGLKQSVCDQGFYNGPVSKFWAYAFVLSKAPELGDTIFIILRKQKLIFLHWYHHITVLLYSWYSYKDMVAGGGWFMTMNYGVHAVMYSYYALRAAGFRVSRKFAMFITLSQITQMLMGCVVNYLVFCWMQHDQCHSHFQNIFWSSLMYLSYLVLFCHFFFEAYIGKMRKTTKAE

SEQ ID NO: 245 - DNA, 300 bp, Homo sapiens
atgctgcagccgctcaaagagcagcagtgcgtcatccctggtgtatctgaagacagcaacaatcacaacctgatgttggaggctaccaagtggtccaccatccaggggctggtggaattcctgcagctctgcaagcaagtggccaagatactgtctgccttgaagtatcccaccatcagcacagtgaaactgctgtttcacatgctgctaaataccacgttcaacaacaaggagactgactccaaggagatccccatggccaagagggtgattgccaaggagctctacaagacctgctag

SEQ ID NO: 246 - protein, 99 aa, Homo sapiens [sequence omitted]

SEQ ID NO: 247 - DNA, 378 bp, Homo sapiens
atgggcatgtttccaaatgtcaccatcttcctggacccacgctacaagaggctgcccttcctgcttgtcttcgagaggcagcagatggagaactctgtggtcaggggccaaggcctcctggacaacgtcaaagacggcagctaccggctggccaatgcaagatctaccctttgccggaaaaacgtcccccaaatggtcaacaccaagaggaaccggctggcccctaacaagcaggtctttctgtacctgaacgagcttaaccaggcagaggcggaggcagagcccgaggcccaggacaaaaagcagtggggcttggatagagagcaggtgttcccttgggaaacggtgtcagccaagcttctttggcatctgggatag

SEQ ID NO: 248 - protein, 125 aa, Homo sapiens
MGMFPNVTIFLDPRYKRLPFLLVFERQQMENSVVRGQGLLDNVKDGSYRLANARSTLCRKNVPQMVNTKRNRLAPNKQVFLYLNELNQAEAEAEPEAQDKKQWGLDREQVFPWETVSAKLLWHLG

SEQ ID NO: 249 - DNA, 5869 bp, Homo sapiens
ccccctccgggctttcgcccgccctctctccctcccttttttgcccgccctggccctgcccctgcccctgccccctcctctcagcccctccgcgcccggggtgtcattgggcccgggagacgggagccaacttcaggctgctcagaggaagcccgtgcagtcagtcacctgggtgcaagagcgttgctgcctcgggctctcccgctgcagggagagcggcactcgctggcctggatgtggttggatttaggggggctccgcagcaggggtttcgtggcggtggcaagcgctgcaacaggtagacggcgagagacggaccccggccgaggcagcgatggagaccaaaggctaccacagtctccctgaaggtctagatatggaaagacggtggggtcaagtttctcaggctgtggagcgttcttccctgggacctacagagaggaccgatgagaataactacatggagattgtcaacgtaagctgtgtttccggtgctattccaaacaacagtactcaaggaagcagcaaagaaaaacaagaactactcccttgccttcagcaagacaataatcggcctgggattttaacatctgatattaaaactgagctggaatctaaggaactttcagcaactgtagctgagtccatgggtttatatatggattctgtaagagatgctgactattcctatgagcagcagaaccaacaaggaagcatgagtccagctaagatttatcagaatgttgaacagctggtgaaattttacaaaggaaatggccatcgtccttccactctaagttgtgtgaacacgcccttgagatcatttatgtctgactctgggagctccgtgaatggtggcgtcatgcgcgccgttgttaaaagccctatcatgtgtcatgagaaaagcccgtctgtttgcagccctctgaacatgacatcttcggtttgcagccctgctggaatcaactctgtgtcctccaccacagccagctttggcagttttccagtgcacagcccaatcacccagggaactcctctgacatgctcccctaatgttgaaaatcgaggctccaggtcgcacagccctgcacatgctagcaatgtgggctctcctctctcaagtccgttaagtagcatgaaatcctcaatttccagccctccaagtcactgcagtgtaaaatctccagtctccagtcccaataatgtcactctgagatcctctgtgtctagccctgcaaatattaacaactcaaggtgctctgtttccagcccttcgaacactaataacagatccacgctttccagtccggcagccagtactgtgggatctatctgtagccctgtaaacaatgccttcagctacactgcttctggcacctctgctggatccagtacattgcgggatgtggttcccagtccagacacgcaggagaaaggtgctcaagaggtcccttttcctaagactgaggaagtagagagtgccatctcaaatggtgtgactggccagcttaatattgtccagtacataaaaccagaaccagatggagcttttagcagctcatgtctaggaggaaatagcaaaataaattcggattcttcattctcagtaccaataaagcaagaatcaaccaagcattcatgttcaggcacctcttttaaagggaatccaacagtaaacccgtttccatttatggatggctcgtatttttcctttatggatgataaagactattattccctatcaggaattttaggaccacctgtgcccggctttgatggtaactgtgaaggcagcggattcccagtgggtattaaacaagaaccagatgatgggagctattacccagaggccagcatcccttcctctgctattgttggggtgaattcaggtggacagtccttccactacaggattggtgctcaaggtacaatatctttatcacgatcggctagagaccaatctttccaacacctgagttcctttcctcctgtcaatactttagtggagtcatggaaatcacacggcgacctgtcgtctagaagaagtgatgggtatccggtcttagaatacattccagaaaatgtatcaagctctactttacgaagtgtttctactggatcttcaagaccttcaaaaatatgtttggtgtgtggggatgaggcttcaggatgccattatggggtagtcacctgtggcagctgcaaagttttcttcaaaagagcagtggaagggcaacacaactatttatgtgctggaagaaatgattgcatcattgataagattcgacgaaagaattgtcctgcttgcagacttcagaaatgtcttcaagctggaatgaatttaggagcacgaaagtcaaagaagttgggaaagttaaaagggattcacgaggagcagccacagcagcagcagcccccacccccacccccacccccgcaaagcccagaggaagggacaacgtacatcgctcctgcaaaagaaccctcggtcaacacagcactggttcctcagctctccacaatctcacgagcgctcacaccttcccccgttatggtccttgaaaacattgaacctgaaattgtatatgcaggctatgacagctcaaaaccagatacagccgaaaatctgctctccacgctcaaccgcttagcaggcaaacagatgatccaagtcgtgaagtgggcaaaggtacttccaggatttaaaaacttgcctcttgaggaccaaattaccctaatccagtattcttggatgtgtctatcatcatttgccttgagctggagatcgtacaaacatacgaacagccaatttctctattttgcaccagacctagtctttaatgaagagaagatgcatcagtctgccatgtatgaactatgccaggggatgcaccaaatcagccttcagttcgttcgactgcagctcacctttgaagaatacaccatcatgaaagttttgctgctactaagcacaattccaaaggatggcctcaaaagccaggctgcatttgaagaaatgaggacaaattacatcaaagaactgaggaagatggtaactaagtgtcccaacaattctgggcagagctggcagaggttctaccaactgaccaagctgctggactccatgcatgacctggtgagcgacctgctggaattctgcttctacaccttccgagagtcccatgcgctgaaggtagagttccccgcaatgctggtggagatcatcagcgaccagctgcccaaggtggagtcggggaacgccaagccgctctacttccaccggaagtgactgcccgctgcccagaagaactttgccttaagtttccctgtgttgttccacacccagaaggacccaagaaaacctgtttttaacatgtgatggttgattcacacttgttcaacagtttctcaagtttaaagtcatgtcagaggtttggagccgggaaagctgtttttccgtggatttggcgagaccagagcagtctgaaggattccccacctccaatcccccagcgcttagaaacatgttcctgttcctcgggatgaaaagccatatctagtcaataactctgattttgatattttcacagatggaagaagttttaactatgccgtgtagtttctggtatcgttcgcttgttttaaaagggttcaaggactaacgaacgttttaaagcttacccttggtttgcacataaaacgtatagtcaatatggggcattaatattcttttgttattaaaaaaacacaaaaaaataataaaaaaatatatacagattcctgttgtgtaataacagaactcgtggcgtggggcagcagctgcctctgagccctcgctcgtccacggtcttctgcatcactggtatacacactcgttagcgtccatttcttatttaattagaatggataagatgatgttaaatgccttggtttgatttctagtatctattgtgttggctttacaaataattttttgcagtcttttgctgtgctgtacattactgtatgtataaattatgaaggacctgaaataaggtataaggatcttttgtaaatgagacacatacaaaaaaaatctttaatggttaataggatgaatgggaaagtatttttgaaagaattctattttgctggagactatttaagtactatctttgtctaaacaaggtaatttttttttgtaaagtgcaatgtcctgcatgcataatgaaccgtttacagtgtatttaagaaagggaaagctgtgccttttttagcttcatatctaatttaccattattttacagtctctgttgtaaataaccacactgaaacctcttcggttgtcttgaaacctttctactttttctgtactttttgttttgttcttggtctcccgcttggggcatttgtgggactccagcacgttttctggcttctgcttcatcctgctccatcggggaatgacacactgcggtgtctgcagctcctggaaggtgtcatttgacaacacatgtgggagaggaggtccttggagtgctgcagctttgggaaagctgcctcgtttcccttttcctctagaagcagaaccagctctacgagagtgagactgggaacttgatggctcagagagcatcttttcctcccattttagaaaatcagattttctcctgtgggaaaaaaaaattccatgcactctctctctgttaaagatcagctattcccttctgatcttggaaagaggttctgcactcctggaaccggtcacaggaacgcacagatcatggcaggatgcgctgggacggcccatcttggcaaggttcagtctgaatggcatggagaccgggagatagaggggttttagatttttaaaaggtaggttttaaaaataagttttatacataaacagttttggagaaaaattacagatcatataagcaagacagtggcactaaaatgtttaattcattaatctgtttgtttggcactgatgcaatgtatggcttttctcttgccccaaatcacaaacatatgtatctttggggaaactaacaatatgattgcactaaataaactactttgaatagaggccaaattaatcttttaaaaatgatgataatcatcaggtttactcagtgaaatcatattaattattttccaaaatctaaaagctgtagctggagaagcccatggccacgaggaagcagcaattaattagatcaacacttttctccagggttcaccatgcaggcaacattaccttgtctttcaaaagacacctgccttatgcaaggggaaacctgtgaaagctgcactcagagggaggagtttttcttacataatttgcaatttcaggaatttaatttataggcagatctttaaatacagtcaacttacggtgcacagtaatatgaaagccacactttgaaggtaataaatacacagcatgcagactgggagttgctagcaaacaaatggcttacttacaaaagcagcttttagttcagacttagtttttataaaatgggaattctgacttacttaaccaggtttgggatggagatggtctgcatcagctttttgtattaacaaagttactggctctttgtgtgtctccaggtaactttgcttgattaaacagcaaagccatattctaaattcactgttgaatgcctgtcccagtccaaattgtctgtctgctcttatttttgtaccatattgctcttaaaaatcttggtttggtacagttcataattcaccaaaagttcatataatttaaagaaacactaaattagtttaaaatgaagcaatttatatctttatgcaaaaacatatgtctgtctttgcaaaggactgtaagcagattacaataaatcctttactttaatca

SEQ ID NO: 250 - protein, 984 aa, Homo sapiens
METKGYHSLPEGLDMERRWGQVSQAVERSSLGPTERTDENNYMEIVNVSCVSGAIPNNSTQGSSKEKQELLPCLQQDNNRPGILTSDIKTELESKELSATVAESMGLYMDSVRDADYSYEQQNQQGSMSPAKIYQNVEQLVKFYKGNGHRPSTLSCVNTPLRSFMSDSGSSVNGGVMRAVVKSPIMCHEKSPSVCSPLNMTSSVCSPAGINSVSSTTASFGSFPVHSPITQGTPLTCSPNVENRGSRSHSPAHASNVGSPLSSPLSSMKSSISSPPSHCSVKSPVSSPNNVTLRSSVSSPANINNSRCSVSSPSNTNNRSTLSSPAASTVGSICSPVNNAFSYTASGTSAGSSTLRDVVPSPDTQEKGAQEVPFPKTEEVESAISNGVTGQLNIVQYIKPEPDGAFSSSCLGGNSKINSDSSFSVPIKQESTKHSCSGTSFKGNPTVNPFPFMDGSYFSFMDDKDYYSLSGILGPPVPGFDGNCEGSGFPVGIKQEPDDGSYYPEASIPSSAIVGVNSGGQSFHYRIGAQGTISLSRSARDQSFQHLSSFPPVNTLVESWKSHGDLSSRRSDGYPVLEYIPENVSSSTLRSVSTGSSRPSKICLVCGDEASGCHYGVVTCGSCKVFFKRAVEGQHNYLCAGRNDCIIDKIRRKNCPACRLQKCLQAGMNLGARKSKKLGKLKGIHEEQPQQQQPPPPPPPPQSPEEGTTYIAPAKEPSVNTALVPQLSTISRALTPSPVMVLENIEPEIVYAGYDSSKPDTAENLLSTLNRLAGKQMIQVVKWAKVLPGFKNLPLEDQITLIQYSWMCLSSFALSWRSYKHTNSQFLYFAPDLVFNEEKMHQSAMYELCQGMHQISLQFVRLQLTFEEYTIMKVLLLLSTIPKDGLKSQAAFEEMRTNYIKELRKMVTKCPNNSGQSWQRFYQLTKLLDSMHDLVSDLLEFCFYTFRESHALKVEFPAMLVEIISDQLPKVESGNAKPLYFHRK

SEQ ID NO: 251 - DNA, 2874 bp, Homo sapiens
atgagcaccaatcgcctacgggaggccagaaaaggctgcgtggtgctcccctctcagggcctggccctgtccacctgggccttggtgacccgcagccgggactcttgctgtaaagtgacgcagtgctctccctgggaggacaaaagaatccccggagtagagaaggaggccagcgagtctcagttcgctgctcgctcagagccgcccaggtgcgagggcgtcttcaccagaaatcggtgctcccgcgcgccccaccctccggggccctgcagatgccgggtcgggggccgccagcaggccctttggctcctgctggagacactggaagaccaggcgaccaggacagcgggtcgggccagtgcgcttgcccagcggcacgtgggcctcaagcctggtccccagcggctgcgccagcctagctgtgttcaccttggggccgcgagggcctcccaccggctggcagctggtggacacgctgtcaagatcgggggaaaaaaaggaaggaaggaggctagggggacacagggctggtggcctccgcagtctttgacctgcgacgggcgcgagcgcacctccgcgcctttgcgcagagaccttcccccaagattggctcacgacgcctcctaccccgaagtcaagggctccctgtggcaaatcctcacacgccctcctcctccccgcccatccccggcgccaggactgacggggagagggcaaggccgggccagaggggctgtgggcctggactgcggctgtcgcccgcggccctgctcttttgggcagccagacgtggggtcagcgcccagtcgcagcctccggggatgctccctgaggttccggaacaccccgccccccatcccaggatctgaccaaccctcaagccacggccggccccggttccgcgagacgggggactctgaggattgtcctcccttccgggctgggactcccccacagcagccgaccgcccccagttcagagtggcccggcccgcagcgctccccgggcacaggtcccaggtggacggctccgctcccgcgcccggctcctctgcccgccaagcgccccggggattccccggcctccaagcggccgcggccgggtggagtcagccccgaagcccgggatcccccgaagggagaaaacccgctctgctcctctgaagcggcgggagaaaccggccccacccaggtccgggggcccgacgccctcggcggaggccggctccaggggtccgagccgcctggtgccggtttccgccgagctggagcgcgcgggccacggcttctctggggacgcagaagcgagaagcggggacctcggcgcgcgccccgcgtcccgctcttcctgcccgcgccccggcccccggcccgcgccccggccgccggcatggtgctgctggccgggaccgggccggagggcggcggggcgcgctgcatgaccccaccaccgccgtccccaccccggggcgcgcaggtcgaggaggaccccgctgactacgaagagtttgaggacttctcgagtctgccagacacccgcagcatcgcctcggacgactctttctaccctttcgaggacgaggaggagcacggcgtcgagagcgcggagagcgtcccggagggcgtcccggaaagcgtcccggagacggcgaccctcctgcgcgccgcctgcgccaacaacgtggggctgctgcggacgctggtgcggcgcggggtgagcgtcgaggaggcgcaggagactgaccgcaacggcaggaccggccttattgtcgcctgctaccacggctttgtggataccgtggtggccttagcagagtgcccccacgttgacgtcaactggcaggacagcgaggggaacacagccctaatcacagctgcacaggcagggcacgctatcatcactaactacttgttgaactatttccctggtcttgaccttgaaaggaggaacgcgttcgggttcaccgccctgatgaaagccgccatgcagggtcgaacggactgcatccgagccctgatgctagcaggggcggatgtccacgcgagggacccccgccgtgggatgtcgccgcaggagtgggccacttacacgggccgcgtggatgccgtccgtctcatgcagaggctgctggagcgcccctgcccggagcagttctgggagaagtaccggcccgagctgccgccgccccctgaagcggcgcggaagcccgcgggctccaagaactgcctgcagaggctcacagactgcgtgctgtccgtgctgacgccgcgctccgtgcggggcccggaggacgggggcgtcctggaccacatggtccggatgaccacgagcctctacagccccgccgtggccatcgtgtgccagaccgtgtgccctgagagccctccgagcgtggggaagaggcggctggcggtgcaggagatcctggcggcgcgggctgcacggggcccccaggcgcaggaggaggatgaggtggggggcgcggggcagcgcgggcggaccggacaggaggacgcggactcccgggagggctccccgagagccggcctccctcccgccctggggtcccggggccccgcagcgcccgccccgcggaaggccagcctcctgcccctgcagcgcctgcggcggagaagcgtgcggcccggtgtggtggtgccccgggtccgagtcagcaaggcgcccgcgcccaccttccagcccgagcggccggcgcggaagggcagcaccaaggacagcggccacctgcagatccccaagtggcggtacaaggaggccaaggaggagaagaggaaggcagaggaggccgaaaagaagcgccaggccgaggcgcagaaggagaggcgcactgcgccctggaagaagaggacgtga

SEQ ID NO: 252 - protein, 957 aa, Homo sapiens [sequence omitted]

SEQ ID NO: 253 - DNA, 4164 bp, Homo sapiens
cgcctaatcttcacccgctgctaggctcgtttaatgagtcttctgagagctaaggagtcctcggattcattcaaagcattctacaatgaacgctaggggggaaaaagaacaaacaaaatacatttcaaatataggattcaattacttttcactactcaatgatgtgtcaaaggcacgctgtgttttgttttgagggcggggagatgacaggagggaatcctgggcccccattggctcgccgctcgccgctgcagttgagctccagccgctccgagagcattattgatctgaagggtaaatgtggagggagccacagagaggggtccaggcttttctgagaagagaggcagcctcttccaggaagaaagtggtgtctactggctgcccggcctggagaaccttctttgaatgaaaacggacaaaatgcaaagcagtgtgttggcacagtgatttggaaaggggaaacagaagagaagggtctcaccttccgcgcaaggctgagctgttggcaccctgctgcggccgtcggtgctgctgctcctgcagctgccttttctgccatcagctttgttacctaacagcttggctcttttgggaaatatagacaagctggaacccaggagcagttgggagttttaaagaatgccagcctttttaaagctttgatgtccagtgctatagaatcaagttactgtggaggtcaaaacaatttgagatacataagctggccttagaaaataaattgcctctaacttacagtgaggagctcaacataacagggaaaaggagcacaggatgcagctacttggagggtgttgattgaaaacttcgatctccccaccccattcacggttgatttgacggatttctcaccttgttcacagagaaaatttcaattaaggcccctttagatggaatataatacagcagaagccttttcatcaaaaggattaatgcctgcatcatcatttctgcaataaaacaagaagctaagcggtggaggccacagacacctcaaacctggattccacaattctacgttaagtgttggagtttttattactctgctgtaggaaagcctttgccaatgcttacaaggaactgtttatccctgcttctctgggttctgtttgatggaggtctcctaacaccactacaaccacagccacagcagactttagccacagagccaagagaaaatgttatccatctgccaggacaacggtcacatttccaacgtgttaaacgtggctgggtatggaatcaattttttgtgctggaagaatacgtgggctccgagcctcagtatgtgggaaagctccattccgacttagacaagggagagggcactgtgaaatacaccctctcaggagatggcgctggcaccgtttttaccattgatgaaaccacaggggacattcatgcaataaggagcctagatagagaagagaaacctttctacactcttcgtgctcaggctgtggacatagaaaccagaaagcccctggagcctgaatcagaattcatcatcaaagtgcaggatattaatgataatgagccaaagtttttggatggaccttatgttgctactgttccagaaatgtctcctgtgggtgcatatgtactccaggtcaaggccacagatgcagatgacccgacctatggaaacagtgccagagtcgtttacagcattcttcagggacaaccttatttctctattgatcccaagacaggtgttattagaacagctttgccaaacatggacagagaagtcaaagaacaatatcaagtactcatccaagccaaggatatgggaggacagcttggaggattagccggaacaacaatagtcaacatcactctcaccgatgtcaatgacaatccacctcgattccccaaaagcatcttccacttgaaagttcctgagtcttcccctattggttcagctattggaagaataagagctgtggatcctgattttggacaaaatgcagaaattgaatacaatattgttccaggagatgggggaaatttgtttgacatcgtcacagatgaggatacacaagagggagtcatcaaattgaaaaagcctttagattttgaaacaaagaaggcatacactttcaaagttgaggcttccaaccttcaccttgaccaccggtttcactcggcgggccctttcaaagacacagctacggtgaagatcagcgtgctggacgtagatgagccaccggttttcagcaagccgctctacaccatggaggtttatgaagacactccggtagggaccatcattggcgctgtcactgctcaagacctggatgtaggcagcagtgctgttaggtacttcatagattggaagagtgatggggacagctactttacaatagatggaaatgaaggaaccatcgccactaatgaattactagacagagaaagcactgcgcagtataatttctccataattgcgagtaaagttagtaaccctttattgaccagcaaagtcaatatactgattaatgtcttagatgtaaatgaatttcctccagaaatatctgtgccatatgagacagccgtgtgtgaaaatgccaagccaggacagataattcagatagtcagtgctgcagaccgagatctttcacctgctgggcaacaattctcctttagattatcacctgaggctgctatcaaaccaaattttacagttcgtgacttcagaaacaacacagcggggattgaaacccgaagaaatggatacagccgcaggcagcaagagttgtatttcctccctgttgtaatagaagacagcagctaccctgtccagagcagcacaaacacaatgactattcgagtctgtagatgtgactctgatggcaccatcctgtcttgtaatgtggaagcaatttttctacctgtaggacttagcactggggcgttgattgcaattctactatgcattgttatactcttagccatagttgtactgtatgtagcactgcgaaggcagaagaaaaaagacaccctgatgacctctaaagaagacatcagagacaacgtcatccattacgatgatgaaggaggtggggaggaagatacccaggctttcgacatcggggctctgagaaacccaaaagtgattgaggagaacaaaattcgcagggatataaaaccagactctctctgtttacctcgtcagagaccacccatggaagataacacagacataagggatttcattcatcaaaggctacaggaaaatgacgtggacccaactgccccaccatacgattcactggccacatatgcctacgaagggagtgggtccgtggcagagtccctcagctctatagactctctcaccacagaagccgaccaggactatgactatctgacagactggggaccccgctttaaagtcttggcagacatgtttggcgaagaagagagttataaccctgataaagtcacttaagggagtcgtggaggctaaaatacaaccgagaggggagatttttaaaaaagaaaaagaaacacaaatattaatagaaatctctctcacacacacacacacacacaaacacacacacacacacacactctttctgggacaagattcctttgattacctggtttctagtaagttactaaattaatcatattgtcagttttggtttattctgccaacaagagatacatcctataatgtgtacttgctttgttttgttgttttgttttttcacaatcacactgagacaagctcaggcctattcaatacaatttactgacatgacaacctagaacgaagatagctatgtggcatcacggtggaagagtgttagatttttcttaattccactaaagtgcctattgaaactcttatcatttaaagtggtgtacagtacactctgctgtgatggtattgcgggattcagagataaagacataaaacagacaccgtctttatgtcaagaagcaatagcgacactctgactctcctcattccttttgagaacaaaagaagaacactttctgatctccaccttcttctaattcaaaaggttttctttttcttttttaaactgtatgctaaaacgtatttgtttatcctatcctttcagaaaattgaaataaatatgaaaatatcaagttcaatatgtaagtccc

SEQ ID NO: 254 - protein, 794 aa, Homo sapiens
MLTRNCLSLLLWVLFDGGLLTPLQPQPQQTLATEPRENVIHLPGQRSHFQRVKRGWVWNQFFVLEEYVGSEPQYVGKLHSDLDKGEGTVKYTLSGDGAGTVFTIDETTGDIHAIRSLDREEKPFYTLRAQAVDIETRKPLEPESEFIIKVQDINDNEPKFLDGPYVATVPEMSPVGAYVLQVKATDADDPTYGNSARVVYSILQGQPYFSIDPKTGVIRTALPNMDREVKEQYQVLIQAKDMGGQLGGLAGTTIVNITLTDVNDNPPRFPKSIFHLKVPESSPIGSAIGRIRAVDPDFGQNAEIEYNIVPGDGGNLFDIVTDEDTQEGVIKLKKPLDFETKKAYTFKVEASNLHLDHRFHSAGPFKDTATVKISVLDVDEPPVFSKPLYTMEVYEDTPVGTIIGAVTAQDLDVGSSAVRYFIDWKSDGDSYFTIDGNEGTIATNELLDRESTAQYNFSIIASKVSNPLLTSKVNILINVLDVNEFPPEISVPYETAVCENAKPGQIIQIVSAADRDLSPAGQQFSFRLSPEAAIKPNFTVRDFRNNTAGIETRRNGYSRRQQELYFLPVVIEDSSYPVQSSTNTMTIRVCRCDSDGTILSCNVEAIFLPVGLSTGALIAILLCIVILLAIVVLYVALRRQKKKDTLMTSKEDIRDNVIHYDDEGGGEEDTQAFDIGALRNPKVIEENKIRRDIKPDSLCLPRQRPPMEDNTDIRDFIHQRLQENDVDPTAPPYDSLATYAYEGSGSVAESLSSIDSLTTEADQDYDYLTDWGPRFKVLADMFGEEESYNPDKVT

SEQ ID NO: 255 - DNA, 11659 bp, Homo sapiens
gctggagggatcctccattcctgtgtcatttgcatgggtcctgctgtgaaatgaacctggcagggacttgttagacacttccttccttccctcattgagcactccagtgccattgttccacagttgttctaattgggtcctagcttcctcctgccaaggcaaacagcatagtctcgagtaggtgtccctaggctcatctgccagcctgaacatgaacacaggcaaagctgatgatggccagggaccccaggggacgtggggccctgtggggtctggcccccaggagcaagacctctgatgatgctggtgtctgggagtgagcaccatgcccatcacccaggacaatgccgtgctgcacctgcccctcctctaccagtggctgcagaacagcctgcaggaaggtggggatgggccggagcagcggctctgccaggcggccatccagaagctgcaggagtacatccagctgaactttgctgtggatgagagtacggtcccacctgatcacagcccccccgaaatggagatctgtactgtgtacctcaccaaggagctgggggacacagagactgtgggcctgagttttgggaacatccctgttttcggggactatggtgaaaagcgcagggggggcaagaagaggaaaacccaccagggtcctgtgctggatgtgggctgcatctgggtgacagagctgaggaagaacagcccagcagggaagagtgggaaggtccgactgcgggatgagatcctctcactgaatgggcagctgatggttggagttgatgtcagtggggccagttacctggctgagcagtgctggaatggcggctttatctacctgatcatgctgcgtcgctttaagcacaaagcccactccacttataatggcaacagtagcaacagctctgaaccaggagaaacacctaccttggagctgggtgaccgaactgcgaaaaaggggaaacgaaccagaaagtttggggtcatctccaggcctcctgccaacaaggcccctgaagaatccaagggcagcgctggctgtgaggtgtccagtgaccccagcactgagctggagaacggccctgaccctgaacttggaaacggccatgtctttcagctagaaaatggcccagattctctcaaggaggtggctggaccccatctagagaggtcagaagtggacagagggacagagcatagaattccaaagacagatgctcctctgaccacaagcaatgacaaacgccgcttctcaaaaggtgggaagacggacttccaatcgagtgactgcctggcacgggaggaagttggccgaatatggaagatggagctgctcaaagaatcggatgggctgggaattcaggttagtggaggccgaggatcaaagcgctcacctcacgctatcgttgtcactcaagtgaaggaaggaggtgccgctcacagggatggcaggctgtccttaggagatgagctgctggtaatcaatggtcatttactggtcgggctctcccacgaggaagcagtggccattcttcgctccgccacgggaatggtgcagcttgtggtggccagcaaggaaaactccgcagaggacctcctcaggttaacatctaagagcttgccagatctgaccagctcggtagaagatgtgtcctcctggactgataacgaagaccaggaggcagacggggaagaggacgaaggaaccagctcttctgtccagagagcaatgcctgggacagatgaaccccaagatgtgtgcggtgctgaggaatccaaggggaacttggaaagtcccaaacagggcagcaataaaatcaagctcaagagtcgcctttcagggggtgtacaccgccttgagtcagttgaagaatataacgagctgatggtgcggaatggggacccccggatccggatgttggaggtctcccgagatggccggaaacactccctcccgcagctgctggactcttccagtgcctcacaggaataccacattgtgaagaagtctacccgctccttaagcacgactcaggtggaatctccttggaggctcattcggccatccgtcatctcgatcattgggttgtacaaagaaaaaggcaagggccttggctttagtattgctggaggtcgagactgcattcgtggacagatggggatttttgtcaagaccatcttcccaaatggatcagctgcagaggacggaagacttaaagaaggggatgaaatcctagatgtaaatggaataccaataaagggcttgacatttcaagaagccattcatacctttaagcaaatccggagtggattatttgttttaacggtacgcacaaagttggtgagccccagcctcacaccctgctcgacacccacacacatgagcagatccgcctccccgaacttcaataccagtgggggagcctcagcgggaggttccgatgaaggcagttcttcatccctgggtcggaagacccctgggcccaaggacaggatcgtcatggaagtaacactcaacaaagagccaagagttggattaggcattggtgcctgctgcttggctctggaaaacagtcctcctggcatctacattcacagccttgctccaggatcagtggccaagatggagagcaacctgagccgcggggatcaaatcctggaagtgaactccgtcaacgtccgccatgctgctttaagcaaagtccacgccatcttgagtaaatgccctccaggacccgttcgccttgtcatcggccggcaccctaatccaaaggtttccgagcaggaaatggatgaagtcatagcacgcagcacttatcaggagagcaaagaggccaattcctctcctggcttaggtacccccttgaagagtccctctcttgcaaaaaaggactcccttatttctgaatctgaactctcccagtactttgcccacgatgtccctggccccttgtcagacttcatggtggccggttctgaggacgaggatcacccgggaagtggctgcagcacgtcggaggagggcagcctgcctcccagcacctccactcacaaggagcctggaaaacccagagccaacagcctcgtgactcttgggagccatcgggcttctgggctcttccacaagcaggtgacagttgccagacaagccagtctccccggaagcccacaggccctccgaaaccctctcctccgccagaggaaggtaggctgctacgatgccaacgatgccagtgatgaggaagagtttgacagagaaggggactgcatttcactcccaggggccctcccgggtcccatcaggcctctgtcagaggatgacccgaggcgtgtctcaatttcctcttccaagggcatggacgtccacaaccaagaggaacgaccccggaaaacactggtgagcaaggccatctcggcacctcttcttggtagctcagtggacttagaggagagtatcccagagggcatggtggatgctgcgtcctatgcagccaacctcacggactctgcagaggcccccaaggggagccctggaagctggtggaagaaggaactgtcaggatcaagtagcgcacccaaattggaatacacagtccgtacagacacccagagtccgacgaacactgggagccccagttccccccagcagaaaagtgaaggcctgggctccaggcacagaccagtggccagggtaagcccccactgcaagagatccgaggctgaggccaagcccagtggctcacagacagtgaacctgactggcagagccaatgatccatgcgatctggactcgagagtccaggccacttctgtcaaagtgactgtcgctggctttcagccaggtggagctgtggagaaggaatctctgggaaagctgaccactggagatgcttgtgtctctaccagctgtgaactagccagtgctctgtcccatctggatgccagccacctcacagagaacctgcccaaagctgcatcagagctggggcaacaacccatgactgaactggacagctcctcagacctcatctcttccccagggaagaagggggccgctcatcctgaccccagcaagacctctgtagacacagggcaagtcagtcggccagagaatcccagccagcctgcatcgcccagggtcaccaagtgcaaggccaggtctccagtcaggctcccccatgagggcagcccctccccgggggagaaagcagcggctccccctgactacagcaagactcgatcagcatcggaaaccagcacaccccacaataccaggagggtggctgccctcaggggagcgggacctggagcagagggaatgacaccagctggtgctgtcctgccaggagaccccctcacatcccaggagcagagacagggagctccaggtaaccacagtaaggctctggaaatgacaggaatccatgcacctgaaagctcccaggagccttccctgctggagggagcagattctgtgtcctcaagggcaccgcaggccagcctctccatgctgccatccactgacaacaccaaagaagcatgtggccatgtctcggggcactgctgcccaggggggagtagagagagccctgtgacggacattgacagcttcatcaaggagctggatgcttctgcagcaaggtctccgtcttcccagacgggggacagtggctctcaggagggcagtgctcagggccacccaccagccggggctggaggtgggagctcctgccgtgccgaaccagtcccggggggccagacctcctccccgaggagggcctgggctgctggtgcccccgcctacccacaatgggcctcccagccttcggttttagattcaattaatcccgacaaacattttactgtgaacaaaaactttctgagcaactactctagaaattttagcagttttcatgaagacagcacctccctatcaggcctgggtgacagcacggagccgtctctgtcatccatgtatggcgatgctgaggattcttcttctgaccctgagtcactcactgaagccccacgagcttctgccagggacggctggtcccctcctcgttcccgtgtgtctttgcacaaggaagatccttcggagtcagaagaggaacagattgagatttgttccacacgtggctgccccaatccaccctcgagtcctgctcatcttcccacccaggctgccatctgtcctgcctcagccaaagttctgtcattaaaatacagcactccgagagagtcggtggccagtccccgtgagaaggccgcctgcttgccaggctcatacacttcaggcccagactcttcccagccatcatcactcttggagatgagctctcaggagcatgaaactcatgcggacataagcacttcacagaaccacaggccctcgtgtgcagaagaaaccacagaagtcaccagcgctagctcagccatggaaaacagtccgctgtctaaagtagccaggcattttcacagtccgcccatcattctcagctcccccaacatggtaaatggcttggaacatgacctgctagatgacgaaaccctgaatcaatacgaaacaagcattaatgcagctgccagtctgtcctccttcagtgtggatgtccctaagaatggagaatctgttttggaaaacctccacatctctgaaagtcaagacctggatgacttgctacagaaaccaaaaatgatcgctaggaggcccatcatggcctggtttaaagaaataaataaacataaccaaggcacacatttgaggagcaaaaccgagaaggaacaacctctaatgcctgccagaagtcccgactccaagattcagatggtgagttcaagccaaaaaaagggcgttactgtgcctcatagccctcctcagccgaaaacaaacctggaaaataaggacctgtctaagaagagtccggcagaaatgcttctgactaatggtcagaaggcaaagtgtggtccgaagctgaagaggctcagcctcaagggcaaggccaaagtcaactctgaggcccctgctgcgaatgctgtgaaggctggggggacggaccacaggaaacccttgatctcaccccagacctcccacaaaacactttctaaggcagtgtcacagcggctccatgtagccgaccacgaggaccctgacagaaacaccacagctgcccccaggtccccccagtgtgtgctggaaagcaagccacctcttgccacctctgggccactgaaaccctcagtgtctgacacgagcatcaggacatttgtctcgcccctgacctctcccaagcctgttcctgagcaaggcatgtggagcaggttccacatggctgtcctctctgaacccgacagaggttgcccaaccacccctaaatctcctaagtgtagagcagagggcagggcgccccgtgctgactccgggccggtgagtccggcagcgtctaggaacggcatgtccgtggcagggaacagacagagtgagccgcgcctggccagccatgtggcagcagacacagcccaacccaggccgactggcgaaaaaggaggcaacataatggccagcgatcgcctcgaaagaacaaaccagctgaaaatcgtggagatttctgctgaagcagtgtcagagactgtatgtggtaacaagccagctgaaagcgacagacggggagggtgcttggcccagggcaactgtcaggagaagagtgaaatcaggctctatcgccaggtcgcagaatcatccacaagtcatccatcctcactcccatctcatgcctcccaggcagagcaggaaatgtcacgatcattcagcatggcaaaactggcgtcctcctcctcctcccttcaaacagccattagaaaggcagaatactcccagggaaaatcaagcctgatgtcagactcccgaggggtgcccagaaacagcattccagggggcccctcgggggaggaccatctctacttcaccccaaggccagcgaccaggacctactccatgccagcccagttctcaagccattttggacgggagggtcaccccccacacagcctgggtcgctctcgggacagccaggtccctgtgacaagcagtgttgtccccgaggcaaaggcatccagaggtggtcttcccagcctggctaatggacagggcatatatagtgtaaagccgctgctggacacatcgaggaatcttccagccacagatgaaggggatatcatttcagtccaggagacgagctgcctagtcacagacaaaatcaaagtcaccagacgacactactgctatgagcagaactggccccatgaatctacctcatttttctctgtgaagcagcggatcaagtcttttgagaacctggccaatgctgaccggcctgtagccaagtccggggcttccccatttttgtcggtgagctccaagcctcccattgggaggcggtcttccggcagcattgtttccgggagcctgggccacccaggtgacgcagcagcaaggttgttgagacgcagcttgagttcctgcagcgaaaaccaaagcgaagccggcaccctcctgccccagatggccaagtctccctcaatcatgacactgaccatctctcggcagaacccaccagagaccagtagcaagggctctgattcggaactaaagaaatcacttggtcctttgggaattcccaccccaacgatgaccctggcttctcctgttaagaggaacaagtcctcggtacgccacacgcagccctcgcccgtgtcccgctccaagctccaggagctgagagccttgagcatgcctgaccttgacaagctctgcagcgaggattactcagcagggccgagcgccgtgctcttcaaaactgagctggagatcacccccaggaggtcacctggccctcctgctggaggcgtttcgtgtcccgagaagggcgggaacagggcctgtccaggaggaagtggccctaaaaccagtgctgctgagacacccagttcagccagtgatacgggtgaagctgcccaggatctgccttttagaagaagctggtcagttaatttggatcaacttctagtctcagcgggggaccagcaaagattacagtctgttttatcgtcagtgggatcgaaatctaccatcctaactctcattcaggaagcgaaagcacaatcagagaatgaagaagatgtttgcttcatagtcttgaatagaaaagaaggctcaggtctgggattcagtgtggcaggagggacagatgtggagccaaaatcaatcacggtccacagggtgttttctcagggggcggcttctcaggaagggactatgaaccgaggggatttccttctgtcagtcaacggcgcctcactggctggcttagcccacgggaatgtcctgaaggttctgcaccaggcacagctgcacaaagatgccctcgtggtcatcaagaaagggatggatcagcccaggccctctgcccggcaggagcctcccacagccaatgggaagggtttgctgtccagaaagaccatccccctggagcctggcattgggagaagtgtggctgtacacgatgctctgtgtgttgaagtgctgaagacctcggctgggctgggactgagtctggatgggggaaaatcatcggtgacgggagatgggcccttggtcattaaaagagtgtacaaaggtggtgcggctgaacaagctggaataatagaagctggagatgaaattcttgctattaatgggaaacctctggttgggctcatgcactttgatgcctggaatattatgaagtctgtcccagaaggacctgtgcagttattaattagaaagcataggaattcttcatgaattttaacaagaatcattttctcagttctcttctttctttagcaaatcagagtgacttctttaaaccacaggttgttgaaatggccaacactggtacagacacggactataaaaatctccaagcttgtgcttacacatgaagcctgacttaactgtatgtgcaacagcaatgaaattaactccagaagccttccacctgcgtcacccaggccgggagggttccttcgttccagtgcctgtcccctacctttatgttatgtttactgatggggatacaagatgtgacacacccttctttatttgaaacaaacaaacatttagctagacctttgcttccttcttgccagctctcccaacatacccaatcctggtgatcagggaactaaaagtctgagggggacacaaatgtcacacctaagaggacaatcaatcattttgtatgattttgtaagtaaatgacagaatgcttttaggcacattcaatggaaggaggagatgtaggtctgtatatgttaccctgaaaagagaataagacttacttaaaaaaatgaattatgacctgttaggctgagctcaggaattgtccaaaaaggaaaaagcaaaataattaattgagagtattttttagtgagtgtaatgtataatgtacgtatgcaaagttcaactcaataggttattgatcaccatgaagtattgatcattttctatctcaaaagtgtaagccataaggctgttttacagaatagcacttctgataagctgtattaaatagccatgagcttcactgcttagagggagcagaaaggtcaacatctaaaagcaccttacaactagtttttgaacctgtcttgataagtgcttgaattcaagactggtcagtccaagagcagacaaaaatatcacaagtcagtcagtcactgggtttccatttctgaattttatgcactccaaccatgaatttaaactaaatttttagaaatcaagtatctttctaagtgtccttggatttatagacaatgtatgtacaatccaaatagaggagcttaatggaatccttttaggagactggttggtttttttccctctttcccaacatgtttaagaaatgtaacattctaagtattggatctcttttcttgacctagtataatgacaactgcagtgacttaagtttttgctgttttcgttttcccgctttgcaatttcctccttttgccaaaaatgttttcctacagaagactgtcgtgactcacgctacttgggaaactcactctggccactcctcctctggtggcatgagctgcttcccagtagctattccgattggatattccgttcgtcgtcacatagctggcttttctctcctcatgatgtaccttattttcttaggtaaataattccaaactctcatcgggtcataaagaggaggagaaacagggtgagtcaaggtaaaggagcagaaatgtagttacaagccaggtcgtcttcagtggcacaaaccaacccgttgagccctgacaacatgagtggagagtgcatttgccatacctgtgtgcatgacactaagattttatgttggagatacttctttaaataacctacagcttgggtctatggctgtgacccccagattcatggaggggctttagccatcagctttgtacatcatcatttttctgaatgaccaatcccactaaacatctttgaagtcggcctagagaggtccttcagatgagagagaaatagctggcttgtctgagtccagatttctcatcaactggcaatacaaaggaaaatatggtacaggagttagttagaaaggtcttattgattttacttctacttttcactacagttacaggtagaatactgtaggaagtcagtgcaaggtgcatgcttgattgatagatattgattgattgtttttcagtctctggggtcagttttgtggtttctgctttcttgcctaaatcaaagactatttcaagtcaacaacactgaaaactgcttttcgcctccactcttacagctgtgcctaataataattaattaataaacgcacagccctatgtgaacagacaggaatttcttgtgcaatgtggagcaaatggaatggtctccttccgcaagtctttttaatcctcatatctggagtacaagggtagacctctggcttaccacatacactatgctaaagtcatcagccactgctactacatcttgccagaaggtttccctcgccaacaaacagttgaaatttaagggaagaagcaaaagctaaactgtctttgaccctaagatagatagaaagctatttatttgtcttcagtgttcaaggcatgactagtatttctaattagcctaataaattcccacactttctgaagtgaacactaatggtattgtcctactaaaactgtcattgtttctttttttttaactggtcagtcattcacaataagctatgagggtaaataaatatgtgttataacaagtaaaccgtagttgcaagaatataccatgaagattaaagtaggctgggtttcatttccatcttcccacacatctcattgaatttgatggttgacttaattggcaccataactttgtatgatattatacattaacctttatttatgtaaagtaaaatgccttatatattaaagagtaagtgcaataatatgaaatagcctgtacattttaaaaatgttgtcaccaagttatataaatccacatctctgtaaacaaccttttttaagtaattttaaaaaaaataaacactctgcttactacttgaaaaaaaaaaaaaaaaaa

SEQ ID NO: 256 - protein, 2839 aa, Homo sapiens
MPITQDNAVLHLPLLYQWLQNSLQEGGDGPEQRLCQAAIQKLQEYIQLNFAVDESTVPPDHSPPEMEICTVYLTKELGDTETVGLSFGNIPVFGDYGEKRRGGKKRKTHQGPVLDVGCIWVTELRKNSPAGKSGKVRLRDEILSLNGQLMVGVDVSGASYLAEQCWNGGFIYLIMLRRFKHKAHSTYNGNSSNSSEPGETPTLELGDRTAKKGKRTRKFGVISRPPANKAPEESKGSAGCEVSSDPSTELENGPDPELGNGHVFQLENGPDSLKEVAGPHLERSEVDRGTEHRIPKTDAPLTTSNDKRRFSKGGKTDFQSSDCLAREEVGRIWKMELLKESDGLGIQVSGGRGSKRSPHAIVVTQVKEGGAAHRDGRLSLGDELLVINGHLLVGLSHEEAVAILRSATGMVQLVVASKENSAEDLLRLTSKSLPDLTSSVEDVSSWTDNEDQEADGEEDEGTSSSVQRAMPGTDEPQDVCGAEESKGNLESPKQGSNKIKLKSRLSGGVHRLESVEEYNELMVRNGDPRIRMLEVSRDGRKHSLPQLLDSSSASQEYHIVKKSTRSLSTTQVESPWRLIRPSVISIIGLYKEKGKGLGFSIAGGRDCIRGQMGIFVKTIFPNGSAAEDGRLKEGDEILDVNGIPIKGLTFQEAIHTFKQIRSGLFVLTVRTKLVSPSLTPCSTPTHMSRSASPNFNTSGGASAGGSDEGSSSSLGRKTPGPKDRIVMEVTLNKEPRVGLGIGACCLALENSPPGIYIHSLAPGSVAKMESNLSRGDQILEVNSVNVRHAALSKVHAILSKCPPGPVRLVIGRHPNPKVSEQEMDEVIARSTYQESKEANSSPGLGTPLKSPSLAKKDSLISESELSQYFAHDVPGPLSDFMVAGSEDEDHPGSGCSTSEEGSLPPSTSTHKEPGKPRANSLVTLGSHRASGLFHKQVTVARQASLPGSPQALRNPLLRQRKVGCYDANDASDEEEFDREGDCISLPGALPGPIRPLSEDDPRRVSISSSKGMDVHNQEERPRKTLVSKAISAPLLGSSVDLEESIPEGMVDAASYAANLTDSAEAPKGSPGSWWKKELSGSSSAPKLEYTVRTDTQSPTNTGSPSSPQQKSEGLGSRHRPVARVSPHCKRSEAEAKPSGSQTVNLTGRANDPCDLDSRVQATSVKVTVAGFQPGGAVEKESLGKLTTGDACVSTSCELASALSHLDASHLTENLPKAASELGQQPMTELDSSSDLISSPGKKGAAHPDPSKTSVDTGQVSRPENPSQPASPRVTKCKARSPVRLPHEGSPSPGEKAAAPPDYSKTRSASETSTPHNTRRVAALRGAGPGAEGMTPAGAVLPGDPLTSQEQRQGAPGNHSKALEMTGIHAPESSQEPSLLEGADSVSSRAPQASLSMLPSTDNTKEACGHVSGHCCPGGSRESPVTDIDSFIKELDASAARSPSSQTGDSGSQEGSAQGHPPAGAGGGSSCRAEPVPGGQTSSPRRAWAAGAPAYPQWASQPSVLDSINPDKHFTVNKNFLSNYSRNFSSFHEDSTSLSGLGDSTEPSLSSMYGDAEDSSSDPESLTEAPRASARDGWSPPRSRVSLHKEDPSESEEEQIEICSTRGCPNPPSSPAHLPTQAAICPASAKVLSLKYSTPRESVASPREKAACLPGSYTSGPDSSQPSSLLEMSSQEHETHADISTSQNHRPSCAEETTEVTSASSAMENSPLSKVARHFHSPPIILSSPNMVNGLEHDLLDDETLNQYETSINAAASLSSFSVDVPKNGESVLENLHISESQDLDDLLQKPKMIARRPIMAWFKEINKHNQGTHLRSKTEKEQPLMPARSPDSKIQMVSSSQKKGVTVPHSPPQPKTNLENKDLSKKSPAEMLLTNGQKAKCGPKLKRLSLKGKAKVNSEAPAANAVKAGGTDHRKPLISPQTSHKTLSKAVSQRLHVADHEDPDRNTTAAPRSPQCVLESKPPLATSGPLKPSVSDTSIRTFVSPLTSPKPVPEQGMWSRFHMAVLSEPDRGCPTTPKSPKCRAEGRAPRADSGPVSPAASRNGMSVAGNRQSEPRLASHVAADTAQPRPTGEKGGNIMASDRLERTNQLKIVEISAEAVSETVCGNKPAESDRRGGCLAQGNCQEKSEIRLYRQVAESSTSHPSSLPSHASQAEQEMSRSFSMAKLASSSSSLQTAIRKAEYSQGKSSLMSDSRGVPRNSIPGGPSGEDHLYFTPRPATRTYSMPAQFSSHFGREGHPPHSLGRSRDSQVPVTSSVVPEAKASRGGLPSLANGQGIYSVKPLLDTSRNLPATDEGDIISVQETSCLVTDKIKVTRRHYCYEQNWPHESTSFFSVKQRIKSFENLANADRPVAKSGASPFLSVSSKPPIGRRSSGSIVSGSLGHPGDAAARLLRRSLSSCSENQSEAGTLLPQMAKSPSIMTLTISRQNPPETSSKGSDSELKKSLGPLGIPTPTMTLASPVKRNKSSVRHTQPSPVSRSKLQELRALSMPDLDKLCSEDYSAGPSAVLFKTELEITPRRSPGPPAGGVSCPEKGGNRACPGGSGPKTSAAETPSSASDTGEAAQDLPFRRSWSVNLDQLLVSAGDQQRLQSVLSSVGSKSTILTLIQEAKAQSENEEDVCFIVLNRKEGSGLGFSVAGGTDVEPKSITVHRVFSQGAASQEGTMNRGDFLLSVNGASLAGLAHGNVLKVLHQAQLHKDALVVIKKGMDQPRPSARQEPPTANGKGLLSRKTIPLEPGIGRSVAVHDALCVEVLKTSAGLGLSLDGGKSSVTGDGPLVIKRVYKGGAAEQAGIIEAGDEILAINGKPLVGLMHFDAWNIMKSVPEGPVQLLIRKHRNSS

SEQ ID NO: 257 - DNA, 2676 bp, Homo sapiens
atattggaaaggcgccgccgccgcctccgccttggagctcggggtgtttcggggactgcggccacaggcaggaaggcgctcctctcctgccccgccgacgcccggccagcccgcttcgccctgacctgtttcctcatgactgcccccggccctgctgccgacggacgtcgccccggcgtccggatttaacacggaaacccggatcggaggccgcgcggggaggaggagggcgacccggtcggtcctgcgaccctctcggcccggctcggcgcctcggcgggagccatgacctcgctgacccagcgcagctccggcctggtgcagcggcgcaccgaggcctcccgcaacgccgccgacaaggagcgggcggcgggcggcggcgccggcagcagcgaggacgacgcgcagagccgccgcgacgagcaggacgacgacgacaagggcgactccaaggaaacgcggctgaccctgatggaggaagtgctcctgctgggcctcaaggaccgcgagggttacacatcattttggaatgactgtatatcatctggattacgtggctgtatgttaattgaattagcattgagaggaaggttacaactagaggcttgtggaatgagacgtaaaagtctattaacaagaaaggtaatctgtaagtcagatgctccaacaggggatgttcttcttgatgaagctctgaagcatgttaaggaaactcagcctccagaaacggtccagaactggattgaattacttagtggtgagacatggaatccattaaaattgcattatcagttaagaaatgtacgggaacgattagctaaaaacctggtggaaaagggtgtattgacaacagagaaacagaacttcctactttttgacatgacaacacatcccctcaccaataacaacattaagcagcgcctcatcaagaaagtacaggaagccgttcttgacaaatgggtgaatgaccctcaccgcatggacaggcgcttgctggccctcatttacctggctcatgcctcggacgtcctggagaatgcttttgctcctcttctggacgagcagtatgatttggctaccaagagagtgcggcagcttctcgacttagaccctgaagtggaatgtctgaaggccaacaccaatgaggttctgtgggcggtggtggcggcgttcaccaagtaactctgctcggggtgaaccattctcctttctctcaagtaaaccagtagtttttcttctgttgacttctggttttctgtaatttgtactttcccacactataattggcttctgttttacaaaatggtgggtggctttttcttttttgtacgtgtacaggattctgctggtacgagaggccttcctctttctgtttttaaaaaaagttttactgccatattggcattccattccctgttgccatcctcactgttacctgttttgggtttctggtctactttgactttcaaagtacctccagcctcctcatacgcacagcttttggatgacctcagcttgagtttctccatatgtgcatgtacatctagcattctgcctacagttcagacagaagtcacaaaaaggccttcaactcaccaaaggtaaatatctgtatctattaggacattttttacatagacttcagttgagatgtatacttagcaaaattatttttaaattgaaacagcacagtaaatacttaatataaaatgtcccttggattttgcttcccatgtaaatctattgtattattacacttgttataattttaactataaaggtccaattgtttcacagagccagtttgggatgggctgcattccatttatgctgtatatagtttgaattatatataaattaccccttcttctggccacccctgctcccatcttagtattttgcaagatctaatcagttgtacacctggtgcccctcgcttgcttcaatcatggttatttgatggcaaaatcgacctcttgtcgctgaaggagagagaaaagatgtgtgtctgattggtcctgggattttttgagctgtgccatttatggtactctttgcctatgcatccccttgttagattttttttaaattttatcttactgtttttataatttctattgggaagaggcttgtgaccagtaccaatcttgagtttctttttctgtccacaagtaaattaatatctgctctgaaatgtcatttatctactcacacattcttggggaaaaaaatcaaatgtcagtcctagcagatgttgcatgtaaattggtagcaagtaatgattacaacccagaggattaagaattttgtaacagaaagctctatgttttaattttttatatacaattaggataattagcattgtcagactataaacctttgctttttaaagtttatttttactatttctttatcactttattgtatcatcaccattggtttcataatgtaaatactatatgttgaacaaattaaatgtcaaaattttttattaccatagtccatgttaatagtggggctttcaggtgtttagagattttttttgttgttgttaacattcattgcaaaagtactagatggtgtataactctagagttgaattttaagggattccctaatatgtatactatctttttatctgaagtaataaataaacaatgatcttgaaagtgcctg

SEQ ID NO: 258 - protein, 298 aa, Homo sapiens
MTSLTQRSSGLVQRRTEASRNAADKERAAGGGAGSSEDDAQSRRDEQDDDDKGDSKETRLTLMEEVLLLGLKDREGYTSFWNDCISSGLRGCMLIELALRGRLQLEACGMRRKSLLTRKVICKSDAPTGDVLLDEALKHVKETQPPETVQNWIELLSGETWNPLKLHYQLRNVRERLAKNLVEKGVLTTEKQNFLLFDMTTHPLTNNNIKQRLIKKVQEAVLDKWVNDPHRMDRRLLALIYLAHASDVLENAFAPLLDEQYDLATKRVRQLLDLDPEVECLKANTNEVLWAVVAAFTK

SEQ ID NO: 259 - DNA, 416 bp, Homo sapiens
atgggcaaattcatgaaacctgggaaggtggtgcttgtcctggctggaggctacgctggacgcaaagccatcattgtgaagaacaatgatgatggcacctcagatagccccttcagccatgctctggtggctggaattgaccgctatcccctcaaagtgacagctgccatgggcaagaagaagatctccaagaggtcaaagatcaagtcttttgtgaaagtttataactacaatcacctaatggccacaaggtattctgtgggtatcttattcccttagacaaaactgtcatcaataaggatgtctttagagaccctgctcttaaacgcaaggccccacgagaagccaaggtcaagtttgaagagagatataagacaggcaagaacaagtggttcttccagaagctgcggttttag

SEQ ID NO: 260 - DNA, 5187 bp, Homo sapiens
gggcgagcggtgtcagcggcggagccggatgcgggcggcatcgcggcggtcgcggccttggggatgggcggagccccagccgctagtgctggtggccgccgctgctgccccagctggagcccgagccgccgcctctgcgtccgcgcgtcgctgcttcccagggcggcggtatgctggggaaaggagtagtcggcggtggcggcggcaccaaggcccccaagccctccttcgtgtcgtacgtacgccctgaggaaattcacacaaacgaaaaggaagtaacagagaaggaagtaactcttcacttgttgccaggtgaacagctgctttgtgaagccagcacagtactgaagtatgtccaggaagattcctgtcagcatggggtctatgggaggcttgtctgcacagacttcaagattgccttcttgggtgatgatgaatctgcattggataatgatgaaactcaatttaagaataaggttataggagaaaatgacattacactccactgtgttgatcagatttatggagtgtttgatgagaaaaagaaaactctctttggacaactgaagaaataccctgagaagctcatcatccactgcaaagaccttcgagtgttccagttttgtctgaggtacacaaaggaagaggaagtcaaaaggattgtcagtggcataattcatcatacccaggctcctaaactgcttaaacgattatttctgttttcctatgcgactgctgcacaaaacaatacagtcactgatcccaagaaccataccgtaatgtttgacacacttaaggactggtgttgggaactggaacggaccaaaggcaacatgaagtacaaagcagtgagtgtcaacgaaggctataaagtctgtgagagattgccagcatactttgttgtccccacccctcttcctgaagagaatgtgcagcgctttcagggtcatggcataccaatatggtgttggtcctgccacaatggaagtgcccttttgaaaatgtcagcactgcccaaagaacaggatgacggcattttacaaatccaaaagagcttcttagatggaatttacaagaccatccacaggccaccctatgaaattgttaaaacggaagacctgtcaagcaacttcctgtccctgcaggaaatccagactgcatactctaaatttaaacagctatttctgatagataacagtactgaattttgggacacagatataaaatggttttctctgttggaaagtagcagctggcttgacataatcagacgttgcctgaaaaaagcaatagagattacagaatgtatggaagcacaaaacatgaatgttcttcttttagaggagaatgcatccgacctctgctgtctcatttcctctctggtgcaactgatgatggacccccactgcagaaccagaattggtttccagagcctcatccaaaaggagtgggtcatgggtggccactgtttcttggatcgctgcaaccatctccgccagaacgacaaagaggaggttcctgtgttcctgcttttcctagattgtgtctggcagctggtgcaccagcatcccccggcatttgaattcacagagacttacctgactgttttgtcagatagcctgtatatacctatttttagcaccttcttcttcaattcacctcatcaaaaagatactaacatgggtagagaaggccaggatacacaaagcaagcctttgaatctgctcaccgtgtgggattggtcggtgcagtttgaacccaaagcccagacattgctcaaaaaccctctttatgtggaaaagccaaaactggacaaaggccaacggaaaggaatgcgcttcaaacatcaacgacaactttctttgccacttacacaatctaagtcatctcccaaaagaggatttttcagggaagaaacagatcatttaattaaaaaccttctgggcaagagaattagcaaacttattaattcttctgatgagctccaagacaactttcgagagttctatgacagctggcatagcaagtccactgactaccatggtttgttgttaccgcatatcgaggggcccgaaatcaaagtctgggcccagcgctacctacgttggattccagaagcccaaatcctaggtggtggccaagtggccactctgagcaaactcttggaaatgatggaggaagtccagagtttacaagagaagatcgacgagagacaccacagccagcaggccccccaggctgaggccccctgcctgctgaggaactctgcccgcctctcgtctttgtttcctttcgctctgctccagcgacattcctctaagcccgtcttacccaccagtggctggaaagctttgggagatgaagacgatttggccaaacgagaagatgagttcgtggacctaggggatgtgtgacctgtttgttgagtgattgtgaaagaggaatgtgggagattgggacagctgatccctggatttgtgtcacgctacagctcatgctggctgggtccttagcccggcactccgttagaataaacctgggccttcgggaaaagaggtggctctcattatttttcatgattctaaaagactatgcaattaaaaccgcatctgtagtattactaattggaaggaattattacttgacccgtaatagggttgtggccgttttctgatgcctaagtattatacagagcccacaatggccagtttactaccagaaagggcttcagtaagatattcttggacttgatactttcttcagatcctctttgtgccaagataatttatccagtcattgggaatagtaagtttctgtgtaacccatctcaattatagaagcaagttcagctttatgtatttgtatggggagttgaagattcagatagaggtattaagatgtgtggcatttacttaaaccatcacatttttttctttctacgcccccttgcctgtaaaacacctgggaagttccactggtgtcatccatcctgatgcttcagaccaccctcccttcttcacagaccgtgtcactttgcctgtgggtgggggctagccagccaccaccctcttttctgtgctgccagccccaggtcttcctccgcctgctccacaccactcgccgctgtccctctgcactccctgccttggtgcgtgtagtcccagtgtctcactgccaaacctcttggttacgctgcggggatctgtttctttgcctgagatccttcctgaggagcgtccattcctctggagtctctccttgtttggaacaaatcgcttcgcctttttctacttgcctgctgaagctttggagcacttgtgattgcagttttctgccgcaacccctgagccgagttcctcacattcttttacctttatggactgatgggattgggtcacttttgaatgtggctttcataggaaagcagcttaaacataaatatcagaagtgatgattatcatatgatacctcagtgattttaaaagccatagaagaaacttgactatgcctggtcaccttcttggatctgctgtctaaatgatatatatatgatatatatgtgatatatatatatcatatatatgatatatatatatatatcacatatatatgatatatatatgatatatatatatcacatatatatgatatatatatcatatatatgatatatattttttttaatgcaggaaagtatactttgtaaggagcagatttttttgttctcagtggaaccctgtcaaatcgcataaaagaggaaaaaaacaaaactcattagaatgttttaaattgaatgttcgccttttacatatatttgctcttcagtatggatcccaatttgaatgttacatgttcggaaaaactttcagttgctcaagggcaataagaaaatttgaggccgggtgtggtggctcacgcctgtaatcccagcactttgggaggctcaggtgggcgaattgcttgagcccaggagttcgagaccagccggggcaacatggcaaaaccctgtctctactaaaaatacaaaaattagctgggtgtggtggtgcatgcctgtagtcccagctactcgggaggctgaggtgggaggatcccgtgagcctgggaggtggagtttgcagtgagctaagatcgtgccactgcactccggcctgggtgatggagcaagacctcgtctcagaaaattggaaactattgactaagagaagtttctaggtttgcactgaattgtcttttgtacatacagtgaattgttttgctgttctccccactccatattaatgcaggagccaggttggtctgttaggatgaacaaaggttgaggggagggcaggattcgtgcatctgggggccaaacacatgttccgtcttgattgccttaagagttactagcgaggtcagtgttaggcttgcaatagggattttaaaatacactaactagttccttagctaccttcacatacattctataggccttcttaaattagcactaacctccacttccttctctgccccattgcctcccaaatatgctatggagctatttttgttaccacgttataacgtgaatatttatacagtagcctcttcaggctttgtaattttcattccaaaaatgcccggtgtgatgctttacactctacaaagtatggtttaaaggcacaaggtcatggcctttgtcatagcagttgaatgtgcattgacatatttttctatgattttttaaaattacaatagaaaaataagctgttgtaacgtgtaaggtcatgacaatttttgtatttatatttgaaatcagatttctataactcgtatttgtgtacagaattctcaatggatttatatattgtgaaatttttatctgagattgggatgtggattatgcttaacagtgagagctgaaatgagaccatttactttgtttaaaatgctgtactgtgcaagtttggaaatgtaaattaatttactgtatataatatcttgagtttgtttatacctccaagtttttacactgaagataaactagctttaattcaaaactttttttttctttataagggaataagctgttgagctaaacctgtatacttgtgctttttattttctggatgcacaatgaaagtttatacttgtatctcactgcatcatatctgattgcagaaattaaagcacaatttacaagcaata

SEQ ID NO: 261 - protein, 747 aa, Homo sapiens
MLGKGVVGGGGGTKAPKPSFVSYVRPEEIHTNEKEVTEKEVTLHLLPGEQLLCEASTVLKYVQEDSCQHGVYGRLVCTDFKIAFLGDDESALDNDETQFKNKVIGENDITLHCVDQIYGVFDEKKKTLFGQLKKYPEKLIIHCKDLRVFQFCLRYTKEEEVKRIVSGIIHHTQAPKLLKRLFLFSYATAAQNNTVTDPKNHTVMFDTLKDWCWELERTKGNMKYKAVSVNEGYKVCERLPAYFVVPTPLPEENVQRFQGHGIPIWCWSCHNGSALLKMSALPKEQDDGILQIQKSFLDGIYKTIHRPPYEIVKTEDLSSNFLSLQEIQTAYSKFKQLFLIDNSTEFWDTDIKWFSLLESSSWLDIIRRCLKKAIEITECMEAQNMNVLLLEENASDLCCLISSLVQLMMDPHCRTRIGFQSLIQKEWVMGGHCFLDRCNHLRQNDKEEVPVFLLFLDCVWQLVHQHPPAFEFTETYLTVLSDSLYIPIFSTFFFNSPHQKDTNMGREGQDTQSKPLNLLTVWDWSVQFEPKAQTLLKNPLYVEKPKLDKGQRKGMRFKHQRQLSLPLTQSKSSPKRGFFREETDHLIKNLLGKRISKLINSSDELQDNFREFYDSWHSKSTDYHGLLLPHIEGPEIKVWAQRYLRWIPEAQILGGGQVATLSKLLEMMEEVQSLQEKIDERHHSQQAPQAEAPCLLRNSARLSSLFPFALLQRHSSKPVLPTSGWKALGDEDDLAKREDEFVDLGDV

SEQ ID NO: 262 - DNA, 4746 bp, Homo sapiens
gttctccgctgaggaggagcggggcagaggagggaggcagcgggtgagagttcagagttcagcagcagcagcccgagcccatgattcccatatgccctgtagtttctttcacctatgtgcccagccggctgggggaagatgccaaaatggcgaccggcaactactttggattcacccacagcggggcggcggcggcggcggctgcggcccaatatagccagcagccagcttcgggtgtagcctattctcatccaactacagttgctagctacactgtccatcaggctccagtagctgctcacacagttactgctgcctatgcaccagcagccgccacagttgcagttgccaggcctgctccagtagctgttgcagctgctgcaacagctgctgcttatggaggctaccccactgcacacacagcaactgactatggttatactcagaggcaacaagaagcaccaccaccaccacccccagctactacacaaaactaccaggattcatactcatatgtaaggtccacagctcctgctgtagcttatgatagtaagcaatactaccaacaaccaacagcaactgctgctgctgtagctgccgctgcccaacctcagccttctgttgctgaaacttactatcagacagcccccaaagcaggttacagccaaggtgcaactcagtatactcaagcccagcaaactcgacaagtgacagccataaaaccagccacaccaagtccagctaccactactttctccatctatcctgtatcctccaccgtacagccagtagcagctgcggctactgtggtgccatcctatactcagagtgctacttacagtaccacagcagttacatattctggtacgtcttattcaggttatgaagcagcagtgtattcagctgcatcttcctactatcaacagcagcagcagcaacagaagcaggcagcagcagcagctgctgctgctgctgcaacagctgcctggacagggaccacctttactaaaaaagcaccattccaaaataaacaactgaaaccaaaacagcctcccaaaccaccacagattcactattgtgatgtttgtaagatcagctgtgctggaccacagacttataaagaacatttagaaggacagaaacataaaaaaaaagaagctgcattgaaagcctcacaaaataccagcagcagcaacagttctactcgtgggactcaaaatcagctacgttgtgagctctgcgatgtgtcttgtacaggagcagatgcgtatgctgcccacattcgtggtgctaagcatcagaaagtggttaagttacacacaaaacttggtaaacccattccatcaacagaaccaaatgttgttagccaagctacttcttcaacagctgtatctgcttcaaagccgactgcctctccttcaagcattgcagcaaacaattgtactgtgaatacgtcatcagttgcaacgtcttcaatgaagggtcttacgactacaggaaactcgtctcttaatagcacatctaacactaaagtatcagcagtgcctacaaatatggctgccaagaaaacatctacccccaaaataaattttgttggtggtaataagctgcagtcaacaggaaataaagcagaagacataaaaggaaccgaatgtgttaaaagtactcctgtcacttctgctgtgcagattcctgaagtaaagcaagacacagtgtcagaaccagtcacacctgcatctcttgctgctttacagagtgatgtgcagccagtgggccatgattatgtggaagaggtacgaaatgatgaaggaaaagtaattcggttccattgtaaattatgcgagtgcagctttaatgatcccaatgctaaggagatgcacttaaaagggcgaagacacagacttcaatataaaaaaaaagtaaatccagatttgcaagtagaagtaaagcctagtattcgagcaagaaagattcaagaagagaaaatgaggaagcaaatgcagaaggaggagtactggcgaagacgagaagaagaggagcgttggagaatggaaatgagacgttatgaagaggacatgtactggaggagaatggaggaagaacaacatcattgggatgatcgccgccgaatgccagatggaggttatcctcatggtcctccaggcccattaggccttctgggagtccgaccaggcatgcctcctcagcctcaggggcctgcacccttacgtcgtcctgactcatctgatgaccgttatgtaatgacaaaacatgccaccatttatccaactgaagaggagttacaggcagttcagaaaattgtttctattactgaacgtgctttaaaactcgtttcagacagtttgtctgaacatgagaagaacaagaacaaagagggagatgataagaaagagggaggtaaagacagagctttgaaaggagttttgcgagtgggagtattggcaaaaggattacttctccgaggagatagaaatgtcaaccttgttttgctgtgctcagagaaaccttcaaagacattattaagccgtattgcagaaaacctacccaaacagcttgctgttataagccctgagaagtatgacataaaatgtgctgtatctgaagcggcaataattttgaattcatgtgtggaacccaaaatgcaagtcactatcacactgacatctccaattattcgagaagagaacatgagggaaggagatgtaacctcgggtatggtgaaagacccaccggacgtcttggacaggcaaaaatgccttgacgctctggctgctctacgccacgctaagtggttccaggctagagctaatggtctgcagtcctgtgtgattatcatacgcattcttcgagacctctgtcagcgagttccaacttggtctgattttccaagctgggctatggagttactagtagagaaagcaatcagcagtgcttctagccctcagagccctggggatgcactgagaagagtttttgaatgcatttcttcagggattattcttaaaggtagtcctggacttctggatccttgtgaaaaggatccctttgataccttggcaacaatgactgaccagcagcgtgaagacatcacatccagtgcacagtttgcattgagactccttgcattccgccagatacacaaagttctaggcatggatccattaccgcaaatgagccaacgttttaacatccacaacaacaggaaacgaagaagagatagtgatggagttgatggatttgaagctgaggggaaaaaagacaaaaaagattatgataacttttaaaaagtgtctgtaaatcttcagtgttaaaaaaacagatgcccatttgttggctgtttttcattcataataatgtctacattgaaaaatttatcaagaatttaaaggatttcatggaagaaccaagtttttctatgatattaaaaaatgtacagtgttaggtattatttgaatggaaagacacccaaaaaaaaaaatgtgctccgactagggggaaaacagtagttccgattttttcccattatttttattttattttctggttgccctagcttccccccctatttttgtgtcttttattaactagtgcattgtcttattaaatcttcactgtatttaatgcaggatgtgtgcttcagttgctctgtgtattttgatattttaatttagaggttttgtttgctttttgacactagttgtaagttactttgttatagatggtatcctttaccccttcttaatattttacagcagtacgtttttttgtaacgtgagactgcagagtttgtttttctatatgtgaaggattacaacacaaaaagttatcctgccattcgagtgctcagaactgaatgtttctgcagatcttgtggcatttgtctctagtgtgatatataaaggtgtaattaagacagagttctgttaatctaatcaagtttgctgttagttgtgcattagcagtataaaagctaatatatactatatggtcttgcaacagttttaaagcctctgcataattgataataaaaatgcatgacattcttgtttttaatagacttttaaaatcataattttaggtttaacacgtagatctttgtacagttgactttttgacatagcaaggccaaaaataactttctgaatatttttttcttgtgtataagtggaaagggcatttttcacatataagtgggctaaccaatattttcaaaagaacttcatcattgtacaactaacaacagtaactagcccttaattatggtgacagttccttattggtgtgtgtgagattactctagcaactattacagtataacacagatgatcttctccacacaccccatcacccagataatttacagttctgttaacagtgaggttgataaagtattactgataaaaaattatctaaggaaaaaaacagaaaattatttggtgtggccatcttacctgcttatgtctcctacacaaagctaaatattctagcagtgatgtaatgaaaaattacatcttactgttgatatatgtatgctctggtacacagatgtcattttgttgtcacagcactacagtgaaatacacaaaaaatgaaattcatataatgacttaaatgtattatatgttagaattgacaacataaactacttttgctttgaaatgatgtatgcttcagtaaaatcatattcaaatttaaaaaaaaaaaaaaaaaaaaaaaaaaaaaaaa

SEQ ID NO: 263 - protein, 1074 aa, Homo sapiens
MIPICPVVSFTYVPSRLGEDAKMATGNYFGFTHSGAAAAAAAAQYSQQPASGVAYSHPTTVASYTVHQAPVAAHTVTAAYAPAAATVAVARPAPVAVAAAATAAAYGGYPTAHTATDYGYTQRQQEAPPPPPPATTQNYQDSYSYVRSTAPAVAYDSKQYYQQPTATAAAVAAAAQPQPSVAETYYQTAPKAGYSQGATQYTQAQQTRQVTAIKPATPSPATTTFSIYPVSSTVQPVAAAATVVPSYTQSATYSTTAVTYSGTSYSGYEAAVYSAASSYYQQQQQQQKQAAAAAAAAAATAAWTGTTFTKKAPFQNKQLKPKQPPKPPQIHYCDVCKISCAGPQTYKEHLEGQKHKKKEAALKASQNTSSSNSSTRGTQNQLRCELCDVSCTGADAYAAHIRGAKHQKVVKLHTKLGKPIPSTEPNVVSQATSSTAVSASKPTASPSSIAANNCTVNTSSVATSSMKGLTTTGNSSLNSTSNTKVSAVPTNMAAKKTSTPKINFVGGNKLQSTGNKAEDIKGTECVKSTPVTSAVQIPEVKQDTVSEPVTPASLAALQSDVQPVGHDYVEEVRNDEGKVIRFHCKLCECSFNDPNAKEMHLKGRRHRLQYKKKVNPDLQVEVKPSIRARKIQEEKMRKQMQKEEYWRRREEEERWRMEMRRYEEDMYWRRMEEEQHHWDDRRRMPDGGYPHGPPGPLGLLGVRPGMPPQPQGPAPLRRPDSSDDRYVMTKHATIYPTEEELQAVQKIVSITERALKLVSDSLSEHEKNKNKEGDDKKEGGKDRALKGVLRVGVLAKGLLLRGDRNVNLVLLCSEKPSKTLLSRIAENLPKQLAVISPEKYDIKCAVSEAAIILNSCVEPKMQVTITLTSPIIREENMREGDVTSGMVKDPPDVLDRQKCLDALAALRHAKWFQARANGLQSCVIIIRILRDLCQRVPTWSDFPSWAMELLVEKAISSASSPQSPGDALRRVFECISSGIILKGSPGLLDPCEKDPFDTLATMTDQQREDITSSAQFALRLLAFRQIHKVLGMDPLPQMSQRFNIHNNRKRRRDSDGVDGFEAEGKKDKKDYDNF

SEQ ID NO: 264 - DNA, 3952 bp, Homo sapiens
actcgattgtaatttcatccccgggccggtcgagcctccctccctcccgcggccagcccttccctcccagtcggcctccttcgtcgcccccgcccccgcgaaaagccctgcagcttgcagccggcttcactcgcgcacgccgacctcccggctgcagtcctacctcttggaactacccgtgtttccgggcccagccctcgcagccccccacctcctcgccccggcccggggatccgttggggccgcgtcccccacgcgcccccggagacgccctttccgtgtgcgcccgggacttggtgaaactttgcaggcgccggctgcgaaatggatttaatccgaggcgtcttgctccggctcctgctcctggcttccagcctcggacccggcgcggtgtcgctccgagcggccatccgaaaaccaggcaaggtagggcctcctcttgacatcaagctgggcgcattgaactgtacggctttcagcatccagtggaaaatgccaaggcatcctggaagtcccatccttgggtacactgtcttttactctgaggttggcgcagataaatccctgcaggagcagttgcacagcgtgcctctcagccgggacatcccgaccacggaggaagtgattggagatttgaaaccaggcactgaatatcgtgtgagcatagcagcttacagccaggctggcaaagggcggctgagctctcctcggcatgtcaccactttgtcccaagattcctgcctgcctcctgcagctccccagcagccacatgtcattgtggtttcggattctgaggtggccctgtcttggaaacctggagcgagtgaaggaagcgcccctattcagtactattctgtggaattcatcaggccagatttcgacaagaagtggacctcaatccatgagcggatccagatggactccatggttatcaagggcctcgatccagataccaactaccagtttgccgtgagggcaatgaattcccatggccccagcccccgcagctggcccagtgacatcatccggaccctctgccctgaggaggcgggaagtggccgctatggaccccgttatatcaccgacatgggagctggtgaggatgatgaaggatttgaagacgacttagatttggatatttcctttgaggaggttaaaccacttcctgctaccaaaggagggaataagaaatttttggtggaaagcaagaagatgtctatatctaacccaaagaccatttctaggctcatcccccctacctcagcatctctccctgtgaccacggtggctccccagcccattcccatacagagaaaggggaagaatggtgtggccataatgtcaaggctctttgacatgccttgtgatgaaactctctgctctgctgacagcttctgtgtcaatgactacacctgggggggctcgcgatgccagtgcaccctgggcaaaggtggtgagagctgctcagaagatattgttatccagtatcctcagttctttggccactcctatgtaacgtttgaacctctgaagaattcttatcaggcatttcaaattactcttgaatttagggcggaggcagaggatggcttactgctctactgtggggagaacgaacacgggaggggggatttcatgtccctggctatcatccgacgctccctgcagttcaggtttaattgtggaactggggttgccatcatcgtaagtgagaccaaaatcaaactagggggttggcacacggttatgctctacagagatgggctgaacgggctgctgcagctgaacaatggcaccccagtgacaggccagtctcagggccaatacagtaaaattactttccggacacctctctatcttggtggcgctcccagcgcttactggttggttagagcaacagggacaaaccgaggctttcaaggctgtgtgcagtcgctcgctgtgaatgggaggagaattgacatgaggccctggcccctgggaaaagcactcagtggggctgatgtgggggaatgcagcagtggaatctgtgatgaggcctcgtgcatccatggtggcacctgcacagcaatcaaagccgactcctacatttgcctctgtccccttgggtttaaaggtcgacactgtgaagatgctttcaccttgaccattcctcagttcagagagtctctgagatcttacgctgcaactccctggccactggagccccagcattacctttccttcatggaatttgagatcacatttcggccagactcaggagatggtgtcctcctgtacagctatgacacaggcagcaaagacttcctgtccatcaacttggcagggggccacgtggagttccgctttgactgtggctctgggaccggtgtcctcaggagtgaagatcccctcaccctgggcaactggcacgagcttcgtgtatctcgcacagcaaagaatggaatcttacaggtggataagcagaagatagtggagggaatggcagagggaggcttcacacagattaagtgcaacacagacattttcattggcggagtccccaattatgatgatgtgaagaagaactcgggtgtcctgaagcctttcagcgggagcatccagaagatcatcctgaatgaccgaaccatccatgtgaagcatgacttcacctccggagtgaatgtggagaatgcggcccacccctgtgtgagagccccttgtgcccatgggggcagctgccggcccaggaaggagggctatgactgtgactgccccttgggctttgaggggcttcactgccagaaagcgatcatagaagccattgagatcccgcagtttatcggccgcagttacctgacgtatgacaacccagatatcttgaagagggtgtcaggatcaagatcaaatgtgttcatgaggtttaaaacaactgccaaggatggccttttgctgtggaggggagacagccccatgagacccaacagcgacttcatttccttgggccttcgggatggagccctcgtgttcagctataacctgggcagtggtgtggcatccatcatggtgaatggctccttcaacgatggtcggtggcaccgagttaaggccgttagggatggccagtcaggaaagataaccgtggatgactatggagccagaacaggcaaatccccaggcatgatgcggcagcttaacatcaatggagctctgtatgtgggtggaatgaaggaaattgctctgcacactaacaggcaatatatgagagggctcgtgggctgtatctctcacttcaccctgtccaccgattaccacatttccctcgtggaagatgccgtggatgggaaaaacatcaacacttgtggagccaagtaacaccagctggccttgtccaagggacagagccttctattctgagaatcccaggggccctcagaccctgcctgatgctatatgcagaggcccagggaccaggtgtgtttcctctcaccaagaagaaagtacacactgatgagaaactgagaaccaagacaggcatccctgggtggcctttcctgctgacactccacgagctgacccagcagaattctctgtgtaggaagcatcggactttgtccattgaatatgtagcggctgccagagatcacacatcaatgcaaattccagagcctgtctgctatagctcagtgactgtgttgtgattcatagtacattaaaaagagagagagagagaaagaatcccacagggcactattaaaatacttctctccttccctgactcatgacactcttcctgacagcagaatgactgtgtgaccttgaacttcacatttcccacattggcccttggattgttcggattaaccccttccactcctcactggctggttcactgtgttctgactagtccataaaaataaagatggaaggagatcaaaaaaaaaaaaaaaaaaaaaaaaaaaaaaaaaaaaaa

SEQ ID NO: 265 - protein, 1009 aa, Homo sapiens
MDLIRGVLLRLLLLASSLGPGAVSLRAAIRKPGKVGPPLDIKLGALNCTAFSIQWKMPRHPGSPILGYTVFYSEVGADKSLQEQLHSVPLSRDIPTTEEVIGDLKPGTEYRVSIAAYSQAGKGRLSSPRHVTTLSQDSCLPPAAPQQPHVIVVSDSEVALSWKPGASEGSAPIQYYSVEFIRPDFDKKWTSIHERIQMDSMVIKGLDPDTNYQFAVRAMNSHGPSPRSWPSDIIRTLCPEEAGSGRYGPRYITDMGAGEDDEGFEDDLDLDISFEEVKPLPATKGGNKKFLVESKKMSISNPKTISRLIPPTSASLPVTTVAPQPIPIQRKGKNGVAIMSRLFDMPCDETLCSADSFCVNDYTWGGSRCQCTLGKGGESCSEDIVIQYPQFFGHSYVTFEPLKNSYQAFQITLEFRAEAEDGLLLYCGENEHGRGDFMSLAIIRRSLQFRFNCGTGVAIIVSETKIKLGGWHTVMLYRDGLNGLLQLNNGTPVTGQSQGQYSKITFRTPLYLGGAPSAYWLVRATGTNRGFQGCVQSLAVNGRRIDMRPWPLGKALSGADVGECSSGICDEASCIHGGTCTAIKADSYICLCPLGFKGRHCEDAFTLTIPQFRESLRSYAATPWPLEPQHYLSFMEFEITFRPDSGDGVLLYSYDTGSKDFLSINLAGGHVEFRFDCGSGTGVLRSEDPLTLGNWHELRVSRTAKNGILQVDKQKIVEGMAEGGFTQIKCNTDIFIGGVPNYDDVKKNSGVLKPFSGSIQKIILNDRTIHVKHDFTSGVNVENAAHPCVRAPCAHGGSCRPRKEGYDCDCPLGFEGLHCQKAIIEAIEIPQFIGRSYLTYDNPDILKRVSGSRSNVFMRFKTTAKDGLLLWRGDSPMRPNSDFISLGLRDGALVFSYNLGSGVASIMVNGSFNDGRWHRVKAVRDGQSGKITVDDYGARTGKSPGMMRQLNINGALYVGGMKEIALHTNRQYMRGLVGCISHFTLSTDYHISLVEDAVDGKNINTCGAK

SEQ ID NO: 266 - DNA, 4142 bp, Homo sapiens
gacaactgagacggctgcagaccatggggcagggagcatatggagcacggatatgccagacagagggatgattcatatcccaggcaggatggagcagggcagtgtgctatttcatcgtgctactcagaacttatgaattgtttatttctggaatttcccatttaatatttttggactgtggttgatcgagggtaaatgaaattgcggaaagcaaaaatacagataagggggactgcttgctgtacaaagatagagacaagaggaaggagctgtcctcaagggccttttgtgtgaagacatctggcacacagatacgctgcatgcaggtggcttgagagaacatgcatccaggccctgaggaggcgggaagtggccgctatggaccccgttatatcaccgacatgggagctggtgaggatgatgaaggatttgaagacgacttagatttggatatttcctttgaggaggttaaaccacttcctgctaccaaaggagggaataagaaatttttggtggaaagcaagaagatgtctatatctaacccaaagaccatttctaggctcatcccccctacctcagcatctctccctgtgaccacggtggctccccagcccattcccatacagagaaaggggaagaatggtgtggccataatgtcaaggctctttgacatgccttgtgatgaaactctctgctctgctgacagcttctgtgtcaatgactacacctgggggggctcgcgatgccagtgcaccctgggcaaaggtggtgagagctgctcagaagatattgttatccagtatcctcagttctttggccactcctatgtaacgtttgaacctctgaagaattcttatcaggcatttcaaattactcttgaatttagggcggaggcagaggatggcttactgctctactgtggggagaacgaacacgggaggggggatttcatgtccctggctatcatccgacgctccctgcagttcaggtttaattgtggaactggggttgccatcatcgtaagtgagaccaaaatcaaactagggggttggcacacggttatgctctacagagatgggctgaacgggctgctgcagctgaacaatggcaccccagtgacaggccagtctcagggccaatacagtaaaattactttccggacacctctctatcttggtggcgctcccagcgcttactggttggttagagcaacagggacaaaccgaggctttcaaggctgtgtgcagtcgctcgctgtgaatgggaggagaattgacatgaggccctggcccctgggaaaagcactcagtggggctgatgtgggggaatgcagcagtggaatctgtgatgaggcctcgtgcatccatggtggcacctgcacagcaatcaaagccgactcctacatttgcctctgtccccttgggtttaaaggtcgacactgtgaagatgctttcaccttgaccattcctcagttcagagagtctctgagatcttacgctgcaactccctggccactggagccccagcattacctttccttcatggaatttgagatcacatttcggccagactcaggagatggtgtcctcctgtacagctatgacacaggcagcaaagacttcctgtccatcaacttggcagggggccacgtggagttccgctttgactgtggctctgggaccggtgtcctcaggagtgaagatcccctcaccctgggcaactggcacgagcttcgtgtatctcgcacagcaaagaatggaatcttacaggtggataagcagaagatagtggagggaatggcagagggaggcttcacacagattaagtgcaacacagacattttcattggcggagtccccaattatgatgatgtgaagaagaactcgggtgtcctgaagcctttcagcgggagcatccagaagatcatcctgaatgaccgaaccatccatgtgaagcatgacttcacctccggagtgaatgtggagaatgcggcccacccctgtgtgagagccccttgtgcccatgggggcagctgccggcccaggaaggagggctatgactgtgactgccccttgggctttgaggggcttcactgccagaaagcgatcatagaagccattgagatcccgcagtttatcggccgcagttacctgacgtatgacaacccagatatcttgaagagggtgtcaggatcaagatcaaatgtgttcatgaggtttaaaacaactgccaaggatggccttttgctgtggaggggagacagccccatgagacccaacagcgacttcatttccttgggccttcgggatggagccctcgtgttcagctataacctgggcagtggtgtggcatccatcatggtgaatggctccttcaacgatggtcggtggcaccgagttaaggccgttagggatggccagtcaggaaagataaccgtggatgactatggagccagaacaggcaaatccccaggcatgatgcggcagcttaacatcaatggagctctgtatgtgggtggaatgaaggaaattgctctgcacactaacaggcaatatatgagagggctcgtgggctgtatctctcacttcaccctgtccaccgattaccacatttccctcgtggaagatgccgtggatgggaaaaacatcaacacttgtggagccaagtaacaccagctggccttgtccaagggacagagccttctattctgagaatcccaggggccctcagaccctgcctgatgctatatgcagaggcccagggaccaggtgtgtttcctctcaccaagaagaaagtacacactgatgagaaactgagaaccaagacaggcatccctgggtggcctttcctgctgacactccacgagctgacccagcagaattctctgtgtaggaagcatcggactttgtccattgaatatgtagcggctgccagagatcacacatcaatgcaaattccagagcctgtctgctatagctcagtgactgtgttgtgattcatagtacattaaaaagagagagagagagaaagaatcccacagggcactattaaaatacttctctccttccctgactcatgacactcttcctgacagcagaatgactgtgtgaccttgaacttcacatttcccacattggcccttggattgttcggattaaccccttccactcctcactggctggttcactgtgttctgactagtccataaaaataaagatggaaggagatcaaacacagaatcataatcataatgcggccccctcccccagagcttacctcgaatgtgaaatccctacttcttataatgcagagttaaggagctgagcccccatgattttgtagctgtacttttgtatgtgtatatttttatagctgcagattgtccacacagtatacttttggaagtttgggtggatgactctgaattcttgcacacctttcctaaaaatttctcccaagagagacttgtttgggccttttgtggtgtcagtggaatggataggtaacttgggtgggcaacttggggagctgaccattctcttttggtaaatgttgacggctcaagaggatgaatatgaagctttccaagataagcagattaaaaggaacatgtgttaccgaggtaggtcactgtcatttttgttttaagagttggggggagtatctatagtaaacttgaataaaggggacaaagctagaacttattcattcattcattcacttatggagttgttactgattttgcggaggtcaggttcataccaatggacactaatacaatcagtgttcccaaggctgtgcaggggtggggggacatgctgtcaggatggtctgagcatctgggtgagaaccagagaaacaggacttcttccttctgtaccatgagctgtgtccctttactatgcaagcacatgaccccagagacagctggttcactggcagatccccatgatggacttactaagggaaaggtgagatgaacactgcccccaaggagggggtgaaatatgatctaacttatgcaagagcctataattagtcccagtctcgactctacatttgtttgtgcagcattcattcagcaaagacttttggggtttgtgcaaggcacagttttaagcacataatgtaattctaaaaga

SEQ ID NO: 267 - protein, 775 aa, Homo sapiens
MHPGPEEAGSGRYGPRYITDMGAGEDDEGFEDDLDLDISFEEVKPLPATKGGNKKFLVESKKMSISNPKTISRLIPPTSASLPVTTVAPQPIPIQRKGKNGVAIMSRLFDMPCDETLCSADSFCVNDYTWGGSRCQCTLGKGGESCSEDIVIQYPQFFGHSYVTFEPLKNSYQAFQITLEFRAEAEDGLLLYCGENEHGRGDFMSLAIIRRSLQFRFNCGTGVAIIVSETKIKLGGWHTVMLYRDGLNGLLQLNNGTPVTGQSQGQYSKITFRTPLYLGGAPSAYWLVRATGTNRGFQGCVQSLAVNGRRIDMRPWPLGKALSGADVGECSSGICDEASCIHGGTCTAIKADSYICLCPLGFKGRHCEDAFTLTIPQFRESLRSYAATPWPLEPQHYLSFMEFEITFRPDSGDGVLLYSYDTGSKDFLSINLAGGHVEFRFDCGSGTGVLRSEDPLTLGNWHELRVSRTAKNGILQVDKQKIVEGMAEGGFTQIKCNTDIFIGGVPNYDDVKKNSGVLKPFSGSIQKIILNDRTIHVKHDFTSGVNVENAAHPCVRAPCAHGGSCRPRKEGYDCDCPLGFEGLHCQKAIIEAIEIPQFIGRSYLTYDNPDILKRVSGSRSNVFMRFKTTAKDGLLLWRGDSPMRPNSDFISLGLRDGALVFSYNLGSGVASIMVNGSFNDGRWHRVKAVRDGQSGKITVDDYGARTGKSPGMMRQLNINGALYVGGMKEIALHTNRQYMRGLVGCISHFTLSTDYHISLVEDAVDGKNINTCGAK

SEQ ID NO: 268 - DNA, 3328 bp, Homo sapiens
gagacggctgcagaccatggggcagggagcatatggagcacggatatgccagacagagggatgattcatatcccaggcaggatggagcagggcagtgtgctatttcatcgtgctactcagaacttatgaattgtttatttctggaatttcccatttaatatttttggactgtggttgatcgagggtaaatgaaattgcagaaagcaaaaatacagataagggggactgcttgctgtacaaagatagagacaagaggaaggagctgtcctcaagggccttttgtgtgaagacatctggcacacagatacgctgcatgcaggtggcttgagagaacatgcatccaggtttaattgtggaactggggttgccatcatcgtaagtgagaccaaaatcaaactagggggttggcacacggttatgctctacagagatgggctgaacgggctgctgcagctgaacaatggcaccccagtgacaggccagtctcaggggaatgcagcagtggaatctgtgatgaggcctcgtgcatccatggtggcacctgcacagcaatcaaagccgactcctacatttgcctctgtccccttgggtttaaaggtcgacactgtgaagatgctttcaccttgaccattcctcagttcagagagtctctgagatcttacgctgcaactccctggccactggagccccagcattacctttccttcatggaatttgagatcacatttcggccagactcaggagatggtgtcctcctgtacagctatgacacaggcagcaaagacttcctgtccatcaacttggcagggggccacgtggagttccgctttgactgtggctctgggaccggtgtcctcaggagtgaagatcccctcaccctgggcaactggcacgagcttcgtgtatctcgcacagcaaagaatggaatcttacaggtggataagcagaagatagtggagggaatggcagagggaggcttcacacagattaagtgcaacacagacattttcattggcggagtccccaattatgatgatgtgaagaagaactcgggtgtcctgaagcctttcagcgggagcatccagaagatcatcctgaatgaccgaaccatccatgtgaagcatgacttcacctccggagtgaatgtggagaatgcggcccacccctgtgtgagagccccttgtgcccatgggggcagctgccggcccaggaaggagggctatgactgtgactgccccttgggctttgaggggcttcactgccagaaagcgatcatagaagccattgagatcccgcagtttatcggccgcagttacctgacgtatgacaacccagatatcttgaagagggtgtcaggatcaagatcaaatgtgttcatgaggtttaaaacaactgccaaggatggccttttgctgtggaggggagacagccccatgagacccaacagcgacttcatttccttgggccttcgggatggagccctcgtgttcagctataacctgggcagtggtgtggcatccatcatggtgaatggctccttcaacgatggtcggtggcaccgagttaaggccgttagggatggccagtcaggaaagataaccgtggatgactatggagccagaacaggcaaatccccaggcatgatgcggcagcttaacatcaatggagctctgtatgtgggtggaatgaaggaaattgctctgcacactaacaggcaatatatgagagggctcgtgggctgtatctctcacttcaccctgtccaccgattaccacatttccctcgtggaagatgccgtggatgggaaaaacatcaacacttgtggagccaagtaacaccagctggccttgtccaagggacagagccttctattctgagaatcccaggggccctcagaccctgcctgatgctatatgcagaggcccagggaccaggtgtgtttcctctcaccaagaagaaagtacacactgatgagaaactgagaaccaagacaggcatccctgggtggcctttcctgctgacactccacgagctgacccagcagaattctctgtgtaggaagcatcggactttgtccattgaatatgtagcggctgccagagatcacacatcaatgcaaattccagagcctgtctgctatagctcagtgactgtgttgtgattcatagtacattaaaaagagagagagagagaaagaatcccacagggcactattaaaatacttctctccttccctgactcatgacactcttcctgacagcagaatgactgtgtgaccttgaacttcacatttcccacattggcccttggattgttcggattaaccccttccactcctcactggctggttcactgtgttctgactagtccataaaaataaagatggaaggagatcaaacacagaatcataatcataatgcggcccccttccccagagcttacctcgaatgtgaaatccctacttcttataatgcagagttaaggagctgagcccccatgattttgtagctgtacttttgtatgtgtatatttttatagctgcagattgtccacacagtatacttttggaagtttgggtggatgactctgaattcttgcacacctttcctaaaaatttctcccaagagagacttgtttgggccttttgtggtgtcagtggaatggataggtaacttgggtgggcaacttggggagctgaccattctcttttggtaaatgttgacggctcaagaggatgaatatgaagctttccaagataagcagattaaaaggaacatgtgttaccgaggtaggtcactgtcatttttgttttaagagttggggggagtatctatagtaaacttgaataaaggggacaaagctagaacttattcattcattcattcacttatggagttgttactgattttgcggaggtcaggttcataccaatggacactaatacaatcagtgttcccaaggctgtgcaggggtggggggacatgctgtcaggatggtctgagcatctgggtgagaaccagagaaacaggacttcttccttctgtaccatgagctgtgtccctttactatgcaagcacatgaccccagagacagctggttcactggcagatccccatgatggacttactaagggaaaggtgagatgaacactgcccccaaggagggggtgaaatatgatctaacttatgcaagagcctataattagtcccagtctcgactctacatttgtttgtgcagcattcattcagcaaagacttttggggtttgtgcaaggcacagttttaagcacataatgtaattctaaaagatgaataaactagagaggttc

SEQ ID NO: 269 - protein, 375 aa, Homo sapiens
MEFEITFRPDSGDGVLLYSYDTGSKDFLSINLAGGHVEFRFDCGSGTGVLRSEDPLTLGNWHELRVSRTAKNGILQVDKQKIVEGMAEGGFTQIKCNTDIFIGGVPNYDDVKKNSGVLKPFSGSIQKIILNDRTIHVKHDFTSGVNVENAAHPCVRAPCAHGGSCRPRKEGYDCDCPLGFEGLHCQKAIIEAIEIPQFIGRSYLTYDNPDILKRVSGSRSNVFMRFKTTAKDGLLLWRGDSPMRPNSDFISLGLRDGALVFSYNLGSGVASIMVNGSFNDGRWHRVKAVRDGQSGKITVDDYGARTGKSPGMMRQLNINGALYVGGMKEIALHTNRQYMRGLVGCISHFTLSTDYHISLVEDAVDGKNINTCGAK

SEQ ID NO: 270 - DNA, 2228 bp, Homo sapiens
taagaggacgttctggactctcgggcagagctttgtgagagaaacaaggctggcttcaagtgatctgcaaccagagtaattgggatttgacaaggactgtgaaaggctgactctccctgttctctttcatgctggcaccgggcagagtgtgggaactactgcctcaatacgatcatagaagccattgagatcccgcagtttatcggccgcagttacctgacgtatgacaacccagatatcttgaagagggtgtcaggatcaagatcaaatgtgttcatgaggtttaaaacaactgccaaggatggccttttgctgtggaggggagacagccccatgagacccaacagcgacttcatttccttgggccttcgggatggagccctcgtgttcagctataacctgggcagtggtgtggcatccatcatggtgaatggctccttcaacgatggtcggtggcaccgagttaaggccgttagggatggccagtcaggaaagataaccgtggatgactatggagccagaacaggcaaatccccaggcatgatgcggcagcttaacatcaatggagctctgtatgtgggtggaatgaaggaaattgctctgcacactaacaggcaatatatgagagggctcgtgggctgtatctctcacttcaccctgtccaccgattaccacatttccctcgtggaagatgccgtggatgggaaaaacatcaacacttgtggagccaagtaacaccagctggccttgtccaagggacagagccttctattctgagaatcccaggggccctcagaccctgcctgatgctatatgcagaggcccagggaccaggtgtgtttcctctcaccaagaagaaagtacacactgatgagaaactgagaaccaagacaggcatccctgggtggcctttcctgctgacactccacgagctgacccagcagaattctctgtgtaggaagcatcggactttgtccattgaatatgtagcggctgccagagatcacacatcaatgcaaattccagagcctgtctgctatagctcagtgactgtgttgtgattcatagtacattaaaaagagagagagagagaaagaatcccacagggcactattaaaatacttctctccttccctgactcatgacactcttcctgacagcagaatgactgtgtgaccttgaacttcacatttcccacattggcccttggattgttcggattaaccccttccactcctcactggctggttcactgtgttctgactagtccataaaaataaagatggaaggagatcaaacacagaatcataatcataatgcggcccccttccccagagcttacctcgaatgtgaaatccctacttcttataatgcagagttaaggagctgagcccccatgattttgtagctgtacttttgtatgtgtatatttttatagctgcagattgtccacacagtatacttttggaagtttgggtggatgactctgaattcttgcacacctttcctaaaaatttctcccaagagagacttgtttgggccttttgtggtgtcagtggaatggataggtaacttgggtgggcaacttggggagctgaccattctcttttggtaaatgttgacggctcaagaggatgaatatgaagctttccaagataagcagattaaaaggaacatgtgttaccgaggtaggtcactgtcatttttgttttaagagttggggggagtatctatagtaaacttgaataaaggggacaaagctagaacttattcattcattcattcacttatggagttgttactgattttgcggaggtcaggttcataccaatggacactaatacaatcagtgttcccaaggctgtgcaggggtggggggacatgctgtcaggatggtctgagcatctgggtgagaaccagagaaacaggacttcttccttctgtaccatgagctgtgtccctttactatgcaagcacatgaccccagagacagctggttcactggcagatccccatgatggacttactaagggaaaggtgagatgaacactgcccccaaggagggggtgaaatatgatctaacttatgcaagagcctataattagtcccagtctcgactctacatttgtttgtgcagcattcattcagcaaagacttttggggtttgtgcaaggcacagttttaagcacataatgtaattctaaaagatgaataaactagagaggttc

SEQ ID NO: 271 - protein, 152 aa, Homo sapiens
MRFKTTAKDGLLLWRGDSPMRPNSDFISLGLRDGALVFSYNLGSGVASIMVNGSFNDGRWHRVKAVRDGQSGKITVDDYGARTGKSPGMMRQLNINGALYVGGMKEIALHTNRQYMRGLVGCISHFTLSTDYHISLVEDAVDGKNINTCGAK

SEQ ID NO: 272 - DNA, 4811 bp, Homo sapiens
ggtcctgccctgcgaaccagcgcggccccctggcgctgaggctgctccggccatggcccctcggccccgcgcccgcccaggggtcgctgtcgcctgctgctggctcctcactgttgttctacgctgctgcgtatcattcaatgttgatgtgaaaaattcaatgactttcagcggcccggtggaagacatgtttggatatactgttcaacaatatgaaaatgaagaaggaaaatgggtgcttattggttctccgttagttggccaacccaaaaacagaactggagatgtctataagtgtccagttgggagaggtgaatcattaccttgtgtaaagttggatctaccagttaatacatcaattcccaatgtcacagaagtaaaggagaacatgacatttggatcaactttagtcaccaacccaaatggaggatttctggcttgtgggcccttatatgcctatagatgtggacatttgcattacacaactggaatctgttctgacgtcagccccacatttcaagtcgtgaattccattgcccctgtacaagaatgcagcactcaactggacatagtcatagtgctggatggttccaacagtatttacccatgggacagtgttacagcttttttaaatgaccttcttgaaagaatggatattggtcctaaacagacacaggttggaattgtacagtatggagaaaacgtgacccatgagttcaacctcaataagtattcttccaccgaagaggtacttgttgcagcaaagaaaatagtccagagaggtggccgccagactatgacagctcttggaatagacacagcaagaaaggaggcattcacggaagcccggggtgcccgaagaggagttaaaaaagtcatggttattgtgacagatggagagtctcatgacaatcatcgactgaagaaggtcatccaagactgtgaagatgaaaacattcaacggttttccatagctattcttggcagctataaccgaggaaatttaagcactgaaaaatttgtggaggaaataaaatcaattgcaagtgaacccactgaaaagcatttcttcaatgtctctgatgaattggctctagtcaccattgttaaaactctgggagaaagaatatttgccctggaagccacagctgaccagtcagcagcttcatttgaaatggaaatgtctcagactggcttcagtgctcattattcacaggactgggtcatgcttggagcagtaggagcctatgattggaatggaacagttgtcatgcagaaggctagtcaaatcataatccctcgaaacacaacctttaatgttgagtctaccaaaaagaatgaaccgcttgcttcttatttaggttacactgtaaactctgctactgcttcttctggagatgtgctctatattgctggacagcctcggtacaatcatacaggccaggtcattatctacaggatggaagatggaaacatcaaaattctccagacgctcagtggagaacagattggttcctactttggcagtattttaacaacaactgacattgacaaggattctaatactgacattcttctagtcggagcccctatgtacatgggaacagagaaggaggagcaaggaaaagtgtatgtgtatgctctcaatcagacaaggtttgaatatcaaatgagcctggaacctattaagcagacgtgctgttcatctcggcagcacaattcatgcacaacagaaaacaaaaatgagccatgcggggctcgttttggaactgcaattgctgctgtaaaagacctcaatcttgatggatttaatgacatcgtgataggagctccgctggaagatgatcacgggggagctgtgtacatttatcatggaagtggcaagactataaggaaagagtatgcacaacgtattccatcaggtggggatggtaagacactgaaattttttggccagtctatccacggagaaatggatttaaatggtgacggtctgacagatgtgactattgggggccttggtggtgctgccctcttctggtcccgagatgtggccgtagttaaagtgaccatgaattttgagccaaataaagtgaatattcaaaagaaaaactgccatatggagggaaaggaaacagtatgcataaatgctacagtgtgttttgatgtgaaattaaagtctaaagaagacacgatttatgaagctgatttgcagtaccgtgtcaccctagattcactaagacaaatatcacgaagttttttctctggaactcaagagagaaaggttcaaaggaacatcacagttcgaaaatcagaatgcactaagcactccttctacatgttggacaagcatgactttcaggactctgtgagaataacgttggactttaatcttaccgatccagaaaatgggcctgttcttgatgattctctaccaaactcagtacatgaatatattccctttgccaaagattgtggaaataaggaaaaatgtatctcagacctcagcctgcatgtcgccaccactgaaaaggacctgctgattgtccgatcccagaatgataagttcaacgttagcctcacagtcaaaaatacaaaggacagtgcctataacaccaggacaatagtgcattattctccaaatctagttttttcaggaattgaggctatccaaaaagacagttgtgaatctaatcataatatcacatgtaaagttggatatcccttcctgagaagaggagagatggtaactttcaaaatattgtttcagtttaacacatcctatctcatggaaaatgtgaccatttatttaagtgcaacaagtgacagcgaagaacctcctgaaaccctttctgataatgtagtaaacatttctatcccggtaaaatatgaagttggactacagttttacagctctgcaagtgaataccacatttcaattgctgccaatgagacagtccctgaagttattaattctactgaggacattggaaatgaaattaatatcttctacttgattagaaaaagtggatcttttccaatgccagagcttaagctgtcaatttcattccccaatatgacatcaaatggttaccctgtgctgtacccaactggattgtcatcttctgagaatgcaaactgcagaccccatatctttgaggatcctttcagtatcaactctggaaagaaaatgactacatcaactgaccatctcaaacgaggcacaattctggactgcaatacatgtaaatttgctaccatcacatgtaatctcacttcttctgacatcagccaagtcaatgtttcgcttatcttgtggaaaccaacttttataaaatcatatttttccagcttaaatcttactataaggggagaacttcggagtgaaaatgcatctctggttttaagtagcagcaatcaaaaaagagagcttgctattcaaatatccaaagatgggctaccgggcagagtgccattatgggtcatcctgctgagtgcttttgccggattgttgctgttaatgctgctcattttagcactgtggaagattggattcttcaaaagaccactgaaaaagaaaatggagaaatgaaatattttatgaaagaaaataataacaattattcaataatctatcctcaggtttgcctcaaatatgtgacaagaaatgtataattcatgacatagtcatgtaactatgtaatccatcagggattcattacttggaaaatgacaggtcatgcattatccaaaaacaataccaaaaagacatattttataaaatgacaaaaaatattttacataattactcatttttgttgagtaagcaaaattacaaagtgtttttaaaaaaacctgtacaaatatgtttatgtattaaatcaccatccaaaatatttaaggaatatataaaaagatttttatgatcatagaaacatctattttcaaaacaatataaattaagcttttccccttgattcctgttggatatccatgttcagcatgacagtcagcactcgtaaatgccaagaaaagaattacctgaaaaagatcatttctccctattcaaatgagaatattttcccttggtagaatccatatacaatatggattgaaaattaagtcaccaagaatacatttagcatctttgtgttgggttctatacctaaaaattttccctccctgcccaaggtgattggaaagtactgcaattgagctaaaattttatctaggatggaaaatcaggatagactcgtttaaaaacaagtatattaaatgggttaaattaagcttttacagaacatgcttaattttgatattgagctctaaatgcaaaactcttttatactgaaaaaacacttaaagtagttttgtgtggcatcacagtgatttgtcatgaaaagccatatatgggggacatgctaaaatggcttctgaatgaaatacgacagcagagaaagatgccactgaaatgctgaaattatctttgctgagcagcttttgaatgctaagggttccagtatgtgacccaaagaaagagttgtctcaactccttggtacagggttcattcaaacccccaagctgtgagagtgtgtttatttttaattttttaaaaggtatttaatttccaaccacacttcttatttttttgaaaagacaattttccatttcagtattacattttaccaagaagtcactgctttttaggtgtgttgcatcaatatttaaataaaatcccagaaatgtattttaaagaatttcaggtttgaaaactcaaaccaacaggaagatatcaaaaaaaaaaaaaaaa

SEQ ID NO: 273 - protein, 1179 aa, Homo sapiens
MAPRPRARPGVAVACCWLLTVVLRCCVSFNVDVKNSMTFSGPVEDMFGYTVQQYENEEGKWVLIGSPLVGQPKNRTGDVYKCPVGRGESLPCVKLDLPVNTSIPNVTEVKENMTFGSTLVTNPNGGFLACGPLYAYRCGHLHYTTGICSDVSPTFQVVNSIAPVQECSTQLDIVIVLDGSNSIYPWDSVTAFLNDLLERMDIGPKQTQVGIVQYGENVTHEFNLNKYSSTEEVLVAAKKIVQRGGRQTMTALGIDTARKEAFTEARGARRGVKKVMVIVTDGESHDNHRLKKVIQDCEDENIQRFSIAILGSYNRGNLSTEKFVEEIKSIASEPTEKHFFNVSDELALVTIVKTLGERIFALEATADQSAASFEMEMSQTGFSAHYSQDWVMLGAVGAYDWNGTVVMQKASQIIIPRNTTFNVESTKKNEPLASYLGYTVNSATASSGDVLYIAGQPRYNHTGQVIIYRMEDGNIKILQTLSGEQIGSYFGSILTTTDIDKDSNTDILLVGAPMYMGTEKEEQGKVYVYALNQTRFEYQMSLEPIKQTCCSSRQHNSCTTENKNEPCGARFGTAIAAVKDLNLDGFNDIVIGAPLEDDHGGAVYIYHGSGKTIRKEYAQRIPSGGDGKTLKFFGQSIHGEMDLNGDGLTDVTIGGLGGAALFWSRDVAVVKVTMNFEPNKVNIQKKNCHMEGKETVCINATVCFDVKLKSKEDTIYEADLQYRVTLDSLRQISRSFFSGTQERKVQRNITVRKSECTKHSFYMLDKHDFQDSVRITLDFNLTDPENGPVLDDSLPNSVHEYIPFAKDCGNKEKCISDLSLHVATTEKDLLIVRSQNDKFNVSLTVKNTKDSAYNTRTIVHYSPNLVFSGIEAIQKDSCESNHNITCKVGYPFLRRGEMVTFKILFQFNTSYLMENVTIYLSATSDSEEPPETLSDNVVNISIPVKYEVGLQFYSSASEYHISIAANETVPEVINSTEDIGNEINIFYLIRKSGSFPMPELKLSISFPNMTSNGYPVLYPTGLSSSENANCRPHIFEDPFSINSGKKMTTSTDHLKRGTILDCNTCKFATITCNLTSSDISQVNVSLILWKPTFIKSYFSSLNLTIRGELRSENASLVLSSSNQKRELAIQISKDGLPGRVPLWVILLSAFAGLLLLMLLILALWKIGFFKRPLKKKMEK

SEQ ID NO: 274 - DNA, 997 bp, Homo sapiens
atgttgtgggaggtccctgaggccgctgaggtcgttcgtgtctgttgaacggctgtgggcgtcttgctgccttgggtagggggttaaaatcgttcttgagaggaacgtctctgtgcgaagagataatgagtttagctctgagaagtgagcttgtagtggacaaaacaaagaggaaaaaaagaagagaactgtctgaggaacagaaacaagaaattaaagatgcttttgaactatttgatacagacaaagatgaagcaatagattatcatgaattaaaggtggcaatgagagccttggggtttgatgtaaaaaaagctgatgtactgaagattcttaaagattatgacagagaagccacagggaaaatcacctttgaagattttaatgaagttgtgacagactggatattggaaagagatccccatgaagaaatactcaaggcatttaaactatttgatgatgatgattcaggtaaaataagcttgaggaatttgcgacgtgttgctagagaattgggtgaaaacatgagtgatgaagaacttcgagctatgatagaagaatttgacaaagatggtgatggagaaataaaccaagaggagttcattgctattatgactggtgacatttaaagaattacaaggataaacactaagaatgttgcagttaccatcttatattctatttttgtgcctggagccatgtgaaaaaaaccaacttagttcttttatcctaaaggaccaaaaataagcatcttatatatctgtattttactactgttaagtttctttgtatgaactgtgttgttagtactcagatagtttagctttgtatttataatagagcttttatataaagttttaaaaattgaatgtgtgatatgtgttctttgaaggttttttaatttaacatttatagtcactttttagtgcacacattttccagactttcgttaataaaatatttattttattagaattttaaaaaaaaaaaaaaaaaa

SEQ ID NO: 275 - protein, 167 aa, Homo sapiens
MSLALRSELVVDKTKRKKRRELSEEQKQEIKDAFELFDTDKDEAIDYHELKVAMRALGFDVKKADVLKILKDYDREATGKITFEDFNEVVTDWILERDPHEEILKAFKLFDDDDSGKISLRNLRRVARELGENMSDEELRAMIEEFDKDGDGEINQEEFIAIMTGDI

SEQ ID NO: 276 - DNA, 4300 bp, Homo sapiens
caacccgcgaggccccacactttctgcgccagctgggagtgcgcgccctgcagagccagtgggtgggcggttctagctcttcccaccctcactgcgggcctctgctgtcacacgcccggggtggcgaaacggtcgccacctgagtctccattctgctgcagtggcccctgcgttaaagctctctcgtggtgcggctgccgaggctgcggtagctcctgcgcccccgtgctggtggcgcagcctctgcttgctgccgacctggcggaagggtgcgggagcgcacgctacgggcagcgtcggtctgcgtccttcctcctcctattccgacccccgcatcccacgcccccgcctcgctctacgcctcctccctggctgcaggcagaccgcttcacacagccgcagtgccctgtgtgtggacagcctgtgggagactcgcacgcccacactcaccccgcctggctgcacccctgcccagcatgtcggcgctcgagtggtacgcccacaagtctctaggcgatggtatcttctggattcaagaacgtttctacgagtcgggcaaccgtgccaacatctggctggtgcgcggctccgagcaggacgtggtgatcgatacaggcctggggctgcgcagcctcccggagtacctgtactcctccggcctcttgcaggaccgagaggccaaagaggacgcggcgcgccggccactgcttgccgtggccacccacgtgcacttcgaccactccggcggcctctaccagttcgaccgcgtggcagtgcaccacgccgaggccgaggcgctggctcgcggggacaactttgagaccgtgacctggctttccgatagcgaggtggtgcgggcgcccagccccggctggagggccagacagttccgggtacaggcggtgcagcccaccctcatcctgcaggatggggatgtgatcaaccttggtgacagacagctcactgttatgcacatgccaggtcactccaggggcagtatttgcttacatgacaaagaccgaaagattctcttcagtggagacgtcgtgtatgatggatcactgattgactggctcccatacagcaggataagtgactatgttggaacttgtgaacgtctaatagaattagtggacagaggtctggtagagaaggtgcttcctgggcacttcaatacctttggtgctgaaaggctttttcgattggcttctaactatatttcaaaagctgggatatgtcacaaagtttctacttttgccatgcgatctcttgcaagtttagctctacgtgtaacaaattctaggacctcgccctagtatctatactgataatatattttgattaattatatacattaattcattctgtgctatttaactgattaatagtgagcatttcatgaagtgcttttataccactattatatatcagagaaagattgagaatgaataagccaaaaagaaaattgttagtttaaattgttttctttcttccaagaaagaagccacttaaataagcttatactttgccaaagctgtcatcttgtaatatatgctctagaaatgacataaaggtttatggggaagcaaagagagattttgtggcaagagaactgcccttgcctctgtttttcttgttttattcccttgatgacctagggaaaaaaaggcatgtagagtattatgtttatactttaaacttgatatttttagtgtattatttaaagataaaggttcttgggtttaaaatacattagaacttaatgcagacatataaagtaacattgagaatgacaactaaaacattccattgttatggtcctgaattttttatgcttcatttcatgtatttattctttgtataattatagcatacatgttatgtaatataacttatgaaaagtacagtgaattttgctttattgcaaagctttaaatataaatttcagagtgcttcagtaaaaagctactatatattgttgtttgttattgtgtaggtaatattttcaattatgaaagtgaaatgcaaatgtctgttatctaactacaaattgtcagatttcttaaaaggacactgtcaggcaaatttgaaaatatacacattgagaataattttttattattatatcctattttaatattaacagctattatgaacaaaatttttcctgttaaatagcgacttcagtattgtgttatgttttacagcgttaaaacaactatgaagatctgcagctattcttttacttaacatgcatatgtactacagagggatttttaaattaattgcaaaatgtgcattagctattgacttagagtgaattgccttttgtatcctgattcacaacacctattcctgttcagtattctttgtcttgaatagagaagtctatgttcgtaaagtcatataaaaggttataccactatttagtaaaaagttttagtttggtgctgttaataataatttgctaaaaggccttttagaatatttcataaagggttttaaacagttttttcccactgcctttttattattgacatatctaaaaccaaactgaaatcgctttggaaatcagattttttaatgttaggaagatccagcaattttggtttctgaaaaattacaaaacttttctaccctacagatgcccaggttctttagttttttattcattcaactcacacacacataaacatatacatacacaaacacaatcccacatgcaaacacacacagccacatatatacatgtgtagcacagcgctaaacactgtggaggctaaaaaaagtcaaagacaacattataactaaaagtcgaaagcacacaaaatataaataatagtgtatgcaagttaatgtacattatacatgcgtgtaagggacataaatggaggggtgtgaactttggttaggcaaagtttactggaggaggggtttttgagtcaaatttggaaggatgaacttgttagatagtcagagttggaaacaaaacaatccaagaatagggatataagcattgctagtctagaatagtctattccttgtgaaaatataaatttaattttcaggaatccagtatattccaaacatcacatatttagcatgagaaaaattgatttgtgattgtgtatatgagtcattgttaatgggagacaagctgaactgccacatgccaccaaatgaacctttacttcaatcaaaaaggagggtatgattggttcaattatattaacagaatatcatgggcatttctctatgatggtcattcaaggtagtaggtctctttcaactgagtgcaacattgagaataatgatttggttcagggcaactacaaataatcacttactaagccttaaataaagccattatttttatatcaatagcacaaaggaaaaccaaaagtccttaaccactgaccatttttatcatattttaggcctttttttaaaaaatcagggtatagtaggcactaagttttattaggaaatatttaaacctgctgaaggatttatttataaaaagtgcaatttttcaaaacacattattattttttaatttcccaattttttcagtttttcaaattgtaccacaacatagaactgtgatattttgctattacttcaatgtgaataaataaggtaaagtatatcatttattgagtgcccatgctgtacatttaaaatatgcattatttaatttaatcttactcccagcaccaaaaggtaattgaccagcctcaacacaattttggacaaagctagtaactgaacacaggtctgtctgccccacacttctctttctcttgtaactgcacaatagcagaaaattggcaagatgtatttttactttccaagatgccgtgtgtgccaagaataaatgaaatgatgttaaagcataataataacatatctttaaaaagcttttcaaaatatattttcaccctgacagtgacccttgtaacttaaatgatttttggaaatattagtatgtaagtataattcaaagttgtcaaaatgtaagacatttagaagtaatttttattatttatattgttaatacttaatcactggaaattcattttccttactcgatgttttctttcaactgagaagcctaaaacaaacaaaaaccttgtgtgttatcctgatatagttgactaaatgtatttgttcttatatggatagtaatatgaatgtgacatgcaccaattgtcctattataattttcagataagtgtaactaagcacttgtgtaataaatattagtcattttatttcaaaaaaaaaaaaaaaaaaaaaa

SEQ ID NO: 277 - protein, 279 aa, Homo sapiens
MSALEWYAHKSLGDGIFWIQERFYESGNRANIWLVRGSEQDVVIDTGLGLRSLPEYLYSSGLLQDREAKEDAARRPLLAVATHVHFDHSGGLYQFDRVAVHHAEAEALARGDNFETVTWLSDSEVVRAPSPGWRARQFRVQAVQPTLILQDGDVINLGDRQLTVMHMPGHSRGSICLHDKDRKILFSGDVVYDGSLIDWLPYSRISDYVGTCERLIELVDRGLVEKVLPGHFNTFGAERLFRLASNYISKAGICHKVSTFAMRSLASLALRVTNSRTSP

SEQ ID NO: 278 - DNA, 3285 bp, Homo sapiens
actccgcggtcctggtgccgcgtgcaggtcggtgcgcgcttctcccgaggtggaacgggcggcagtcaagcgccggcgttctctgccgtcaccctttccttgccggccggcacttcggctgcagagttttgcccacgcttcgagacttagggagcagtgcctttcagaatttgcccactcatctggtataactggttctgatggctgggaataaaggaagaggacgtgctgcttatacctttaatattgaggctgttggatttagcaaaggtgaaaagttacctgatgtagtgttgaaaccacccccactatttcctgatacagattataaaccagtgccactgaaaacaggagaaggtgaagaatatatgctggctttgaaacaggagttgagagaaacaatgaaaagaatgccttattttattgaaacacctgaagaaagacaagatattgaaaggtatagtaaaagatacatgaaggtatacaaggaagaatggataccagattggagaagacttccaagagagatgatgccaagaaataaatgtaaaaaagcaggcccaaaacccaaaaaggcaaaagacgcaggcaaaggcacaccactcactaatactgaagatgtgttgaaaaaaatggaggaattggaaaaaagaggtgatggtgaaaaatcagatgaggaaaatgaagagaaagaaggaagcaaagagaaaagtaaagaaggtgatgatgacgatgacgatgatgccgcagaacaggaggaatatgatgaagaagagcaagaagaggaaaatgactacattaattcatactttgaagatggagatgattttggcgcagacagtgatgacaacatggatgaggcaacctattaggcatgaaatttttcaaaaaatatttttatgatgcagcttctgaacatttggacagacttgatttgtattttatttctgataaggaataagtacttgtttctgttgttttggacaaatagttgttaccaaaatattcaaaaccactttgagtttacatactagttaccttaaaaattattccctgacactctgacattccttctaaacacctctgccatctctcttatgtactctcatgggtttttttgtatgatttgaatatgaatgtgcctaaagaatttttgctctcttaatctatgtatacatacttgaacaaatcattcttgcttaactgctgatcttttgtaaaactattgctagtcataatggatttctataacctgaaagttgatataatacagcacgtggagcactttaaaaacaaagaaacttgaaaataattttattttttacctttacatggtgtgttctagactactgcattatgactacataaacctacctgagctcttacaagtacagaattgtgagacagaggttttgtgatggaaaacatacacatagggaaaaataccaaactgagcaatataaatttcacagctcacatcttagccagtacaaagaaactttcacatggggtgaatattataatacttgaatttgagacttaatactgtatatgaattaatcatcccactgtaataactgacatcttcaaatagttgggcttatgaaaaatttgactaagacattttattttatactttatgtaaatgtgaaataagttctggtcatataaatatgtagaatgcatgtgtgtgaactctatgaagtgaagtgtggtggccttttatgtttcagagtactcaagtgtacaattgatttatataaaaatgcaaaatgaactcaggtcattttgaaattaatattaatatttttgttgtttaactttaaagctagctcccctaactttatatattttttgggaaaaaatacctaaaaacctcagcctacaaagactctcagaaatgccaaagattttcaaggaaattcatattatatatttcaaaaatgatttatcaatgttatctaccaaaagaaataattttatttttcccctttggggagatattatcctctaatatgagaatcagatccctagattctatttctacctatactattaaactcaaccttgaacctgagcttggttgtttctgtgccttagtttctccactcgtaaacaatttcctataaaaattgtttaaacaccaaccaaaatttaccatatgtattcattctcttgccttaaagatcacttcttaacttacatttggctctcaccctctaaaaatttgtagtttggagagtaactgaaagcacaattttaagaaacatgttttcctcacaaaatatattgtaatctgattttcctatcttgtattcatgcagaaaattggagaaaatgtgtattgtcttgtgccattctgcaatatgaatttctcaggaaaaagatgtttcaatggcaatactttcttaaataattcaagatgggtgtgaggacctatcttattagtttagtgctgtgttaaccatttgtgaattacttcttgtttaaaggaagttgtcaaaaaattttaagattctaaatggaatacacgaataaagtaagccttagaatagaaacctcacaaaaagttgtcatttgcggttgataattaacataggtgttttattctctcaactccttagtaccagagccaaatacaatttagttttcagaaatcttatcaatattgttctatttacctacttataaatctgcagataaccacttgaaccaggcaaatacactgaagataaaggttatttctttttttagctttgaatttgtcatgaccattttagtcttgcagatagcagggcagccccttggggcaaggatttactctgggaggtaccgttaagagccttctttccccctttgaaagatccttttacaatgttaaagtatactagttgcaagaacaagcaggatttgcaggttgctttaccagcatgagtctcatttttctggcttaaaatctgggactgtgaaattattccataggaaagtgaatgttattttgcagaattagcctcttacataaaagtatttgttgaagtgtctttaaaattgctatcatgagcaaaactggttgctgtaatgcttgtttttctgtatttatttacacattaaattcttacaaaacaaaatgtgttcgtttgttttatagtaagatgttttattttgaacttatttaaatgtttatttgttagagaaaactaatttgttaatatagatcttaactagtaactattaagcagggatgtttgttccaaatattcttgaataaacaatcaccacaaacaa

SEQ ID NO: 279 - protein, 223 aa, Homo sapiens
MAGNKGRGRAAYTFNIEAVGFSKGEKLPDVVLKPPPLFPDTDYKPVPLKTGEGEEYMLALKQELRETMKRMPYFIETPEERQDIERYSKRYMKVYKEEWIPDWRRLPREMMPRNKCKKAGPKPKKAKDAGKGTPLTNTEDVLKKMEELEKRGDGEKSDEENEEKEGSKEKSKEGDDDDDDDAAEQEEYDEEEQEEENDYINSYFEDGDDFGADSDDNMDEATY

SEQ ID NO: 280 - DNA, 6457 bp, Homo sapiens
gtgaatcaaaggagagtcccagaaaacctgtgactgttgaagaaaattcatctgtgaatttttatattcaaggagtcagtatttatattcatcttttaaactgggaagatttatattttactttaaaacttcttgataataatttacaatgaatggacacagtgatgaagaaagtgttagaaacagtagtggagaatcaagccagtcggatgatgattctgggtcagcttcaggctctggatctggttcgagttctggaagcagtagtgatggaagcagtagccagtcaggtagcagtgactctgactccggatctgaatcaggcagtcagtcagagtctgagtcagacacttcccgagaaaacaaagttcaagcaaaaccaccgaaagttgatggagctgagttttggaaatctagtcctagtattctggccgttcagagatctgcaatcctcaagaagcagcaacagcagcagcagcaacaacaacatcaagcctcatctaatagcggatcagaagaggattcctctagcagtgaagattccgatgactcatcaagtgaggtcaaaaggaaaaagcataaagatgaagattggcaaatgtctgggtcaggatctccatctcagtctggttcagattcagaatctgaagaagagagagagaaaagcagttgtgatgaaacagaatctgattatgagccaaaaaacaaagtcaaaagcagaaaacctcaaaatagatctaagtcaaaaaatggaaagaagattcttggacaaaaaaagagacagattgattcatctgaggaggatgatgatgaagaagattatgataatgataaaagaagttctcgtcgccaagcaactgttaatgttagctataaggaggatgaagaaatgaaaacagattctgatgacctactggaagtctgtggagaggatgttcctcaacctgaggaagaggaatttgaaaccatagaaagatttatggattgtcggattgggagaaaaggagctactggtgctactacaaccatctatgcagttgaagcagatggtgacccaaatgcaggctttgaaaaaaacaaagaaccaggagagattcagtatttaattaaatggaaaggatggtcccatatccacaacacttgggagacagaagaaaccctcaagcagcagaatgttagaggaatgaaaaaattggataattataagaaaaaagatcaggaaacaaaaagatggttgaaaaatgcctctccagaagatgtggaatattataattgccagcaagaacttacagatgatctacataaacagtatcaaatagtggaacgtataattgctcattccaatcaaaagtcagcagctggttatcctgattattactgcaaatggcagggccttccatactcagagtgcagctgggaagatggagctctcatttccaaaaagtttcaagcatgcattgatgagtattttagcaggaaccaatcaaaaaccactccttttaaagattgcaaagtattaaaacaaaggccaaggtttgtagccctgaagaagcagccatcctatattggaggacatgagggcttagaattaagagattatcaactgaatggtttaaattggcttgctcattcttggtgcaaaggaaatagttgcatactcgctgatgaaatgggccttggaaaaacaatacagacgatctcatttctgaattatttgtttcatgaacatcaattatatggaccttttttattggtagtaccgctctccactcttacttcctggcaaagggaaattcagacttgggcttctcaaatgaatgctgtggtttatttaggtgacattaacagcagaaacatgataagaactcatgaatggacgcatcatcagaccaaacggttaaaatttaatatattgttaacaacttatgaaattttattaaaagataaggcattccttggaggtctaaattgggcatttataggtgttgatgaagcacaccgattaaagaatgatgactcccttctgtataaaactttaatagattttaaatccaatcatcgtctccttatcactggaactcctctacagaattccctcaaagagctctggtctttgctacatttcattatgccagaaaagttttcttcctgggaagattttgaagaagaacatggcaaagggagagaatatggttatgcaagccttcacaaggagcttgagccatttctgttacgccgagttaagaaagatgtggaaaaatctcttcctgccaaggttgagcagattttaagaatggaaatgagtgctttacagaaacaatattacaaatggattttaactaggaattacaaagccctcagcaaaggttccaagggcagtacctcaggctttttgaacattatgatggagctaaagaaatgttgtaaccattgctacctcattaaaccaccagataataatgaattctataataaacaggaggccttacaacacttaattcgtagtagcggaaaattgattcttcttgacaagctattaattcgcctaagagaacgaggcaatcgagttcttattttttcacaaatggtgcggatgttagatatacttgcagaatatttgaaatatcgtcaattcccctttcaaagattagatggatcaataaaaggagaactgaggaaacaagctctagatcattttaatgctgagggatcagaggatttttgctttttgctgtccacaagagctggaggtctagggattaatttagcctctgctgacactgttgttatatttgattccgattggaatccacagaatgatcttcaggcacaggctagagcccatcgaattgggcaaaagaaacaggtgaatatttatcgtctagttacaaagggatcagttgaagaagatattcttgaaagggcgaaaaagaagatggttttagatcatcttgtaattcaaagaatggacacaactgggaagacagtactacatacaggttctgccccatcaagttctactcctttcaataaagaagagttatcagccattttaaagtttggtgctgaagaactttttaaggaacctgaaggagaagaacaagagccccaggaaatggatatagatgaaatcttgaagagagctgaaactcatgaaaatgaaccaggtcctttaactgtaggagatgaattgctttcccagttcaaggttgccaacttctcaaatatggatgaggatgacattgagttggaacctgaaagaaattcaaagaattgggaggaaattattccagaagatcaaagaagacgattagaagaagaagaaagacaaaaggaacttgaagaaatttatatgctcccaagaatgagaaattgtgcaaaacagattagtttcaatggaagtgaagggaggcgcagtagaagtaggagatactctggatctgatagtgattccatctcagaagggaaaaggccaaagaaacgtggaagaccacggactattcctcgggagaatattaaaggatttagtgatgcagaaattaggcggtttatcaagagctataagaaatttggtggtcctctggaaagattagatgcaattgctcgagatgctgagttagttgataagtcagaaacagaccttagacgactgggagaattggtacataatggttgcattaaagcattaaaggatagttcttcaggaacagaacgaacaggtggtagactcggaaaagtgaagggtccaacattccgaatatcaggagtacaggtgaatgccaaactagtcatctcccatgaagaagaattaatacctttgcacaaatccattccttctgatccagaagaaagaaagcagtatactatcccatgccacacaaaggcagctcattttgatatagactggggcaaagaagatgattccaatttgttaattggcatctatgaatatggatatggaagctgggaaatgattaaaatggatcctgacctcagtctaacacacaagattcttccagatgatcccgataaaaaaccacaagcaaaacagttgcagacccgtgcagactacctcatcaaattacttagtagagatcttgcaaaaaaagaagctctttctggtgcgggaagttcaaagaggagaaaagcaagagctaagaagaataaagcaatgaagtctataaaagtgaaagaggaaataaagagtgattcttctcctctgccttcagagaagtctgatgaagatgatgataaattgagtgaatccaagtctgatggtagggaaagatccaagaaatcttcagtgtcagatgctccagttcatatcacggcaagtggtgaaccagttcccatttctgaagaatctgaagagctggatcagaagacattcagcatttgtaaagaaagaatgaggcctgttaaagcagctttgaaacaacttgataggcctgagaaaggcctttcagaaagagaacaactagagcatactagacaatgtttaataaaaattggagaccatatcacagaatgtctaaaagagtatacaaatcctgaacaaattaagcaatggagaaaaaacctgtggatttttgtatctaagtttactgaatttgatgcaagaaaattacataaattatataagcatgctattaaaaaacggcaggagtctcagcaaaacagtgatcaaaacagcaacttgaatcctcacgtgattagaaatccagatgtggaaagattaaaagagaatacaaatcacgatgatagcagcagggacagttattcctctgatagacacttaactcagtaccatgatcatcataaagaccgacatcagggagattcttacaaaaaaagtgattccaggaaaagaccctattcttcttttagtaatggtaaagaccatcgtgattgggatcactacaagcaagacagcagatattacagtgacagagagaaacacagaaaactggatgatcacaggagtagagatcacaggtcaaatttggaaggaagtttaaaagatagatctcattctgatcatcgttctcactcagatcatcggttacattcagaccaccggtcaagttctgaatatacgcaccataaatcttccagggattataggtatcactcagactggcaaatggaccacagagcttccagcagtggccctaggtcaccactagatcagagatctccttatggctccagatctccatttgaacattcagttgaacacaaaagtacaccggagcatacctggagtagtcggaaaacataacaaaaactgatacttcgtctttctggacttttcttttagccatatatcataaaccaacacagtaattgccttacatgacttgaaagatataaacagatcttctatcagtagcagtattgttacttctttccaggatgcaaggtctattatcccaacagaagagaaaatatttttatatttaaggattatgctgcactgtactacaaaattgtagtacttttttttgttttcttttttaaagaaatggaaaatgtttactattacagggacctcaacactgccctcccatacaggctggataaaactgtttttaagtcagtgattttagactgacctccatttaaattatgtttatatatgaactttactctgacctgtgatcatgtttcaggaaggaatgaaagagagttctttcttaataaagaaaaacactcaaggactttgttcatttccaaagctacttgtttacattgtacactgcgaccaccttgccgcttttcatcacaagcttgaatatttaaattctgtacttatatctgtaaaatagccaggaatttcctgtttgtgatctattatgcctttttacaaaaaaaatggctgtaaattattgtaaatattaaaggaactttccttacttccttccctttctcaggctttttttgactgttcctttccctaccaactcaggccttcttattaaaaaaaaaaaaatcagtgtaataacactttttaatgatttgtcttgatggaatcattgtttagaatgtaaaaatggggaaaggggccacttaattccattagtcctctttttatactgaatattttattagatacatgttattcccttttttttccttttttagtcaatattgtgtttgtagttttaaaaaatggcgagatatgtaaaatctaaactgcatgctctggaaacacttttttcagatgcatctggtttaaaagggtaggtgtataaacacttttcagaatccaaaacggccaaaagttattgtaaatccgtttgttttcccgttttatgtgggcaataatgtcaaatgtgctatgcagccaggttaacattttagataaacttgattgacttttaatataaactgttacaatgcacactgattgtatataaaaacgttatatatgacaaattaaatttaagaaaaagga

SEQ ID NO: 281 - protein, 1710 aa, Homo sapiens
MNGHSDEESVRNSSGESSQSDDDSGSASGSGSGSSSGSSSDGSSSQSGSSDSDSGSESGSQSESESDTSRENKVQAKPPKVDGAEFWKSSPSILAVQRSAILKKQQQQQQQQQHQASSNSGSEEDSSSSEDSDDSSSEVKRKKHKDEDWQMSGSGSPSQSGSDSESEEEREKSSCDETESDYEPKNKVKSRKPQNRSKSKNGKKILGQKKRQIDSSEEDDDEEDYDNDKRSSRRQATVNVSYKEDEEMKTDSDDLLEVCGEDVPQPEEEEFETIERFMDCRIGRKGATGATTTIYAVEADGDPNAGFEKNKEPGEIQYLIKWKGWSHIHNTWETEETLKQQNVRGMKKLDNYKKKDQETKRWLKNASPEDVEYYNCQQELTDDLHKQYQIVERIIAHSNQKSAAGYPDYYCKWQGLPYSECSWEDGALISKKFQACIDEYFSRNQSKTTPFKDCKVLKQRPRFVALKKQPSYIGGHEGLELRDYQLNGLNWLAHSWCKGNSCILADEMGLGKTIQTISFLNYLFHEHQLYGPFLLVVPLSTLTSWQREIQTWASQMNAVVYLGDINSRNMIRTHEWTHHQTKRLKFNILLTTYEILLKDKAFLGGLNWAFIGVDEAHRLKNDDSLLYKTLIDFKSNHRLLITGTPLQNSLKELWSLLHFIMPEKFSSWEDFEEEHGKGREYGYASLHKELEPFLLRRVKKDVEKSLPAKVEQILRMEMSALQKQYYKWILTRNYKALSKGSKGSTSGFLNIMMELKKCCNHCYLIKPPDNNEFYNKQEALQHLIRSSGKLILLDKLLIRLRERGNRVLIFSQMVRMLDILAEYLKYRQFPFQRLDGSIKGELRKQALDHFNAEGSEDFCFLLSTRAGGLGINLASADTVVIFDSDWNPQNDLQAQARAHRIGQKKQVNIYRLVTKGSVEEDILERAKKKMVLDHLVIQRMDTTGKTVLHTGSAPSSSTPFNKEELSAILKFGAEELFKEPEGEEQEPQEMDIDEILKRAETHENEPGPLTVGDELLSQFKVANFSNMDEDDIELEPERNSKNWEEIIPEDQRRRLEEEERQKELEEIYMLPRMRNCAKQISFNGSEGRRSRSRRYSGSDSDSISEGKRPKKRGRPRTIPRENIKGFSDAEIRRFIKSYKKFGGPLERLDAIARDAELVDKSETDLRRLGELVHNGCIKALKDSSSGTERTGGRLGKVKGPTFRISGVQVNAKLVISHEEELIPLHKSIPSDPEERKQYTIPCHTKAAHFDIDWGKEDDSNLLIGIYEYGYGSWEMIKMDPDLSLTHKILPDDPDKKPQAKQLQTRADYLIKLLSRDLAKKEALSGAGSSKRRKARAKKNKAMKSIKVKEEIKSDSSPLPSEKSDEDDDKLSESKSDGRERSKKSSVSDAPVHITASGEPVPISEESEELDQKTFSICKERMRPVKAALKQLDRPEKGLSEREQLEHTRQCLIKIGDHITECLKEYTNPEQIKQWRKNLWIFVSKFTEFDARKLHKLYKHAIKKRQESQQNSDQNSNLNPHVIRNPDVERLKENTNHDDSSRDSYSSDRHLTQYHDHHKDRHQGDSYKKSDSRKRPYSSFSNGKDHRDWDHYKQDSRYYSDREKHRKLDDHRSRDHRSNLEGSLKDRSHSDHRSHSDHRLHSDHRSSSEYTHHKSSRDYRYHSDWQMDHRASSSGPRSPLDQRSPYGSRSPFEHSVEHKSTPEHTWSSRKT

SEQ ID NO: 282 - DNA, 2168 bp, Homo sapiens
ctctctcgctcctgcgttcgcaggcggcggctggcggccggcttctcgctcgggcagcggcggcggcggcggcggcggcttccggagtcccgctgcgaagatgctcaaagtcacggtgccctcctgctccgcctcgtcctgctcttcggtcaccgccagtgcggccccggggaccgcgagcctcgtcccggattactggatcgacggctccaacagggatgcgctgagcgatttcttcgaggtggagtcggagctgggacggggtgctacatccattgtgtacagatgcaaacagaaggggacccagaagccttatgctctcaaagtgttaaagaaaacagtggacaaaaaaatcgtaagaactgagataggagttcttcttcgcctctcacatccaaacattataaaacttaaagagatatttgaaacccctacagaaatcagtctggtcctagaactcgtcacaggaggagaactgtttgataggattgtggaaaagggatattacagtgagcgagatgctgcagatgccgttaaacaaatcctggaggcagttgcttatctacatgaaaatgggattgtccatcgtgatctcaaaccagagaatcttctttatgcaactccagccccagatgcaccactcaaaatcgctgattttggactctctaaaattgtggaacatcaagtgctcatgaagacagtatgtggaaccccagggtactgcgcacctgaaattcttagaggttgtgcctatggacctgaggtggacatgtggtctgtaggaataatcacctacatcttactttgtggatttgaaccattctatgatgaaagaggcgatcagttcatgttcaggagaattctgaattgtgaatattactttatctccccctggtgggatgaagtatctctaaatgccaaggacttggtcagaaaattaattgttttggatccaaagaaacggctgactacatttcaagctctccagcatccgtgggtcacaggtaaagcagccaattttgtacacatggataccgctcaaaagaagctccaagaattcaatgcccggcgtaagcttaaggcagcggtgaaggctgtggtggcctcttcgcgcctgggaagtgccagcagcagccatggcagcatccaggagagccacaaggctagccgagacccttctccaatccaagatggcaacgaggacatgaaagctattccagaaggagagaaaattcaaggcgatggggcccaagccgcagttaagggggcacaggctgagctgatgaaggtgcaagccttagagaaagttaaaggtgcagatataaatgctgaagaggcccccaaaatggtgcccaaggcagtggaggatgggataaaggtggctgacctggaactagaggagggcctagcagaggagaagctgaagactgtggaggaggcagcagctcccagagaagggcaaggaagctctgctgtgggttttgaagttccacagcaagatgtgatcctgccagagtactaaacagcttccttcagatctggaagccaaacaccggcattttatgtactttgtccttcagcaagaaaggtgtggaagcatgatatgtactatagtgattctgtttttgaggtgcaaaaaacatacatatataccagttggtaattctaacttcaatgcatgtgactgctttatgaaaataatagtgtcttctatggcatgtaatggatacctaataccgatgagttaaatcttgcaagttaacacaacgtaacacttaaaagcatacattttcagcaaccagtggcacatatttgaagtgaatagtagcaaattgtttttgctttgaaaatctagccatcctacatcctttggatttcttcacaaggcagtaattcctttgaactactgcttagctaatactaggtagtgctaaaagacatgttcccataacttttacaacattttactttttatcattgatgtgttcaaactgtttacaaggagatgcttatagatgatagttgtacatatgtgcaaaaaaaaatccacttgcaatggtaagaaattgaagtatccttaaaggccatgaagccatatgtccctaaaaaaaaaaaaaaaaaaaaaaaaaaaaaaaaaaaaaaaaaaaaaaaaaaaaaaaaaaaaaaaa

SEQ ID NO: 283 - protein, 473 aa, Homo sapiens
MLKVTVPSCSASSCSSVTASAAPGTASLVPDYWIDGSNRDALSDFFEVESELGRGATSIVYRCKQKGTQKPYALKVLKKTVDKKIVRTEIGVLLRLSHPNIIKLKEIFETPTEISLVLELVTGGELFDRIVEKGYYSERDAADAVKQILEAVAYLHENGIVHRDLKPENLLYATPAPDAPLKIADFGLSKIVEHQVLMKTVCGTPGYCAPEILRGCAYGPEVDMWSVGIITYILLCGFEPFYDERGDQFMFRRILNCEYYFISPWWDEVSLNAKDLVRKLIVLDPKKRLTTFQALQHPWVTGKAANFVHMDTAQKKLQEFNARRKLKAAVKAVVASSRLGSASSSHGSIQESHKASRDPSPIQDGNEDMKAIPEGEKIQGDGAQAAVKGAQAELMKVQALEKVKGADINAEEAPKMVPKAVEDGIKVADLELEEGLAEEKLKTVEEAAAPREGQGSSAVGFEVPQQDVILPEY

SEQ ID NO: 284 - DNA, 2264 bp, Homo sapiens
actgttgagagcggtgtgaggtgcttggtagcgcgccgtagctgcttccacgtccttgcttcacctcaggtaaagagagaagtaatggaaggcctgtctgatgttgcttcttttgcaactaaacttaaaaacactctcatccagtaccatagcattgaagaagataagtggcgagttgctaagaaaacgaaagatgtaactgtttggagaaaaccctcagaagaatttaatggatatctctacaaagcccaaggtgttatagatgaccttgtctatagtataatagaccatatacgcccagggccttgtcgtttggattgggacagcttgatgacttctttggatattctggagaactttgaagagaattgctgtgtgatgcgttacactactgctggtcagctttggaatataatttccccaagagaatttgttgatttctcctatactgtgggctataaagaagggcttttatcttgtggaataagtcttgactgggatgaaaagagaccagaatttgttcgaggatataaccatccctgtggttggttttgtgttccacttaaagacaacccaaaccagagtcttttgacaggatatattcagacagatctgcgtgggatgattcctcagtctgcggtagatacagccatggcaagcactttaaccaacttctatggtgatttacgaaaagctttatgagaggcaaaatacattcaaacttgtagtactacagatcaactctctcagctacatggcctgtaaaaatcattgattccacttttctgcatagccggtagaaaaatttgaaatgtttttggttcactagtacaatgtttggttttattcctaaagtaaatagctatctaagagagggcattttcacttttttttttttaaattttgagacaggctctcactctgttgcccatgctggagggcagtggtatgatcacagctcactgcagctttgatctgaccgctcaaggggttattctacctcagcctcctgaatagctgggaatacaggtgcacgccactatgcatggctaatttttgtttaattttttgtagagatgtggtcacactgtgttgcccaggctggtcttgaactcctggcctcaagtcattccccaccttagcctcccaaagtgttgggattataagcgtgagccaccatgcctggccccaatttaaaatgtggaattcagttggtgtccaagacttatcttgagactcttaaaagcatcagtctgtaactagaacaaatacagtcttagatttacccaagtgcctagatatcattttataatgattagaattgagtattgtgggtcccctaattctgtgggtgccttaagtgagaatttctaaatgattttcacattctaaatgactttgggttttgaactctccatctagtttacttctaaaatgggaacttgaggcaattcaggtatccaggcaaatctttgtatatatttttttgtgtacatgcacacatctcgaaatccatttccgtgtttaatgttagttgtttatgtgttagtattcctgtgtctactgttttgttgttgttaatatgggtaaagtgagccctgaaatacatgctaaacaagacatgaaattcagaaaggtacatagtgtttcaagtgcatggtagtttgatctgtgttttactttattgtgttttcttgagtgtaaagaaagaataaatcaaagttcttcatacccattttgacaaagtggaacagtggagctgttttttgcttttgtttttatttattttttgccactggtgatgatagatttcaaaaaacaaaaggtggcagcagcacaatgttcatggtgaattatctcatagtatctagattgatcaagatctgacagaaggaatgcacaaaggattctatattcttaatgatttattaattaccaggatccttttctaaattgaatgtacttttgaattactaggtttcttctttttttttgttctgcaatagtgaaagaaaactcagtagtttagtttcagtttctcatggaaattggtaaatgttagttttgacttcatctattttttatttgtttttattagcgtagagtaggaagtctcatattctactgttctatctaggatggtgaaattccaaaggtgcctaacttgagtaagggatttgtgacaagatagtacacattactataagggctattatttcctgaactggatgtccctaaaagcaaataaactgcccactatctct

SEQ ID NO: 285 - protein, 205 aa, Homo sapiens
MEGLSDVASFATKLKNTLIQYHSIEEDKWRVAKKTKDVTVWRKPSEEFNGYLYKAQGVIDDLVYSIIDHIRPGPCRLDWDSLMTSLDILENFEENCCVMRYTTAGQLWNIISPREFVDFSYTVGYKEGLLSCGISLDWDEKRPEFVRGYNHPCGWFCVPLKDNPNQSLLTGYIQTDLRGMIPQSAVDTAMASTLTNFYGDLRKAL

SEQ ID NO: 286 - DNA, 3283 bp, Homo sapiens
cccgccagctcgcggagccgctctgccccgcgccctagcccgcgcctgcagcccgcccaggcggagtcagcccgcgctccgcccgccgcgatccgagctcggaggttcggactccgggctcgccgccccccgggccggctccgcgccccgcactcccggcgcccagcgccccgcgccccggcgggcggagcgcaccatgccgcagctggactccggcgggggcggcgcgggcggcggcgacgacctcggcgcgccggacgagctgctggccttccaggatgaaggcgaggagcaggacgacaagagccgcgacagcgccgccggtcccgagcgcgacctggccgagctcaagtcgtcgctcgtgaacgagtccgagggcgcggccggcggcgcagggatcccgggggtcccgggggccggcgccggggcccgcggcgaggccgaggctctcgggcgggaacacgctgcgcagagactcttcccggacaaacttccagagcccctggaggacggcctgaaggccccggagtgcaccagcggcatgtacaaagagaccgtctactccgccttcaatctgctcatgcattacccacccccctcgggagcagggcagcacccccagccgcagcccccgctgcacaaggccaatcagcccccccacggtgtcccccaactctctctctacgaacatttcaacagcccacatcccacccctgcacctgcggacatcagccagaagcaagttcacaggcctctgcagacccctgacctctctggcttctactccctgacctcaggcagcatggggcagctcccccacactgtgagctggttcacccacccatccttgatgctaggttctggtgtacctggtcacccagcagccatcccccacccggccattgtgcccccctcagggaagcaggagctgcagcccttcgaccgcaacctgaagacacaagcagagtccaaggcagagaaggaggccaagaagccaaccatcaagaagcccctcaatgccttcatgctgtacatgaaggagatgagagccaaggtcattgcagagtgcacacttaaggagagcgctgccatcaaccagatcctgggccgcaggtggcacgcgctgtcgcgagaagagcaggccaagtactatgagctggcccgcaaggagaggcagctgcacatgcagctatacccaggctggtcagcgcgggacaactacgggaagaagaagaggcggtcgagggaaaagcaccaagaatccaccacaggaggaaaaagaaatgcattcggtacttacccggagaaggccgctgccccagccccgttccttccgatgacagtgctctaggctgccccgggtccccagctccccaggactcaccctcataccatctgctgccccgcttccccacagaactgcttactagccctgcggagccggcacctacatccccaggtctctccactgctctcagcctcccaaccccagggcccccacaggccccccgcagcaccctgcagagcacacaggtacagcaacaggaatctcagagacaggtggcctagcaggcacaggacacctggccgcctccaggagcctaccccctgaaagtgacagagacccagatctcatggaaactggccaggggtcctgttaacgtcatctcagggtccagaccctgaagatttcagaggctgcaggacttctgcctgaacctggggtcatcgattcaaactgctccaagtggtgggaatcagatctgtcttgatgtgtcatctaattaagggaatcccttgtacctatggctgcctgcatctattctttgtaccatctgtcttgccagccagaagcctctgcctccctagcttttctgctataggtcagagatgggctgaactgagcctagctaccttctctacccatctcccccatcccccactgccacaccctccccattcagacacttcatggaccaagaatgagctggtttgtcaaacaacatgtgagcatggtcacaagcacaaagctcaagatgacagctcttctaaggaaatggagaagctctgtttataaaaacaaaaacaaaaccagctgctactcataagttggaccagaggaagccccttactatgatctcaggagcttgcaagaagcaggaaggggaatggaataggttaagtttaggcctatcaacctaagcaacagaaataatctgacactaccttatcaggcaaattggggaggggagggtgtatctagctctagttcaaattatttggaagtgttccctgagaaacccaccagcctaagaagctctggccccaggcttgtcactagcagctgcagtcaacagttcaaagaagtcatggcccaaatccagtgtgcacccctccccattcacagagcctttttcacaattccatttccagttcatctatggcagtccagccagctcctgggcagcttgagagggcaaacccaaaacctcatgacagccagagcctgtctttcagcattcagtccgcctggccggctccagtttccccatggggctgcgggacagaggaccattacaactagatcaaggagcccagaaaacctccagtagtggacaacaggttttcaccatagcctacgttaacccatttttgagccaagcttcaaccctcagccttgaaaaacaagtctttaatttaatttttgttttttgcctaaatccaaagaaaaagggctgccgggccaggcgcggtggctcacgcctgtaatcccagcactttggcaggccgaggcaggtggatcacctgacgtcagtagtttgagaccagcctggccaacatggtgaaaccctgtatctactaaaaatacaaaaattagccggacgtggtggtgcgcgcatgtaatcccagctactcgggaggctgaggcggaagaatcacttgaacccgggaggcggaggttccagtgagccgagatggcgctattgcactccagtctgggtaacagggagactgcatctcaaaaaaaaaaaaaaaaaaaaaaaagggctgtccatgtattcacacacccctcaaaaaaagcctttagttcctactttagccactggtttctcagaatccaaagatcacatattctagtgtaacactgcaagaagtcttgagaaaaagattattgtagtgttcaaaatatttttgtattgttaatgcatcatcatagaaaaacttttaaacatgagaataaagatactttttactgggtttgtttttcaaagcctgaaaaaaa

SEQ ID NO: 287 - protein, 384 aa, Homo sapiens
MPQLDSGGGGAGGGDDLGAPDELLAFQDEGEEQDDKSRDSAAGPERDLAELKSSLVNESEGAAGGAGIPGVPGAGAGARGEAEALGREHAAQRLFPDKLPEPLEDGLKAPECTSGMYKETVYSAFNLLMHYPPPSGAGQHPQPQPPLHKANQPPHGVPQLSLYEHFNSPHPTPAPADISQKQVHRPLQTPDLSGFYSLTSGSMGQLPHTVSWFTHPSLMLGSGVPGHPAAIPHPAIVPPSGKQELQPFDRNLKTQAESKAEKEAKKPTIKKPLNAFMLYMKEMRAKVIAECTLKESAAINQILGRRWHALSREEQAKYYELARKERQLHMQLYPGWSARDNYGKKKRRSREKHQESTTGGKRNAFGTYPEKAAAPAPFLPMTVL

SEQ ID NO: 288 - DNA, 2821 bp, Homo sapiens
gcccaggtgactgactaatccgccgccttcaggagacagaattggccaaggcctgaaggccccggagtgcaccagcggcatgtacaaagagaccgtctactccgccttcaatctgctcatgcattacccacccccctcgggagcagggcagcacccccagccgcagcccccgctgcacaaggccaatcagcccccccacggtgtcccccaactctctctctacgaacatttcaacagcccacatcccacccctgcacctgcggacatcagccagaagcaagttcacaggcctctgcagacccctgacctctctggcttctactccctgacctcaggcagcatggggcagctcccccacactgtgagctggttcacccacccatccttgatgctaggttctggtgtacctggtcacccagcagccatcccccacccggccattgtgcccccctcagggaagcaggagctgcagcccttcgaccgcaacctgaagacacaagcagagtccaaggcagagaaggaggccaagaagccaaccatcaagaagcccctcaatgccttcatgctgtacatgaaggagatgagagccaaggtcattgcagagtgcacacttaaggagagcgctgccatcaaccagatcctgggccgcaggtggcacgcgctgtcgcgagaagagcaggccaagtactatgagctggcccgcaaggagaggcagctgcacatgcagctatacccaggctggtcagcgcgggacaactacgggaagaagaagaggcggtcgagggaaaagcaccaagaatccaccacaggaggaaaaagaaatgcattcggtacttacccggagaaggccgctgccccagccccgttccttccgatgacagtgctctaggctgccccgggtccccagctccccaggactcaccctcataccatctgctgccccgcttccccacagaactgcttactagccctgcggagccggcacctacatccccaggtctctccactgctctcagcctcccaaccccagggcccccacaggccccccgcagcaccctgcagagcacacaggtacagcaacaggaatctcagagacaggtggcctagcaggcacaggacacctggccgcctccaggagcctaccccctgaaagtgacagagacccagatctcatggaaactggccaggggtcctgttaacgtcatctcagggtccagaccctgaagatttcagaggctgcaggacttctgcctgaacctggggtcatcgattcaaactgctccaagtggtgggaatcagatctgtcttgatgtgtcatctaattaagggaatcccttgtacctatggctgcctgcatctattctttgtaccatctgtcttgccagccagaagcctctgcctccctagcttttctgctataggtcagagatgggctgaactgagcctagctaccttctctacccatctcccccatcccccactgccacaccctccccattcagacacttcatggaccaagaatgagctggtttgtcaaacaacatgtgagcatggtcacaagcacaaagctcaagatgacagctcttctaaggaaatggagaagctctgtttataaaaacaaaaacaaaaccagctgctactcataagttggaccagaggaagccccttactatgatctcaggagcttgcaagaagcaggaaggggaatggaataggttaagtttaggcctatcaacctaagcaacagaaataatctgacactaccttatcaggcaaattggggaggggagggtgtatctagctctagttcaaattatttggaagtgttccctgagaaacccaccagcctaagaagctctggccccaggcttgtcactagcagctgcagtcaacagttcaaagaagtcatggcccaaatccagtgtgcacccctccccattcacagagcctttttcacaattccatttccagttcatctatggcagtccagccagctcctgggcagcttgagagggcaaacccaaaacctcatgacagccagagcctgtctttcagcattcagtccgcctggccggctccagtttccccatggggctgcgggacagaggaccattacaactagatcaaggagcccagaaaacctccagtagtggacaacaggttttcaccatagcctacgttaacccatttttgagccaagcttcaaccctcagccttgaaaaacaagtctttaatttaatttttgttttttgcctaaatccaaagaaaaagggctgccgggccaggcgcggtggctcacgcctgtaatcccagcactttggcaggccgaggcaggtggatcacctgacgtcagtagtttgagaccagcctggccaacatggtgaaaccctgtatctactaaaaatacaaaaattagccggacgtggtggtgcgcgcatgtaatcccagctactcgggaggctgaggcggaagaatcacttgaacccgggaggcggaggttccagtgagccgagatggcgctattgcactccagtctgggtaacagggagactgcatctcaaaaaaaaaaaaaaaaaaaaaaaagggctgtccatgtattcacacacccctcaaaaaaagcctttagttcctactttagccactggtttctcagaatccaaagatcacatattctagtgtaacactgcaagaagtcttgagaaaaagattattgtagtgttcaaaatatttttgtattgttaatgcatcatcatagaaaaacttttaaacatgagaataaagatactttttactgggtttgtttttcaaagcctgaaaaaaa

SEQ ID NO: 289 - protein, 269 aa, Homo sapiens
MYKETVYSAFNLLMHYPPPSGAGQHPQPQPPLHKANQPPHGVPQLSLYEHFNSPHPTPAPADISQKQVHRPLQTPDLSGFYSLTSGSMGQLPHTVSWFTHPSLMLGSGVPGHPAAIPHPAIVPPSGKQELQPFDRNLKTQAESKAEKEAKKPTIKKPLNAFMLYMKEMRAKVIAECTLKESAAINQILGRRWHALSREEQAKYYELARKERQLHMQLYPGWSARDNYGKKKRRSREKHQESTTGGKRNAFGTYPEKAAAPAPFLPMTVL

SEQ ID NO: 290 - DNA, 1254 bp, Homo sapiens
gcccaggtgactgactaatccgccgccttcaggagacagaattggccaaggcctgaaggccccggagtgcaccagcggcatgtacaaagagaccgtctactccgccttcaatctgctcatgcattacccacccccctcgggagcagggcagcacccccagccgcagcccccgctgcacaaggccaatcagcccccccacggtgtcccccaactctctctctacgaacatttcaacagcccacatcccacccctgcacctgcggacatcagccagaagcaagttcacaggcctctgcagacccctgacctctctggcttctactccctgacctcaggcagcatggggcagctcccccacactgtgagctggttcacccacccatccttgatgctaggttctggtgtacctggtcacccagcagccatcccccacccggccattgtgcccccctcagggaagcaggagctgcagcccttcgaccgcaacctgaagacacaagcagagtccaaggcagagaaggaggccaagaagccaaccatcaagaagcccctcaatgccttcatgctgtacatgaaggagatgagagccaaggtcattgcagagtgcacacttaaggagagcgctgccatcaaccagatcctgggccgcaggtggcacgcgctgtcgcgagaagagcaggccaagtactatgagctggcccgcaaggagaggcagctgcacatgcagctatacccaggctggtcagcgcgggacaactacgggaagaagaagaggcggtcgagggaaaagcaccaagaatccaccacagagacaaactggcccagagaactcaaggatggtaatggacaagagtcactgtccatgtcttcttcctctagcccagcttgaggactgggatggctgggcaaggaagccataggcattgcggccccttgccttggtgcagatgtgagtcccacaaacacatctggagaagctcaaaggccgggactgggagatgactcccttggaagacaggagagatgactcccttggaagacagatgacagcccataggcctagtgacaaaaggcccctttccgaccttgtggctgttctgggaactgcacctgtcctaggtctgggccagaccaagcagaatggcagtctgaggacactgacttaccacccaagtcccaggaagagaggacaaggaatcagccaggcctgtgcaaaggcagcattttttggttgtggagtatgactatgaattc

SEQ ID NO: 291 - protein, 269 aa, Homo sapiens
MYKETVYSAFNLLMHYPPPSGAGQHPQPQPPLHKANQPPHGVPQLSLYEHFNSPHPTPAPADISQKQVHRPLQTPDLSGFYSLTSGSMGQLPHTVSWFTHPSLMLGSGVPGHPAAIPHPAIVPPSGKQELQPFDRNLKTQAESKAEKEAKKPTIKKPLNAFMLYMKEMRAKVIAECTLKESAAINQILGRRWHALSREEQAKYYELARKERQLHMQLYPGWSARDNYGKKKRRSREKHQESTTETNWPRELKDGNGQESLSMSSSSSPA

SEQ ID NO: 292 - DNA, 2917 bp, Homo sapiens
gcccaggtgactgactaatccgccgccttcaggagacagaattggccaaggcctgaaggccccggagtgcaccagcggcatgtacaaagagaccgtctactccgccttcaatctgctcatgcattacccacccccctcgggagcagggcagcacccccagccgcagcccccgctgcacaaggccaatcagcccccccacggtgtcccccaactctctctctacgaacatttcaacagcccacatcccacccctgcacctgcggacatcagccagaagcaagttcacaggcctctgcagacccctgacctctctggcttctactccctgacctcaggcagcatggggcagctcccccacactgtgagctggttcacccacccatccttgatgctaggttctggtgtacctggtcacccagcagccatcccccacccggccattgtgcccccctcagggaagcaggagctgcagcccttcgaccgcaacctgaagacacaagcagagtccaaggcagagaaggaggccaagaagccaaccatcaagaagcccctcaatgccttcatgctgtacatgaaggagatgagagccaaggtcattgcagagtgcacacttaaggagagcgctgccatcaaccagatcctgggccgcaggtggcacgcgctgtcgcgagaagagcaggccaagtactatgagctggcccgcaaggagaggcagctgcacatgcagctatacccaggctggtcagcgcgggacaactacgggaagaagaagaggcggtcgagggaaaagcaccaagaatccaccacagaccctggctcgcctaagaaatgccgtgctcgctttggcctcaaccagcagacggattggtgtggtccgtgcagataactctcttcactattcctaggaggaaaaagaaatgcattcggtacttacccggagaaggccgctgccccagccccgttccttccgatgacagtgctctaggctgccccgggtccccagctccccaggactcaccctcataccatctgctgccccgcttccccacagaactgcttactagccctgcggagccggcacctacatccccaggtctctccactgctctcagcctcccaaccccagggcccccacaggccccccgcagcaccctgcagagcacacaggtacagcaacaggaatctcagagacaggtggcctagcaggcacaggacacctggccgcctccaggagcctaccccctgaaagtgacagagacccagatctcatggaaactggccaggggtcctgttaacgtcatctcagggtccagaccctgaagatttcagaggctgcaggacttctgcctgaacctggggtcatcgattcaaactgctccaagtggtgggaatcagatctgtcttgatgtgtcatctaattaagggaatcccttgtacctatggctgcctgcatctattctttgtaccatctgtcttgccagccagaagcctctgcctccctagcttttctgctataggtcagagatgggctgaactgagcctagctaccttctctacccatctcccccatcccccactgccacaccctccccattcagacacttcatggaccaagaatgagctggtttgtcaaacaacatgtgagcatggtcacaagcacaaagctcaagatgacagctcttctaaggaaatggagaagctctgtttataaaaacaaaaacaaaaccagctgctactcataagttggaccagaggaagccccttactatgatctcaggagcttgcaagaagcaggaaggggaatggaataggttaagtttaggcctatcaacctaagcaacagaaataatctgacactaccttatcaggcaaattggggaggggagggtgtatctagctctagttcaaattatttggaagtgttccctgagaaacccaccagcctaagaagctctggccccaggcttgtcactagcagctgcagtcaacagttcaaagaagtcatggcccaaatccagtgtgcacccctccccattcacagagcctttttcacaattccatttccagttcatctatggcagtccagccagctcctgggcagcttgagagggcaaacccaaaacctcatgacagccagagcctgtctttcagcattcagtccgcctggccggctccagtttccccatggggctgcgggacagaggaccattacaactagatcaaggagcccagaaaacctccagtagtggacaacaggttttcaccatagcctacgttaacccatttttgagccaagcttcaaccctcagccttgaaaaacaagtctttaatttaatttttgttttttgcctaaatccaaagaaaaagggctgccgggccaggcgcggtggctcacgcctgtaatcccagcactttggcaggccgaggcaggtggatcacctgacgtcagtagtttgagaccagcctggccaacatggtgaaaccctgtatctactaaaaatacaaaaattagccggacgtggtggtgcgcgcatgtaatcccagctactcgggaggctgaggcggaagaatcacttgaacccgggaggcggaggttccagtgagccgagatggcgctattgcactccagtctgggtaacagggagactgcatctcaaaaaaaaaaaaaaaaaaaaaaaagggctgtccatgtattcacacacccctcaaaaaaagcctttagttcctactttagccactggtttctcagaatccaaagatcacatattctagtgtaacactgcaagaagtcttgagaaaaagattattgtagtgttcaaaatatttttgtattgttaatgcatcatcatagaaaaacttttaaacatgagaataaagatactttttactgggtttgtttttcaaagcctgaaaaaaa

SEQ ID NO: 293 - protein, 268 aa, Homo sapiens
MYKETVYSAFNLLMHYPPPSGAGQHPQPQPPLHKANQPPHGVPQLSLYEHFNSPHPTPAPADISQKQVHRPLQTPDLSGFYSLTSGSMGQLPHTVSWFTHPSLMLGSGVPGHPAAIPHPAIVPPSGKQELQPFDRNLKTQAESKAEKEAKKPTIKKPLNAFMLYMKEMRAKVIAECTLKESAAINQILGRRWHALSREEQAKYYELARKERQLHMQLYPGWSARDNYGKKKRRSREKHQESTTDPGSPKKCRARFGLNQQTDWCGPCR

SEQ ID NO: 294 - DNA, 2944 bp, Homo sapiens
cctccaggtccttcccctaaaacttggcactgccgatactcccagcccgttccttcccaagtcaggaacttgcaggggaccccttggcaattctttttctctcaagagcagacagccttcagtcccagccgctgccagggctggtgtgtctgacccagctgtggtttttccaggcctgaaggccccggagtgcaccagcggcatgtacaaagagaccgtctactccgccttcaatctgctcatgcattacccacccccctcgggagcagggcagcacccccagccgcagcccccgctgcacaaggccaatcagcccccccacggtgtcccccaactctctctctacgaacatttcaacagcccacatcccacccctgcacctgcggacatcagccagaagcaagttcacaggcctctgcagacccctgacctctctggcttctactccctgacctcaggcagcatggggcagctcccccacactgtgagctggttcacccacccatccttgatgctaggttctggtgtacctggtcacccagcagccatcccccacccggccattgtgcccccctcagggaagcaggagctgcagcccttcgaccgcaacctgaagacacaagcagagtccaaggcagagaaggaggccaagaagccaaccatcaagaagcccctcaatgccttcatgctgtacatgaaggagatgagagccaaggtcattgcagagtgcacacttaaggagagcgctgccatcaaccagatcctgggccgcaggtggcacgcgctgtcgcgagaagagcaggccaagtactatgagctggcccgcaaggagaggcagctgcacatgcagctatacccaggctggtcagcgcgggacaactacgggaagaagaagaggcggtcgagggaaaagcaccaagaatccaccacaggaggaaaaagaaatgcattcggtacttacccggagaaggccgctgccccagccccgttccttccgatgacagtgctctaggctgccccgggtccccagctccccaggactcaccctcataccatctgctgccccgcttccccacagaactgcttactagccctgcggagccggcacctacatccccaggtctctccactgctctcagcctcccaaccccagggcccccacaggccccccgcagcaccctgcagagcacacaggtacagcaacaggaatctcagagacaggtggcctagcaggcacaggacacctggccgcctccaggagcctaccccctgaaagtgacagagacccagatctcatggaaactggccaggggtcctgttaacgtcatctcagggtccagaccctgaagatttcagaggctgcaggacttctgcctgaacctggggtcatcgattcaaactgctccaagtggtgggaatcagatctgtcttgatgtgtcatctaattaagggaatcccttgtacctatggctgcctgcatctattctttgtaccatctgtcttgccagccagaagcctctgcctccctagcttttctgctataggtcagagatgggctgaactgagcctagctaccttctctacccatctcccccatcccccactgccacaccctccccattcagacacttcatggaccaagaatgagctggtttgtcaaacaacatgtgagcatggtcacaagcacaaagctcaagatgacagctcttctaaggaaatggagaagctctgtttataaaaacaaaaacaaaaccagctgctactcataagttggaccagaggaagccccttactatgatctcaggagcttgcaagaagcaggaaggggaatggaataggttaagtttaggcctatcaacctaagcaacagaaataatctgacactaccttatcaggcaaattggggaggggagggtgtatctagctctagttcaaattatttggaagtgttccctgagaaacccaccagcctaagaagctctggccccaggcttgtcactagcagctgcagtcaacagttcaaagaagtcatggcccaaatccagtgtgcacccctccccattcacagagcctttttcacaattccatttccagttcatctatggcagtccagccagctcctgggcagcttgagagggcaaacccaaaacctcatgacagccagagcctgtctttcagcattcagtccgcctggccggctccagtttccccatggggctgcgggacagaggaccattacaactagatcaaggagcccagaaaacctccagtagtggacaacaggttttcaccatagcctacgttaacccatttttgagccaagcttcaaccctcagccttgaaaaacaagtctttaatttaatttttgttttttgcctaaatccaaagaaaaagggctgccgggccaggcgcggtggctcacgcctgtaatcccagcactttggcaggccgaggcaggtggatcacctgacgtcagtagtttgagaccagcctggccaacatggtgaaaccctgtatctactaaaaatacaaaaattagccggacgtggtggtgcgcgcatgtaatcccagctactcgggaggctgaggcggaagaatcacttgaacccgggaggcggaggttccagtgagccgagatggcgctattgcactccagtctgggtaacagggagactgcatctcaaaaaaaaaaaaaaaaaaaaaaaagggctgtccatgtattcacacacccctcaaaaaaagcctttagttcctactttagccactggtttctcagaatccaaagatcacatattctagtgtaacactgcaagaagtcttgagaaaaagattattgtagtgttcaaaatatttttgtattgttaatgcatcatcatagaaaaacttttaaacatgagaataaagatactttttactgggtttgtttttcaaagcctgaaaaaaa

SEQ ID NO: 295 - protein, 269 aa, Homo sapiens; identical to SEQ ID NO: 289

SEQ ID NO: 296 - DNA, 2172 bp, Homo sapiens
ctgcgccctctcctataaagcagacgccgcgccgcgctgcgacgctgtagtggcttcgtcttcggtttttctcttccttcgctaacgcctcccggctctcgtcagcctcccgccggccgtctccttaacaccgaacaccatgccttcaattaagttgcagagttctgatggagagatatttgaagttgatgtggaaattgccaaacaatctgtgactattaagaccatgttggaagatttgggaatggatgatgaaggagatgatgacccagttcctctaccaaatgtgaatgcagcaatattaaaaaaggtcattcagtggtgcacccaccacaaggatgaccctcctcctcctgaagatgatgagaacaaagaaaagcgaacagatgatatccctgtttgggaccaagaattcctgaaagttgaccaaggaacactttttgaactcattctggctgcaaactacttagacatcaaaggtttgcttgatgttacatgcaagactgttgccaatatgatcaaggggaaaactcctgaggagattcgcaagaccttcaatatcaaaaatgactttactgaagaggaggaagcccaggtaggtagcacacagttttgtctttgatcacatgctcttaaaaagggagtaacacctataacatgccagcaaaagaggtgactgtatcaagtagtcttgatactttagggataatatgtacttaatgtgtcttaaacatactcttactgttctgtctttatgaatctgaacacttagatgatactgcattttaagcataagaacaattagttttcaatgagaagagctcttgttaatgtattaacagttactagttttggcacctgcaactttctgtatagaccatacatatctgacatcagaaaagcaggccctagagagaagtatatactagggtactttagagcaacttaatgaggggaggaaatgaaagaatagatcagaatgattttgttgacatgactacagactgaaataatgtgaatgaattaactgaatttgctctgtcaactttagtaaattgcccattgcctttgctttgttcataatttcagcagggcagaataaaaaccatgggaggcaaagaaaggaaatccggaaatatagtcttaacctggtgttgttctaattttccatctgttcttctgactcaactcactggctatcgatgaatcagtaggtagtatttataagtcttaggaaagactactcaagttaaggtacttccctatatccatctcttttaggtacgcaaagagaaccagtggtgtgaagagaagtgaaatgttgtgcctgacactgtaacactgtaaggattgttccaaatactagttgcactgctctgtttataattgttaatattagacaaacagtagacaaatgcagcagcaagtcaattgtattagcagaatattgtcctcattgcatgtgtagtttgagcacagatcccaaaccttacggccaagtttcttctagtatgatggaaagtttcttttttctttgctctgaataaaactgaactgtgggttctctataagtggcattttgggctttccctcttttttgtaaagcaatgtctgcctagtttattgtccagttaactttagtgaccttttaaaagttggcattgtaaataaaacaacttgcaaaaaagttttctggaatagaattaacaaaatattatctttattcatgagttggaaactggaaaaaggcttcttgaagtaaatgttctgagtggagctactaggatgtcttccagcctcctgcagtcaaggagtaccactgtattgattagcctgtatgtagcagggctcccttcattgcatctgaggacttgttttctttttctttatttttaatcctcttagttttaaatatattgcctagagactcagttactacccagtttgtggttttttgggagaaatgtaactggacagttagcttttcaattaaaaagacacttaacccatgtgggatgtcatctttttataattagtgttcccatgtggagaaaattattcacactacttgcatgtaaagaataatttaacttttaacattaaaatatgtggtaaaacccagaaagcatccatcatgaatgcaagatactttcaataaaaagtaagttatat

SEQ ID NO: 297 - protein, 160 aa, Homo sapiens
MPSIKLQSSDGEIFEVDVEIAKQSVTIKTMLEDLGMDDEGDDDPVPLPNVNAAILKKVIQWCTHHKDDPPPPEDDENKEKRTDDIPVWDQEFLKVDQGTLFELILAANYLDIKGLLDVTCKTVANMIKGKTPEEIRKTFNIKNDFTEEEEAQVGSTQFCL

SEQ ID NO: 298 - DNA, 1486 bp, Homo sapiens
ctgcgccctctcctataaagcagacgccgcgccgcgctgcgacgctgtagtggcttcgtcttcggtttttctcttccttcgctaacgcctcccggctctcgtcagcctcccgccggccgtctccttaacaccgaacaccatgccttcaattaagttgcagagttctgatggagagatatttgaagttgatgtggaaattgccaaacaatctgtgactattaagaccatgttggaagatttgggaatggatgatgaaggagatgatgacccagttcctctaccaaatgtgaatgcagcaatattaaaaaaggtcattcagtggtgcacccaccacaaggatgaccctcctcctcctgaagatgatgagaacaaagaaaagcgaacagatgatatccctgtttgggaccaagaattcctgaaagttgaccaaggaacactttttgaactcattctggctgcaaactacttagacatcaaaggtttgcttgatgttacatgcaagactgttgccaatatgatcaaggggaaaactcctgaggagattcgcaagaccttcaatatcaaaaatgactttactgaagaggaggaagcccaggtacgcaaagagaaccagtggtgtgaagagaagtgaaatgttgtgcctgacactgtaacactgtaaggattgttccaaatactagttgcactgctctgtttataattgttaatattagacaaacagtagacaaatgcagcagcaagtcaattgtattagcagaatattgtcctcattgcatgtgtagtttgagcacagatcccaaaccttacggccaagtttcttctagtatgatggaaagtttcttttttctttgctctgaataaaactgaactgtgggttctctataagtggcattttgggctttccctcttttttgtaaagcaatgtctgcctagtttattgtccagttaactttagtgaccttttaaaagttggcattgtaaataaaacaacttgcaaaaaagttttctggaatagaattaacaaaatattatctttattcatgagttggaaactggaaaaaggcttcttgaagtaaatgttctgagtggagctactaggatgtcttccagcctcctgcagtcaaggagtaccactgtattgattagcctgtatgtagcagggctcccttcattgcatctgaggacttgttttctttttctttatttttaatcctcttagttttaaatatattgcctagagactcagttactacccagtttgtggttttttgggagaaatgtaactggacagttagcttttcaattaaaaagacacttaacccatgtgggatgtcatctttttataattagtgttcccatgtggagaaaattattcacactacttgcatgtaaagaataatttaacttttaacattaaaatatgtggtaaaacccagaaagcatccatcatgaatgcaagatactttcaataaaaagtaagttatat

SEQ ID NO: 299 - protein, 163 aa, Homo sapiens
MPSIKLQSSDGEIFEVDVEIAKQSVTIKTMLEDLGMDDEGDDDPVPLPNVNAAILKKVIQWCTHHKDDPPPPEDDENKEKRTDDIPVWDQEFLKVDQGTLFELILAANYLDIKGLLDVTCKTVANMIKGKTPEEIRKTFNIKNDFTEEEEAQVRKENQWCEEK

SEQ ID NO: 300 - DNA, 2643 bp, Homo sapiens
gcttcagttaccagccggctacgtcgcgcctgcgctttgacccccagtttgcgccccaactccggtcgtgcggccgcccggggagggctctgcagttgcgcagcttgctccccggcccttttcccctccgctccccgccgcctcctgacgccgggcgtgacgtcaccacgcccggcggccgccattacagagagccgagctctggagcctcagcgagcggaggaggaggcgcagcggccgacggccgagtactgcggtgagagccagcgggccagcgccagcctcaacagccgccagaagtacacgaggaaccggcggcggcgtgtgcgtgtaggcccgtgtgcgggcggcggcgcgggagcagcgcggagcggcagccggctggggcgggtggcatcatggacgagaaggtgttcaccaaggagctggaccagtggatcgagcagctgaacgagtgcaagcagctgtccgagtcccaggtcaagagcctctgcgagaaggctaaagaaatcctgacaaaagaatccaacgtgcaagaggttcgatgtccagttactgtctgtggagatgtgcatgggcaatttcatgatctcatggaactgtttagaattggtggcaaatcaccagatacaaattacttgtttatgggagattatgttgacagaggatattattcagttgaaacagttacactgcttgtagctcttaaggttcgttaccgtgaacgcatcaccattcttcgagggaatcatgagagcagacagatcacacaagtttatggtttctatgatgaatgtttaagaaaatatggaaatgcaaatgtttggaaatattttacagatctttttgactatcttcctctcactgccttggtggatgggcagatcttctgtctacatggtggtctctcgccatctatagatacactggatcatatcagagcacttgatcgcctacaagaagttccccatgagggtccaatgtgtgacttgctgtggtcagatccagatgaccgtggtggttggggtatatctcctcgaggagctggttacacctttgggcaagatatttctgagacatttaatcatgccaatggcctcacgttggtgtctagagctcaccagctagtgatggagggatataactggtgccatgaccggaatgtagtaacgattttcagtgctccaaactattgttatcgttgtggtaaccaagctgcaatcatggaacttgacgatactctaaaatactctttcttgcagtttgacccagcacctcgtagaggcgagccacatgttactcgtcgtaccccagactacttcctgtaatgaaattttaaacttgtacagtattgccatgaaccatatatcgacctaatggaaatgggaagagcaacagtaactccaaagtgtcagaaaatagttaacattcaaaaaacttgttttcacatggaccaaaagatgtgccatataaaaatacaaagcctcttgtcatcaacagccgtgaccactttagaatgaaccagttcattgcatgctgaagcgacattgttggtcaagaaaccagtttctggcatagcgctatttgtagttacttttgctttctctgagagactgcagataataagatgtaaacattaacacctcgtgaatacaatttaacttccatttagctatagctttactcagcatgactgtagataaggatagcagcaaacaatcattggagcttaatgaacatttttaaaaataattaccaaggcctcccttctacttgtgagttttgaaattgttctttttattttcagggataccgtttaatttaattatatgatttgtctgcactcagtttattccctactcaaatctcagccccatgttgttctttgttattgtcagaacctggtgagttgttttgaacagaactgttttttccccttcctgtaagacgatgtgactgcacaagagcactgcagtgtttttcataataaacttgtgaactaagaactgagaaggtcaaattttaattgtatcaatgggcaagactggtgctgtttattaaaaaagttaaatcaattgagtaaattttagaatttgtagacttgtaggtaaaataaaaatcaagggcactacataacctctctggtaactccttgacattcttcagattaacttcaggatttatttgtatttcacatattacaatttgtcacattgttggtgtgcactttgtgggttcttcctgcatattaacttgtttgtaagaaaggaaatctgtgctgcttcagtaagacttaattgtaaaaccatataacttgagatttaagtctttgggttttgttttaataaaacagcatgttttcaggtagagcttaaactaaatgatgtgtttacttagtgcagtttctggttatgaatattatattgctatgtgtatattatatggactctttaaaatgattgacagattggcaaattcttaaatctttgtacattgttgagtcatatgttcttagagttaaatttgtctcagataagaaagtgttaaagcattagcctgtgtcaagttctttgagtgatactagtgaaaccaaatagaaaactattgttggatcatgatttagtcttatgtacattcacccga

SEQ ID NO: 301 - protein, 309 aa, Homo sapiens
MDEKVFTKELDQWIEQLNECKQLSESQVKSLCEKAKEILTKESNVQEVRCPVTVCGDVHGQFHDLMELFRIGGKSPDTNYLFMGDYVDRGYYSVETVTLLVALKVRYRERITILRGNHESRQITQVYGFYDECLRKYGNANVWKYFTDLFDYLPLTALVDGQIFCLHGGLSPSIDTLDHIRALDRLQEVPHEGPMCDLLWSDPDDRGGWGISPRGAGYTFGQDISETFNHANGLTLVSRAHQLVMEGYNWCHDRNVVTIFSAPNYCYRCGNQAAIMELDDTLKYSFLQFDPAPRRGEPHVTRRTPDYFL

SEQ ID NO: 302 - DNA, 1513 bp, Homo sapiens
atggagatgtatgaaacccttggaaaagtgggagagggaagttacggaacagtcatgaaatgtaaacataagaatactgggcagatagtggccattaagatattttatgagagaccagaacaatctgtcaacaaaattgcgatgagagaaataaagtttctaaagcaatttcatcacgaaaacctggtcaatctgattgaagtttttagacagaaaaagaaaattcatttggtatttgaatttattgaccacacagtattagatgagttacaacattattgtcatggactagagagtaagcgacttagaaaatacctcttccagatccttcgagcaattgactatcttcacagtaataatatcattcatcgagatataaaacctgagaatattttagtatcccagtcaggaattactaagctctgtgattttggttttgcacgaacactagcagctcctggggacatttatacggactatgtggccacacgctggtatagagctcccgaattagtattaaaagatacttcttatggaaaacctgtggatatctgggctttgggctgtatgatcattgagatggccactggaaatccctatcttcctagtagttctgatttggatttactccataaaattgttttgaaagtgggcaatttgtcacctcacttgcagaatatcttttccaagagccccatttttgctggggtagttcttcctcaagttcaacaccccaaaaatgcaagaaaaaaatatccaaagcttaatggattgttggcagatatagttcatgcttgtttacaaattgatcctgctgacaggatatcatctagtgatcttttgcatcatgagtattttactagagatggatttattgaaaaattcatgccagaactgaaagctaaattactgcaggaagcaaaagtcaattcattaataaagccaaaagagagttctaaagaaaatgaactcaggaaagatgaaagaaaaacagtttataccaatacactgctaagtagttcagttttgggagaggaaatagaaaaagagaaaaagcccaaggagatcaaagtcagagttattaaagtcaaaggaggaagaggagatatctcagaaccaaaaaagaaagagtatgaaggtggacttggtcaacaggatgcaaatgaaaatgttcatcctatgtctccagatacaaaacttgtaaccattgaaccaccaaaccctatcaatcccagcactaactgtaatggcttgaaagaaaatccacattgcggaggttctgtgacaatgccacccatcaatctaactaacagtaatttgatggctgcaaatctcagttcaaatctctttcaccccagtgtgaggtgagctgtaacagagaagaaacctaaataatacaacattcctgtataatggtatttcaaagaatcgtgttcatagtgtctgtatgtaaactgaacttgaagaaaatatattgaaattaaagctgtataatgggccaaaaaaaaaaaaa

SEQ ID NO: 303 - protein, 455 aa, Homo sapiens
MEMYETLGKVGEGSYGTVMKCKHKNTGQIVAIKIFYERPEQSVNKIAMREIKFLKQFHHENLVNLIEVFRQKKKIHLVFEFIDHTVLDELQHYCHGLESKRLRKYLFQILRAIDYLHSNNIIHRDIKPENILVSQSGITKLCDFGFARTLAAPGDIYTDYVATRWYRAPELVLKDTSYGKPVDIWALGCMIIEMATGNPYLPSSSDLDLLHKIVLKVGNLSPHLQNIFSKSPIFAGVVLPQVQHPKNARKKYPKLNGLLADIVHACLQIDPADRISSSDLLHHEYFTRDGFIEKFMPELKAKLLQEAKVNSLIKPKESSKENELRKDERKTVYTNTLLSSSVLGEEIEKEKKPKEIKVRVIKVKGGRGDISEPKKKEYEGGLGQQDANENVHPMSPDTKLVTIEPPNPINPSTNCNGLKENPHCGGSVTMPPINLTNSNLMAANLSSNLFHPSVR

SEQ ID NO: 304 - DNA, 4841 bp, Homo sapiens
agcacatcgctgcgggctcacaaagcggccagacgctcggcggcggcgtgtggcaggagcgcaggggcgcgagccggcgatcagccttcccggcgaccgtgccgcgggagctcgagcaactcggactaggggacccgggccggcccccaagatgccggcgatcgcggtgttggcggcggccgccgcggcgtggtgcttcctccaagtcgagagccggcacctggacgcgctcgccggaggcgcgggccccaaccacggcaatttcctagacaatgaccagtggctgagcaccgtctcccagtacgaccgggacaagtactggaaccgctttcgagacgatgattatttcagaaactggaatcccaacaagccctttgaccaagccctggacccatccaaggacccctgcctgaaggtaaaatgcagccctcacaaagtgtgtgtgacccaggactaccagaccgccctgtgtgtcagccgcaagcacctgctccccaggcaaaagaaggggaacgtggcccagaaacactgggttggaccttcgaatttggtcaagtgcaagccctgtcccgtggcacagtcagccatggtctgcggctcagatggccactcctacacatccaagtgcaaattggagttccatgcttgttctactggcaaaagcctcgccaccctctgtgatgggccctgtccctgtctcccagagcctgagccaccaaagcacaaggcagaaaggagtgcctgcacagacaaggagttgcggaaccttgcctcccggctgaaggattggtttggagctctccacgaggatgcgaacagagtcatcaagcccaccagctccaacacagcccaaggcaggtttgacactagcatcctgcccatctgcaaggactccctgggctggatgttcaacaagttggacatgaactatgacctcctgcttgacccttcagagatcaatgccatctacctggataagtacgagccctgtatcaagcctcttttcaactcgtgtgactccttcaaggatggcaagctttctaacaatgagtggtgctactgcttccagaagcctggaggtctcccttgccagaatgaaatgaacagaattcagaagctgagtaaggggaaaagcctgttgggggccttcatacctcggtgtaatgaggagggctattacaaagccacacagtgccacggcagcacggggcagtgctggtgtgtggacaaatatgggaatgagttggctggctccaggaaacagggtgctgtgagctgtgaagaggagcaggaaacctcaggggattttggcagtggtgggtccgtggtcctgctggatgacctagaatatgaacgggagctgggaccaaaggacaaagaggggaagctgagggtgcacacccgagccgtgacagaggatgatgaggatgaggatgatgacaaagaggatgaggtcgggtacatatggtagtgcccacaagaaagaggacacaagttttgcacaaaattgcaagtcacttcctattcctgcatttgtatctaagactccaaggcaccaaggtctcttctccattgttgctctctatacccgacctaaggtttggaagacaactgcttgttcccagaggattctgattttgcatatgtttgtatgggagaaagggtgttgtgttttttttttgttgttgtttattttttggatagggaagtcattggcttaattagagcctccttcctttctgtgagatttttccaacaagcatgtgatttacgtggaattctgacagtgcagggagccccaaccctcttaaatgtcaaagaccctttttgattacccacactggtggttattacagcatggttcccagccttacagtgtctaagtgcttctcttgtgtcctgtagatgttgtgaaaaagaaaaaaacaaaaaatacaccacactgtactttttccccctgcccccgttactgccggtgattattattaaaaattagtttttttcacatcattatatctggcttcctataaacaacagccttaattcagtcaagactccctttggggaattcattttattaaaaattggtgtctggatacttccctgtacatgcataaatatgcatgcatgtacagaaagactgtatgtgtgtgccttgcacacacacccatacctctcagaaaaagtgtttgggtatcttaaaaactcgaaaaacaatgataaatttctcagcttgtccagacctggaacaaaatttctggaataagaaatttgtattaaagtccttttttgcactaacagttggctcttgtagcctgcaggctgaggaagtctcttctctgtgcatcagcagagttactgaaagcctctgattgagaaaaaacctccgtctgcctaaatcacttttctcgcagaagccatgcgactcccacacgacacgggcagcttcacaagccatctctttcatttctgcttgaagccccttggctgcagcaatcctgtctgccataggtttcttccttccttacctactcaagggctttttctaaggcatgcacacatatctcctgttctctgagagtaccatggtgttccttaaaagaagaaaatttctaattctgaactcaatgttttgcttttactccctttctactgacaaatcatgataagggcacaaaagctgtacagatttttttttttaaccactcaatcccaaatggaggcctacaaagaacatcgtaataacacatggaagcaaaccctgggtttttaagagcaaattctgtccccccctcactcccccaagtgacaagatactaatgaagaaagttcttcaccatagtgtttgttttaactaaactcattggagtctagttccaaatttggtagggtcatcatctctacattccttaggatttctctccctatcaagctggcccagatacaagtaccaaacagtagtctctgaagttcccccatttccttcagtaccagtctataagctactgtccgccactgattttcatttatcagggtgtcctaatcagaatcagccacccaagcaagcctctctggcccacatatctatctcttgccttcccccatgaacttcagcctgtccacacaaaagccacataaactcaagcaagaaatatgttcagccaaaacatgattatagtggcagctgaccaatcccccatcccaaattgaccatttagatgtaccaactcaccttaaattagcatgttccaatccagtcggcattgcctgaatacagtagcatcatacctatagttggtcttagataagaaatgaactacttgatatagcaaagtcctttggcttcgtaaataaccctgaggttttgtacttactttccccataggaagacagaccataggcaaactctgttttgggatctcaactccatcacctttgtttcaatattttttttctctcttgaacaaaactgagataatttagaaaacaggtgcttaattgcaataaaattactatgaagtatattaaaaatcacgacattgtaaaatctcactttagatcatcaaagaaaaccattgttactatctcctttgagcttaggaaaatgtacaagagaacaaattaaaattgaaaaattgatttcacttagaaaaacttctaggaacagggtgaaccactgattttaatttgcctaattatcttatgacaagtatcaaattaagatgacacttaaagatccttagcattaacttaatgatggagaagagtgctcaatagacagttcccagtaaggtaatgagatgccattttcagagacattctaagaagatattttgattcattaaaacattaaataaaaagccctcctcagattggaacccccaaatcgatggagccacattaataatacttttcatgcctcactttgacatgacagcattcgatttttttaaagatctttaatactttccatgagtactaaagattgtaatgagttaccttatccttagaagtagaatgtttgctttcttcttcttggaaatagtcctccaaaaagtccacttgtaccagtgacaagaagtcacttgtatagtgaccaagtacacataaaatactgattataaaaatattgtaataaaccacttcctcatttgatacaggtattaagctgaatcctcactaattcacttttgaaaagttcttaatgaacagttttattcttattccatgaacagctcttttaatacaatttccttggtatccaacttaaatcccagaattttgttccaccatggttagttatttgccatatgaatgtattcttgtttctaccaatattctaggcatgagaataccttaatactgagttggagattttgtatctgtttctcctcctttacgcccattttcctacccacagcagcaaatgacaacgtgtctgtccaggtctgtccccctgctcatcccaggatgccactcacatttttttcttcttgttaccttgaccacgctgtacagtaacatccaagagcccattctacagtgggtggttttggtctttttataactttttctcaaagtcactgatgtttgttcctgttaaatgtatagcattgtaatgagagcccatcaaatcctgagtgtcagtttgttgtccctattgtagatgaaatagtgatgtagcaaaaacctagtaaattctgaatgcttttccacgtagacttatctggaatgtgaacacaactctttggttaatagtaaatgcttaactgtagtcctgagtaggtgcatttctgtctgtctcaataaattttactttgtctgcaaaaaaaaaaaaaaaa

SEQ ID NO: 305 - protein, 439 aa, Homo sapiens
MPAIAVLAAAAAAWCFLQVESRHLDALAGGAGPNHGNFLDNDQWLSTVSQYDRDKYWNRFRDDDYFRNWNPNKPFDQALDPSKDPCLKVKCSPHKVCVTQDYQTALCVSRKHLLPRQKKGNVAQKHWVGPSNLVKCKPCPVAQSAMVCGSDGHSYTSKCKLEFHACSTGKSLATLCDGPCPCLPEPEPPKHKAERSACTDKELRNLASRLKDWFGALHEDANRVIKPTSSNTAQGRFDTSILPICKDSLGWMFNKLDMNYDLLLDPSEINAIYLDKYEPCIKPLFNSCDSFKDGKLSNNEWCYCFQKPGGLPCQNEMNRIQKLSKGKSLLGAFIPRCNEEGYYKATQCHGSTGQCWCVDKYGNELAGSRKQGAVSCEEEQETSGDFGSGGSVVLLDDLEYERELGPKDKEGKLRVHTRAVTEDDEDEDDDKEDEVGYIW

SEQ ID NO: 306 - DNA, 3837 bp, Homo sapiens
atcgcctcctccctccccaagatggcgtccttgctgcagtcggaccgggttctctatctagtccagggagaaaagaaggttcgggccccgctctcgcaactctacttctgccgctattgtagcgaactgcggtcgctggaatgtgtgtctcacgaggtggactcccattattgtcccagttgtttagaaaatatgccatcggctgaagccaaactaaaaaagaatagatgtgccaattgttttgactgtcctggctgcatgcacaccctctctactcgggccacgagcatctccacacagcttccagatgacccagccaagaccaccatgaagaaagcctattacctggcatgtggattttgtcgctggacgtctagagatgtgggcatggcagacaaatctgtagctagtggcggttggcaggaacctgaaaatcctcacacacaacggatgaacaaattgattgaatattaccagcagcttgctcagaaagagaaggttgagcgagatcgcaagaaactggcacgacgtagaaactatatgcctctggctttttcggacaaatatggtcttggaaccaggcttcagcgaccacgagctggtgcatccatcagtacccttgccggactttcccttaaagaaggagaggatcagaaagagataaagattgagccagctcaggctgtggatgaagtggaacctctacctgaagactattatacaagaccagtaaatttaacagaggtaacaacccttcagcagcgtctgttacagcctgacttccagccagtctgtgcttcacagctctatcctcgccacaaacatcttctgatcaaacggtccctgcgctgccgtaaatgtgaacataatttgagcaagccagaatttaacccaacgtcaatcaaattcaaaatccagctggtcgctgtcaattatattccagaagtgagaatcatgtcaattcccaaccttcgctacatgaaggagagccaggtcctcctgactcttacaaatccagttgagaacctcacccatgtgactctcttcgagtgtgaggagggggaccctgatgatatcaacagcactgctaaggtggtggtgcctcccaaagagctcgttttagctggcaaggatgcagcagcagagtacgatgagttggcagaacctcaagactttcaggacgatcctgacattatagccttcagaaaggccaacaaagtgggtattttcatcaaagttacaccacagcgtgaggagggtgaagtgaccgtgtgcttcaagatgaagcatgattttaaaaacctggcagcccccattcgccccattgaagaaagtgaccagggaacagaagtcatctggctcacccagcatgtggaacttagcttgggcccacttcttccttaaaaggttccactggagggcagatcccaaaggacagtatcaccgtaaacctgcgttaaaatgtggaagctgctgcttcattaggccttgtttataacgatgtacccatgcactacggaattctattgctaagaaagtgggagcataggcaaggcattgggaacacagggtagctgctgttgctcttgctctcacccctgttgacaccagtaagtctgtgtcttcctcactgaaccctgcacgttgagtaacagcagcataattccatcctaggaaagggggatgggtgttccttggaaatggcattgtatttaccacctgagaaactctgtactgtctcttgatctgatctcactaaggatcacaatgtcacagatgaaacttaaatgataacccaaaggtagacctgctgttaatgatccagcattggtcacaatgtaccaactgctttctgcattccgttaaatatcatctaacagtctaaaacatatcccttcattgccataatggctgccattttgccatagatttccatataactgaaaaactgaattgtcactttatctttagtatcatgatgattggaaaaacctgtgaagttgttaaggcactctcatttgccctctttttctaagtgaatacaggacacgtattagttgttcttaatttttttcccagtaaaatatggatcttttaagaagaatttgagaagcaaacaattacatgtcatgtcaagggggtagcagattccattcgttttcaatattgccacaatacccagggattaatgctgccacaggggggcaatctttatttgtcttacttcctaccccttccctgttctgcctctttaactcagttaagttgttctgtttgggacctggaaaagaacccaaagaaaacctgagtggacaggttcatttctggaatgcagaaaacattttaaaggctagatttttagaatattctcaactagcattctttccattgatttgaaggggaaattaactattataatctcttgaatccaaaactggatattaagaactttcccccttactaagtttaagacttttgtcatgtggtgagtcaaataagaccattttgattgtaaaccataaaatagttcagcaagtagcccacagttctggcctaacagcagacttgctgttttcacttggtatcctggagttgggttgctaaccttaatttctatgatgttttctaaaatgaaacttgataaagtagaccaccagctgcaccgtgttttctgtaaaagtattgttagtaagtggccaagagacttgaggaaaatacagattttttgtttaccttggtcttgttttaagtcttaaaaaattaaagataacattataatgtagaatacagatgggacatagtccttgtaagcttcccttgaaaatgttttaaatatttaggaagcttttaaaagacactaaattgtactctaaaagacactaaattgtactaattgtacaaaggtcaagccaattttatgaaacagtcctacagagtaatatatgtgatgcagtgtaagaaggaaaatactcatctctaacattatggtaataacatttagcctcttaggagttggagcagggggatgggtaattacagatttgcagactatagaaagagtttcatttttttgtgaccccacagagtctcaaatttttattccactacctgctagagcctactgtgaaatcactgctccatatttgccagtggaggaaatgggcatagagtagagaatagcttcatatgtttacacgtttgcatagactacacacatgtcatgcgtttatggcaggtagctggtatttattccccaaagtaataatgttgaagtatgggtctcatcattcccatacacagaaacacaaaacactttgatcataaacttttttcttcagaagccaaactaacttgcagaataatagagccactggtttaatgtttcctcaagataggttttagtgtaagctagtattctgtgtgttcgtagaaatgattcaatacctgcagctggtgaattaggaattgtatttgttgccttttttatattagatgaggtgcaaaaattttaatgctagtcagtatgcaccaccacaggaaagttagatcccattagcacttgagactacagctttggaaacttaggctaagttaatttggatttgttacttgattcacctactgaccttttcttttgtttgaagtgcttatcagcataatgagctaagtgtcatgcatatttgtgaagaaacacccttgtttggtcccttttgggacagagaggtactccttgatctttatgaatgaccggttactgttttgccttattgcttaacttaatgtagtgaaataaagcagaccaagcttgaaaaaaaaaaaaaaaaaaaaaaaaaaaaa

SEQ ID NO: 307 - protein, 460 aa, Homo sapiens
MASLLQSDRVLYLVQGEKKVRAPLSQLYFCRYCSELRSLECVSHEVDSHYCPSCLENMPSAEAKLKKNRCANCFDCPGCMHTLSTRATSISTQLPDDPAKTTMKKAYYLACGFCRWTSRDVGMADKSVASGGWQEPENPHTQRMNKLIEYYQQLAQKEKVERDRKKLARRRNYMPLAFSDKYGLGTRLQRPRAGASISTLAGLSLKEGEDQKEIKIEPAQAVDEVEPLPEDYYTRPVNLTEVTTLQQRLLQPDFQPVCASQLYPRHKHLLIKRSLRCRKCEHNLSKPEFNPTSIKFKIQLVAVNYIPEVRIMSIPNLRYMKESQVLLTLTNPVENLTHVTLFECEEGDPDDINSTAKVVVPPKELVLAGKDAAAEYDELAEPQDFQDDPDIIAFRKANKVGIFIKVTPQREEGEVTVCFKMKHDFKNLAAPIRPIEESDQGTEVIWLTQHVELSLGPLLP

SEQ ID NO: 308 - DNA, 1993 bp, Homo sapiens
aaccaatcctcacaacaggactgggagacaggtgttacctttcccactttacagagaatgaaacagagtggcaaagcctccgaaggaccctacacttcggacatcgcaaagcaggatctgagtcccggctcctctgtccaaacctacttgctaggctttctttcccatgtctactctatagctggaaaggtcgtggaggacacattttaggccaaccctctcggtttacaatccagagaggggagaccctcagaagccaagcgacatgtccacggctacgcggcgagtgtgtggcaacgtggaaggggagcccgagacgccctggtctctcccttctctcgcaggttcctttctccccgaacgcagcccgcaggggacgctggaggaggagctgagctggagttgccggggccccgggaccgggcgttccgggggcggtccccagcagccgcgcattccagagccagcagcgcgtcctggccgctcctgcgctctcccgcctcccggggctcggaggagccggggcacgttccaggagctgcctagggctgaggttccaggcctgggggtcgcttccagctgccagatcccgtgcagtcctggggaccctgagaagcaccgagccatccctgacccaggaactttccgcagactcgccgccatctgggagtgaagcaacatggatgcagtcagccaagtccccatggaagtcgtgcttcccaagcacatcctggatatctgggttattgtcctcatcatcctggccaccattgtcatcatgacctcgttgttgctgtgcccagccactgcagtaatcatctatcgcatgcggactcatccgatccttagtggggctgtttgagagcctcccaagagggccgggtgagggatgaggacaggcatcctatccccagcctcttcctgtcttcagaaaagcagcaggagggactttggggcatggacctgagttctggttttgattctgccacgagccagctgtgtgaatttggtcaagggacctaactctctgagttccaggttccttatctttcaaatggggatggtgatccctgccctttctacctcatagggatgtgagaaccacctgacttagtggatgtgaaagctgtttgtgatcagtaaagctaccacagatataagggtgttatgctgaatcctgagaagctttcaagaaccagagaacctgattgctgatgatggccttaaaggtggtgagggagatactgggggcagagcagactttgccagtgcccctcaggtcaaaccaagccaagagcaccctgtccccattccaaggggccagcagcactttggcccaaagtattttctttaaggtgccattccttcatgttttctcagtttggagggtgatgggtagagctttccagaaccttctccattccagaatctctgcccctgtgtaatctgaaggaaggctgtgccatctttgggcactgccaagggagttggggtgatgggcttctttctgcactggagtctcacatctgttagctttgacactcaagcaatgttggaaaatgcagggtgactgagttccctgcccagctttcgggatctctggcccccatccccttgtgtgtgtccctctgcccagctcctgctgtaattagctccacgtgtacccccttcactccctcccaccagctctgcagccagcctatggcaattatattttaagaggtgttcccaggacttttgggacctactaaaacaatgatggttattttagatgtgatgatttatatttatgtagagatatttctggaccactcaagctcttcgataccaaaatcaggagcatcttgggatttattaaattatgtaagaagatagcacagatatcgggatattattgtgtgaaaatgctgcttttactttgatgtgatctcattgatgtacacaaccaagttccaataaagtgctagaatgtgcaaaaaaaaaaaaaaaaaaa

SEQ ID NO: 309 - protein, 135 aa, Homo sapiens
MSTATRRVCGNVEGEPETPWSLPSLAGSFLPERSPQGTLEEELSWSCRGPGTGRSGGGPQQPRIPEPAARPGRSCALPPPGARRSRGTFQELPRAEVPGLGVASSCQIPCSPGDPEKHRAIPDPGTFRRLAAIWE

SEQ ID NO: 310 - DNA, 546 bp, Homo sapiens
atggaagccatgaatgttgagaaagcctcagcagatgggaacttgccagaggtgatctctaacatcaaggagactctgaagatagtgtccaggacaccagttaacatcactatggcaggggactctggcaatgggatgtccaccttcatcagtgcccttcgaaacacaggacatgagggtaaggcctcacctcctactgagctggtaaaagctacccaaagatgtgcctcctatttctcttcccacttttcaaatgtggtgttgtgggacctgcctggcacagggtctgccaccacaaccctggagaactacctgatggaaatgcagttcaaccggtatgacttcatcatggttgcatctgcacaattcagcatgaatcatgtgatgcttgccaaaaccgctgaggacatgggaaagaagttctacattgtctggaccaagctagacatggacctcagcacaggtgccctcccagaagtgcagctactgcagatcagagaaaatgtcctggaaaatctccagaaggagcgggtatgtgaatactaa

SEQ ID NO: 311 - protein, 181 aa, Homo sapiens
MEAMNVEKASADGNLPEVISNIKETLKIVSRTPVNITMAGDSGNGMSTFISALRNTGHEGKASPPTELVKATQRCASYFSSHFSNVVLWDLPGTGSATTTLENYLMEMQFNRYDFIMVASAQFSMNHVMLAKTAEDMGKKFYIVWTKLDMDLSTGALPEVQLLQIRENVLENLQKERVCEY

SEQ ID NO: 312 - DNA, 3104 bp, Homo sapiens
ctcgcggacaggaagcaggagagtttgccaatagggatgtgacagcggttcccattaagcggtgatggtggttttgggacctgataatcgagctgggagtcagaggcgggatgtgtgcggtgaaggatgttttgatacccccatataaaataatctgtctgtcatgggagcccccacgtcctctgaaatagttcagctctgtctgcatgacttgtcctgggactgaggaaaatttaccagtcatctggccttttggaagagcaaaaaatgatgaagtcccaggggttagtatcattcaaggatgtggctgtggatttcacccaggaggagtggcagcaacttgacccttctcagaggaccctgtacagggatgtgatgctggagaactacagccacctggtctcaatggggtatccagtttccaaaccagatgtcatctccaagttggaacaaggagaagagccatggatcataaagggagacatatcaaattggatctatccagatgaatatcaggcagatgggagacaagacaggaagagtaaccttcacaactcccagtcatgtattttggggacagtttccttccatcataagatactgaaaggagtcacaagggatggttcattgtgctccattttaaaagtctgtcaaggtgatggtcagctgcagagatttctagagaatcaagacaaactcttcaggcaggtcacatttgttaacagcaaaacagtgactgaggcatcagggcataaatataatccactggggaaaatatttcaagagtgcatagaaacagatatatcaatacagagattccataaatatgatgcttttaaaaagaacttaaaaccaaatattgacctaccgagttgttataagagcaattcaagaaaaaaacctgatcagagttttggaggtggaaaatcatctagccagagtgagcccaattctaatcttgagaagattcacaatggagtaataccttttgatgataatcagtgtggaaacgtttttagaaatacacaatcccttattcaatatcagaatgtggaaactaaagagaaaagctgtgtatgtgttacatgtggaaaagcctttgctaagaagtcacaactcattgtacatcaaagaattcatactggaaagaaaccatatgattgtggtgcatgcggaaaagccttcagtgagaagtttcatcttgttgtacatcagagaactcatactggggagaaaccttatgattgttctgaatgtggaaaagccttctctcagaaatcgtcccttattatacatcagagagttcacactggggaaaaaccctatgaatgtagtgaatgcgggaaagccttctcccagaaatcacccctcattatacatcagagaatacatactggggaaaaaccctatgaatgtagagagtgtgggaaggccttttcccagaagtcacagctgattatacaccacagagctcatactggagagaagccgtatgagtgtaccgaatgtgggaaagccttctgtgagaagtcccacctcattatacataaaagaattcacactggtgagaaaccctacaaatgtgctcaatgtgaggaagccttcagcaggaagacagaactcattacacatcagttagttcatactggggaaaaaccttatgaatgtactgaatgtggaaagacattctcccgcaagtcacagctcatcatacatcagagaacacatactggagaaaaaccctataaatgtagtgaatgtggcaaagccttctgccagaagtcacatctcattggacatcagagaattcacacaggagaaaaaccttatatatgtactgaatgtgggaaagccttctctcagaagtcccaccttccgggacaccagcgaattcatacaggagagaaaccttacatatgtgctgaatgtggaaaggccttttctcagaagtcagaccttgttttacatcagaggattcatactggggaaagaccctatcaatgtgctatatgtgggaaggccttcatccagaagtcacaactaactgtacaccagagaattcacacagtggtaaaatcataatgaactggccacagaaaagccttagtattagctcaagccttaataattactagaaacccaattaatttgataagcttggggacaacatcccaatagataaaaatttttaagggaatttgtttctagtttggtgatgcctaacttttccagcaaagatgatggaaaatagttatataaatgaagaacatttttaatatggcatgtaaagcttttaaagttatgaactcagtgatcagcacagcaagttaagcatacagaatattgtcaagttgcatattccttatactacaaaatgataatcagccattgtgaaactgctaatattagcttgtcataattatggccataaactaatttttctataaaagacgtggaagaaagcttaagtaaacaataaaataaaacctatacactattttaagaaggggcttgagcatgacccctaaagctacatgtaaagttcttgtacaaaaaatggaatgataggttgatcagattcagtaaagttgatctgtatgcattttcccatctcaagcatataagttgacctgcatctctggaaggaccttgagattgatgcattttgagcaggtctcccttttactcttcccaactgggaacttggagctgaaaaacattggcactgaggccagatggccttgggtttaatcctggctcagtgcctcacagattgtgtgactttaggcaaacatacttctcctagctgagtattttttatcagtaagtacaaatacaatgcagagctcattttcagttaatattagtactttttaaatctttactctctatcttgaagcattagatgttaagactaatgtgtaaaaaccacgtctgagcttgcttttccctctggacactctgcttttgattgcctatccctataagtggctcattttactgtcttctgatcctggtggccttatttttgctatgttaaggttgtgttttttaatacttggatttattttcatatacttacataaaccgtggtgattgcacat

SEQ ID NO: 313 - protein, 604 aa, Homo sapiens
MMKSQGLVSFKDVAVDFTQEEWQQLDPSQRTLYRDVMLENYSHLVSMGYPVSKPDVISKLEQGEEPWIIKGDISNWIYPDEYQADGRQDRKSNLHNSQSCILGTVSFHHKILKGVTRDGSLCSILKVCQGDGQLQRFLENQDKLFRQVTFVNSKTVTEASGHKYNPLGKIFQECIETDISIQRFHKYDAFKKNLKPNIDLPSCYKSNSRKKPDQSFGGGKSSSQSEPNSNLEKIHNGVIPFDDNQCGNVFRNTQSLIQYQNVETKEKSCVCVTCGKAFAKKSQLIVHQRIHTGKKPYDCGACGKAFSEKFHLVVHQRTHTGEKPYDCSECGKAFSQKSSLIIHQRVHTGEKPYECSECGKAFSQKSPLIIHQRIHTGEKPYECRECGKAFSQKSQLIIHHRAHTGEKPYECTECGKAFCEKSHLIIHKRIHTGEKPYKCAQCEEAFSRKTELITHQLVHTGEKPYECTECGKTFSRKSQLIIHQRTHTGEKPYKCSECGKAFCQKSHLIGHQRIHTGEKPYICTECGKAFSQKSHLPGHQRIHTGEKPYICAECGKAFSQKSDLVLHQRIHTGERPYQCAICGKAFIQKSQLTVHQRIHTVVKS

SEQ ID NO: 314 - DNA, 2456 bp, Homo sapiens
ggctcagcgcctggcgagtcctccgcttgtactgagacgcctgggatctcaaaatggcggccccgtgcggaaacagcgtctgggagcagtcatgttgcctcctgaacaaagccgctgaagatgaagaatgggcaaaatcgccccatacggaacagcgcagcctcgggagcccgttacctggctcgcgaacacgaagcgggagagttcgccaatatggatgtgacagcggttcccattaagcggtgataggatttttgggacctgataatcaagctagggacctgattcctcagacctctgccctatcggaagggaagcagaaaatgatcaggtctcagggtccagtgtcatttgaggatgtggctgtggatttcacccaggaggagtggcagcaactggactatgctcagaggaccctgtacagggatgtgatgctggagatctatagccacctggtctcaatgggatatccagtttccaaaccagatgtcatctccaagttggaacaaggagaagagccatggatcataaagagacacataccaaattggatctatccaggtgaaaatgtggcagatgggagacaagaaaaataaatgctcaagagtagacttgacacccctcaactggatatatttagagatgttttcttccataaggagacactggaaagtattacaaggggtcattcattgtactccattttaaaagtctggcaaggtgatgaccagctggagagagatcaggaaaactgagacaaatttgtcaggcaagttgtagtcatcaacaacaaaagaatatctgaagagtcaggtcatccatataatatatttggaaaaatatttcatgactgcacagacctagatacttcaaaacaaagactgtgtaagtgtgattcatttgaaaagaccttgaaaccaaatattaacctagtgagttataataggaattttgcaagaaaaaacattgatgagaattttagatgtgggaaaacacctagctacagttcttgctattctaagcatgaaaaaaatcatagtggaatgatacactgtgaagctactcattgtggaaagattcttagcaataaacaatctcttattcattatgtgaatgttgaaactggggagaagacctatgtatgtgttgaatgtggaaaatcctttctcaagaagtcacagattattatacatcaaagaattcatactggagagaaaccttatgattgtggtgcatgtggaaaagccttcagtgagaagtcacaccttattgcacatcagagaactcatactggggagaaaccttatgattgttctgaatgtggaaaaggcttttctcagaaatcatccctcattatacatcagagagttcacactggggaaaaaccatatgaatgtagtgaatgtgagaaagccttctcccagaaatcacccctcattatacatcagagaatacatactggggaaaagccctatgaatgtagagtgtgggaaagccttttcccagagtcacagctgattatacatcacagagctcatactggagagaagccatgtaagtgtactgaatgtgggaaagcattctgttttatacattaaagagttcacactggtgagaaaccctacaaatgtgctcaatgtgaggaagccttcagcaggaagtcagaactcattatacatcagataattcatactggggagaaaccgtatgaatgtacagaatgtgggaaaacattctctcgcaagtcacaactcatcatacatcagagaacccacactggagagaaaccctataaatgtaccaaatgtggaaaatccttctgtcagcagtcacatctcattggacatcagagaattcacacgggagaacaaccttatgtatgttctgaatgtgggaaagccttctctcagaagtctcacctcccagggcattggtgaattcatacaggagagaaaccttacatatgtgctgaatgtggaaaggccttttctcagaagtcagaccttgttgtacatcagataattcatactggagagaaacctgatcgatgtactgtatgtgggaaggccttcatccagaagtcccaactcactgtacatcagagaattcatacactaatgaaatcataagaatggtctgaacacagaaaagccttcagggtcagttcaagccttaatagatagtgcaacaaccaatggatttgatgattttggggactacatctttgttgataaaattttacaagtgaagtcatgttcctaatgtatttcattctttatcaaagataatagagaagtcaatacgtaaatgatggacattttcactatggcatataaaagtttttaaattgagaaatgaatgattagcataacagaacgaattgcatgtacatctcttttgaagttatgtgctcctgattatactacataacaatcagatatgtgtaagattgttaa

SEQ ID NO: 315 - DNA, 2338 bp, Homo sapiens
ctcaacgtcgaaccgaaggcgacacccacccaactcctccctctccgccccatagtccacccaacacttgcagcccctccagagaaaaagcccagcggaagaggactccggaaaagtgactatctcggaagaccagggtagagctcccgggagaaaaaggcgaagatccccggccccggatcgccatccccttccctggcaccagcttctctaggctgcgcgaaggaagagggtacgacgccggggagggactgggtgcgcgggcatgaagttggaggtgttcgtccctcgcgcggcccacggggacaagcagggcagtgacctggagggcgcgggcggcagcgacgcgccgtccccgctgtcggcggcgggagacgactccctgggctcagatggggactgcgcggccaacagcccggccgcgggcggcggcgccagagatacgcagggcgacggcgaacagagtgcgggaggcgggccgggcgcggaggaggcgatcccggcagcagctgctgcagcggtggtggcggagggcgcggaggccggggcggcggggccaggcgcgggcggcgcggggagcggcgagggtgcacgcagcaagccatatacgcggcggcccaagcccccctactcgtacatcgcgctcatcgccatggccatccgcgactcggcgggcgggcgcttgacgctggcggagatcaacgagtacctcatgggcaagttcccctttttccgcggcagctacacgggctggcgcaactccgtgcgccacaacctttcgctcaacgactgcttcgtcaaggtgctgcgcgacccctcgcggccctggggcaaggacaactactggatgctcaaccccaacagcgagtacaccttcgccgacggggtcttccgccgccgccgcaagcgcctcagccaccgcgcgccggtccccgcgcccgggctgcggcccgaggaggccccgggcctccccgccgccccgccgcccgcgcccgccgccccggcctcgccccgcatgcgctcgcccgcccgccaggaggagcgcgccagccccgcgggcaagttctccagctccttcgccatcgacagcatcctgcgcaagcccttccgcagccgccgcctcagggacacggcccccgggacgacgcttcagtggggcgccgcgccctgcccgccgctgcccgcgttccccgcgctcctccccgcggcgccctgcagggccctgctgccgctctgcgcgtacggcgcgggcgagccggcgcggctgggcgcgcgcgaggccgaggtgccaccgaccgcgccgcccctcctgcttgcacctctcccggcggcggcccccgccaagccactccgaggcccggcggccggcggcgcgcacctgtactgccccctgcggctgcccgcagccctgcaggcggcctcagtccgccgccctggcccgcacctgccgtacccggtggagacgctcctagcctgagtagcgccgcggggcccgggaacgccgagtgcgcgccgtcggggaggcgggaacgcgggcccgcgcgcggactttgcactttgaatccagaggaagatgaatttttaaaatctccatcaaacgtgccttaaagctaaagcattttgacaggagtatttaaacttagtccaggatattttcctttgtgttttataactttacagaggaccaaagcaattcttgttttagtttctttgcgaagcctgctcctccttcccttcataaggactttttttgtctttctttaacgcccaggcttcgtcttatttctactgtttttgtcgcaacttccattgatttatgtcccttccctcccccctaagtacatcagggaacctttccacactataaatgatatgactactgtttggggtttctgggcccccatccgtgtacgtatgtggcatttccaggtatgactgagtgtgagagacatgtcagaggctcttcagtgatttcttgctattgaccgatgcttcactgtgccaaaagagaaaaaaaatgttgggttttgtaattaaattatttatatatttttgaaacccgaattgaaaatgttgcaggcaacgggctacagctttattagtggttctctaactgtggtctccttgggccaagcaatttctttaaaggaaaagttgattatgtatgtggggtgccaggaccactgccttgaaagcaagtgtgatttttatttttaatattattttatttgtgtctgtgtacatattcatgtataaattttatgaaacccaagcatagtgcttattttttaataaaacaactgacttaacacattgtgaaaaaaaaaaaaaaaaaaaa

SEQ ID NO: 316 - protein, 403 aa, Homo sapiens
MKLEVFVPRAAHGDKQGSDLEGAGGSDAPSPLSAAGDDSLGSDGDCAANSPAAGGGARDTQGDGEQSAGGGPGAEEAIPAAAAAAVVAEGAEAGAAGPGAGGAGSGEGARSKPYTRRPKPPYSYIALIAMAIRDSAGGRLTLAEINEYLMGKFPFFRGSYTGWRNSVRHNLSLNDCFVKVLRDPSRPWGKDNYWMLNPNSEYTFADGVFRRRRKRLSHRAPVPAPGLRPEEAPGLPAAPPPAPAAPASPRMRSPARQEERASPAGKFSSSFAIDSILRKPFRSRRLRDTAPGTTLQWGAAPCPPLPAFPALLPAAPCRALLPLCAYGAGEPARLGAREAEVPPTAPPLLLAPLPAAAPAKPLRGPAAGGAHLYCPLRLPAALQAASVRRPGPHLPYPVETLLA

SEQ ID NO: 317 - DNA, 2068 bp, Homo sapiens
gacgccacgcaggctgccgtcacccttccgggtgacataccggccttggggtacgcgtgccttcggggcctttcctgtgtttgggacccagatctcctctcctccagaaaaccttgacactgcccatcttcctcatccagaaggagcgttcgaggaatggatgaggtcggggtggaagaaacgggtgattccctttttttgaaagagcggaaaccggccgggcggtttccagggaggagcatctgttcctcctcgcccgtttttcgccctcgggctggcgagaactccctcaggtcccaatccgtggactcgcaggggccatgattgattccggagcgcagttaatcaaggcataatggcatggacttgacacagcaagcaaaagacatacagaacataacagtccaggaaaccaacaaaaataactctgaaagcattgaatgcagcaaaataacaatggatctcaagttcaacaattccaggaaatatatttctatcactgtgccatccaaaacccaaacaatgtcaccacacatcaagtcagttgacgacgttgtggtacttggcatgaatctcagcaagtttaacaaacttactcagtttttcatatgtgttgctggagtttttgtattttacctaatttatgggtatttacaggaattaatattttcagtggagggttttaagtcctgtggctggtaccttaccttagtgcagtttgccttttactccatatttggcctaatagaacttcagcttattcaggacaaaaggaggagaataccaggaaaaacctacatgataatagcttttctaactgtgggtactatggggttatcaaacacttccttgggctacctgaattaccctacccaagtcatcttcaagtgctgcaaattgattcctgttatgctaggaggagtttttattcaaggaaagcgttataatgttgcagatgtgtctgctgccatatgtatgagccttggcctgatatggtttaccctcgctgacagcacaactgcaccaaatttcaacctgacgggtgtggtgcttatttccctggcactatgtgcagatgccgtcattggaaatgttcaagagaaagctatgaaacttcataatgcttctaattctgaaatggtattgtattcgtattcaattggttttgtatacattttactgggattgacatgcactagtggattaggccctgcagtaacattttgtgcaaagaatccagttcggacctatggttatgcgttccttttttccctcactggatattttggaatctcctttgttctggctttgattaaaatttttggtgcacttattgctgtaacagtgacaacaggaagaaaagcaatgaccattgtactttcgtttatattctttgctaaaccattcacgtttcagtatgtatggtctggtttgttagttgtccttggtatatttctcaatgtttacagcaaaaatatggataaaataagactaccatcactgtatgatttgataaacaaatcagtggaagcaagaaagtcaaggacgctggcacagactgtatagacagtgattgtcctatttaaaatagaattttaagggaacaatcatcaattaattaactttccaaagggactgataaaaaccaaaggatctggaggcattgctatcccatttgtgggcagatttcatatgaagttgttttgcggtgtcagccttttcttcagagcatttgtttgactgacttccaaagcaatcaagagagccacgtctagcagactttacaataaaatgtcaatatgaaggactgtaattcctagcagtttattgagaatttcactggaaatggaccatgtgttgcaagactaattggctataattatatcctatcaaagaaatcgatacgtaatagcagattgttttatattcattccattttgatggtgttatttaaattgattctctgttataagagtaaactgatgagttgaagtctggagagaataacattcattataaataaaattattctgtgatctttaaaaaaaaaaaaaaaaaaaaaaaaaaa

SEQ ID NO: 318 - protein, 401 aa, Homo sapiens
MDLTQQAKDIQNITVQETNKNNSESIECSKITMDLKFNNSRKYISITVPSKTQTMSPHIKSVDDVVVLGMNLSKFNKLTQFFICVAGVFVFYLIYGYLQELIFSVEGFKSCGWYLTLVQFAFYSIFGLIELQLIQDKRRRIPGKTYMIIAFLTVGTMGLSNTSLGYLNYPTQVIFKCCKLIPVMLGGVFIQGKRYNVADVSAAICMSLGLIWFTLADSTTAPNFNLTGVVLISLALCADAVIGNVQEKAMKLHNASNSEMVLYSYSIGFVYILLGLTCTSGLGPAVTFCAKNPVRTYGYAFLFSLTGYFGISFVLALIKIFGALIAVTVTTGRKAMTIVLSFIFFAKPFTFQYVWSGLLVVLGIFLNVYSKNMDKIRLPSLYDLINKSVEARKSRTLAQTV

SEQ ID NO: 319 - DNA, 3132 bp, Homo sapiens
gaagcagaggaggaaggagagaagaggtggaggtggccgcaggctgagtcgcggccgggatgtccgggcagccgccgccgccgccgccgcagcagcagcaacagcagcagcagctgtcgccgccaccgccggcggccttggccccagtctccggagtcgtcctgccggcgcccccggccgtcagcgccggctcttctccggccggctcgcccggcggcggtgcgggcggcgaaggcttaggggccgcggcggccgccctgctcctccaccctccgccgccgccgcccccggccaccgcggccccgccgcccccgccgccgcccccgcctccccctgcctcagcggctgcccccgccagcgggccgcccgctcccccgggccttgcagcgggccccggcccggctggaggagccccgaccccagctctggtggcgggcagcagcgccgcggcccccttccctcacggggactcggccctgaacgagcaggagaaggagttgcagcggcggctgaagcgtctctacccggccgtggacgaacaagagacgccgctgcctcggtcctggagcccgaaggacaagttcagctacatcggcctctctcagaacaacctgcgggtgcactacaaaggtcatggcaaaaccccaaaagatgccgcgtcagttcgagccacgcatccaataccagcagcctgtgggatttattattttgaagtaaaaattgtcagtaagggaagagatggttacatgggaattggtctttctgctcaaggtgtgaacatgaatagactaccaggttgggataagcattcatatggttaccatggggatgatggacattcgttttgttcttctggaactggacaaccttatggaccaactttcactactggtgatgtcattggctgttgtgttaatcttatcaacaatacctgcttttacaccaagaatggacatagtttaggtattgctttcactgacctaccgccaaatttgtatcctactgtggggcttcaaacaccaggagaagtggtcgatgccaattttgggcaacatcctttcgtgtttgatatagaagactatatgcgggagtggagaaccaaaatccaggcacagatagatcgatttcctatcggagatcgagaaggagaatggcagaccatgatacaaaaaatggtttcatcttatttagtccaccatgggtactgtgccacagcagaggcctttgccagatctacagaccagaccgttctagaagaattagcttccattaagaatagacaaagaattcagaaattggtattagcaggaagaatgggagaagccattgaaacaacacaacagttatacccaagtttacttgaaagaaatcctaatctccttttcacattaaaagtgcgtcagtttatagaaatggtgaatggtacagatagtgaagtacgatgtttgggaggccgaagtccaaagtctcaagacagttatcctgttagtcctcgaccttttagtagtccaagtatgagccccagccatggaatgaatatccacaatttagcatcaggcaaaggaagcaccgcacatttttcaggttttgaaagttgtagtaatggtgtaatatcaaataaagcacatcaatcatattgccatagtaataaacaccagtcatccaacttgaatgtaccagaactaaacagtataaatatgtcaagatcacagcaagttaataacttcaccagtaatgatgtagacatggaaacagatcactactccaatggagttggagaaacttcatccaatggtttcctaaatggtagctctaaacatgaccacgaaatggaagattgtgacaccgaaatggaagttgattcaagtcagttgagacgccagttgtgtggaggaagtcaggccgccatagaaagaatgatccactttggacgagagctgcaagcaatgagtgaacagctaaggagagactgtggcaagaacactgcaaacaaaaaaatgttgaaggatgcattcagtctactagcatattcagatccctggaacagcccagttggaaatcagcttgacccgattcagagagaacctgtgtgctcagctcttaacagtgcaatattagaaacccacaatctgccaaagcaacctccacttgccctagcaatgggacaggccacacaatgtctaggactgatggctcgatcaggaattggatcctgcgcatttgccacagtggaagactacctacattagctatgcatttcaagagctcacacttatattgtggcatatagtcaacatggaagtagaccagctctgctgatttgaaatttagattttttaaattatgtactggggacaggtttttgtcgctttacattgcttcctagtttacagcatgatgcaaatgattttctaacttagtgttaggagaaattattttccatctttaacctcttagttgtctaagagttaaatattactgaatttcagacgttcaaattgatcatcacaaatcctttaaaacaattacctaaaagaaaccaaaaatcctgccttctttgtgggggaggggggagagaggggaaggaaatggaacaagttgtgtttgtgttagcatgtgggtgatgtaaacttcaaattgggagatgttccgacccccactcccatataagcattcaatcagtgtaacttgcaaaatgcataaacatccgacagtttgaatttatagtgttgatggaagaaatcatttttaatgtgtactgtaaaacttgaaatactcaggagctgagtgaatatgtttgttgctacttacaatcccgacctgttagtcccagtagttttgttttaacatggtctttttcaactttgtttcctgtttaactacagatgacttctgttgtagactcacaagtttaactgttgtattataacagtattacatgtcaacggtgtggttatgacctttatttatataaaaaccaaatatttagtcaatttaccgtgtcttaatttaatctttgtacaccttccatttttaagtgcttaaatgagtactatattgcaataaaatgtagtgatataattaaccagccattaaaaatttacttctacagaaaaaaaaaaaaaaaaaaaa

SEQ ID NO: 320 - protein, 729 aa, Homo sapiens
MSGQPPPPPPQQQQQQQQLSPPPPAALAPVSGVVLPAPPAVSAGSSPAGSPGGGAGGEGLGAAAAALLLHPPPPPPPATAAPPPPPPPPPPPASAAAPASGPPAPPGLAAGPGPAGGAPTPALVAGSSAAAPFPHGDSALNEQEKELQRRLKRLYPAVDEQETPLPRSWSPKDKFSYIGLSQNNLRVHYKGHGKTPKDAASVRATHPIPAACGIYYFEVKIVSKGRDGYMGIGLSAQGVNMNRLPGWDKHSYGYHGDDGHSFCSSGTGQPYGPTFTTGDVIGCCVNLINNTCFYTKNGHSLGIAFTDLPPNLYPTVGLQTPGEVVDANFGQHPFVFDIEDYMREWRTKIQAQIDRFPIGDREGEWQTMIQKMVSSYLVHHGYCATAEAFARSTDQTVLEELASIKNRQRIQKLVLAGRMGEAIETTQQLYPSLLERNPNLLFTLKVRQFIEMVNGTDSEVRCLGGRSPKSQDSYPVSPRPFSSPSMSPSHGMNIHNLASGKGSTAHFSGFESCSNGVISNKAHQSYCHSNKHQSSNLNVPELNSINMSRSQQVNNFTSNDVDMETDHYSNGVGETSSNGFLNGSSKHDHEMEDCDTEMEVDSSQLRRQLCGGSQAAIERMIHFGRELQAMSEQLRRDCGKNTANKKMLKDAFSLLAYSDPWNSPVGNQLDPIQREPVCSALNSAILETHNLPKQPPLALAMGQATQCLGLMARSGIGSCAFATVEDYLH

SEQ ID NO: 321 - DNA, 1248 bp, Homo sapiens
aggaaagggcggtcctgcgctgtggcccacgctcgctcccgctgtcggactctgggcctggaccgcgcgtggccggcgccaaaagcgagaggcatgagcgcgcgcccgggccagtgaactgctcggggatggactgcggctcggtcggcggccagaggacccagcgcctgcccggccgccagcggcttctcttcttgcccgtgggcctcagcggaagaccgggcggcagcgaaacctcagcacgccgctgcctctctgcgctctccgacggtctgggggcgctgcgccctcgcgccccggcggcccgcggcggcgtgtcacgtgcctcaccgctgctcctcctcctgctagtgccctccccgcgcttggccgccgcagccccgcgccggcagctcggggactgggagcgctcgcgcctcgggtatgccgcacccccggccgggcgcagcagcgcgtggaggtgctcaccgggcgtcgccgctgccgccggcgcccttccccagtaccacggcccggcgcctgcactcgtttcctgcaggagagagctaagcttgtctgctggatccctgcagctggagcgcaaaaggagagatttcacctcttctgggagcaggaaactctacttcgacactcatgccttagtgtgcttactggaagacaatgggtttgctactcaacaagcagaaatcattgtgtctgcattggtcaagatcctggaggccaacatggacatcgtctacaaagatatggtcaccaagatgcagcaggaaatcacttttcagcaagtaatgtctcagattgcgaatgtgaaaaaggatatgattattttggagaagagtgaattttcagccctcagagcagaaaatgagaaaataaaactcgaactacatcagttaaaacaacaagtaatggatgaagtgatcaaagtccgaacagataccaaattagacttcaacctagaaaagagcagagtaaaagaattgtattcattgaacgaaaagaagctgctggaattgagaacagaaatagtggcattgcatgcccagcaagatcgggcccttacccagacagacaggaagatcgaaactgaggttgctggcctcaaaaccatgcttgagtcacacaagcttgataatattaaatatttagcagggtctatatttacgtgcctaacagtagctctgggattttatcgcctgtggatctaataaagtgtctatttaaagtgaaaaaaaaaaaaaaaaaaaa

SEQ ID NO: 322 - protein, 359 aa, Homo sapiens
MDCGSVGGQRTQRLPGRQRLLFLPVGLSGRPGGSETSARRCLSALSDGLGALRPRAPAARGGVSRASPLLLLLLVPSPRLAAAAPRRQLGDWERSRLGYAAPPAGRSSAWRCSPGVAAAAGALPQYHGPAPALVSCRRELSLSAGSLQLERKRRDFTSSGSRKLYFDTHALVCLLEDNGFATQQAEIIVSALVKILEANMDIVYKDMVTKMQQEITFQQVMSQIANVKKDMIILEKSEFSALRAENEKIKLELHQLKQQVMDEVIKVRTDTKLDFNLEKSRVKELYSLNEKKLLELRTEIVALHAQQDRALTQTDRKIETEVAGLKTMLESHKLDNIKYLAGSIFTCLTVALGFYRLWI

SEQ ID NO: 323 - DNA, 10692 bp, Homo sapiens
gaggagagagcagagtataccgcagacatcatttctactacagtggcggagccgtacaggacctgtttcactgcagggggatccaaaacaagccccgtggagcagcagccagagcaacagcagccgcaagacattgtttctctccctctgcccccccttccccacgcaaccccagatccatttacactttacagttttacctcacaaaaactactacaagcaccaagctccctgatggaaaggagcatcgtgcatcaagtcaccagggtggtccattcaagctgcagatttgtttgtcatccttgtacagcaatctcctcctccactgccactacagggaagtgcatcacatgtcagcatactggagcatagtgaaagagtctattttgaagcttcaaacttagtgctgctgcagaccaggaacaagagagaaagagtggatttcagcctgcacggatggtcttgaaacacaaatggtttttggtctaggcgttttacactgagattctccactgccaccctttctactcaagcaaaatcttcgtgaaaagatctgctgcaaggaactgatagcttatggttctccattgtgatgaaagcacatggtacagttttccaaagaaattagaccattttcttcgtgagaaagaaatcgacgtgctgttttcatagggtatttctcacttctctgtgaaaggaagaaagaacacgcctgagcccaagagccctcaggagccctccagagcctgtgggaagtctccatggtgaagtataggctgaggctacctgtgaacagtacgcagtgaatgttcatccagagctgctgttggcggattgtacccacggggagatgattcctcatgaagagcctggatcccctacagaaatcaaatgtgactttccgtttatcagactaaaatcagagccatccagacagtgaaacagtcaccgtggaggggggacggcgaaaaatgaaatccaaccaagagcggagcaacgaatgcctgcctcccaagaagcgcgagatccccgccaccagccggtcctccgaggagaaggcccctaccctgcccagcgacaaccaccgggtggagggcacagcatggctcccgggcaaccctggtggccggggccacgggggcgggaggcatgggccggcagggacctcggtggagcttggtttacaacagggaataggtttacacaaagcattgtccacagggctggactactccccgcccagcgctcccaggtctgtccccgtggccaccacgctgcctgccgcgtacgccaccccgcagccagggaccccggtgtcccccgtgcagtacgctcacctgccgcacaccttccagttcattgggtcctcccaatacagtggaacctatgccagcttcatcccatcacagctgatccccccaaccgccaaccccgtcaccagtgcagtggcctcggccgcaggggccaccactccatcccagcgctcccagctggaggcctattccactctgctggccaacatgggcagtctgagccagacgccgggacacaaggctgagcagcagcagcagcagcagcagcagcagcagcagcagcatcagcatcagcagcagcagcagcagcagcagcagcagcagcagcagcagcacctcagcagggctccggggctcatcaccccggggtcccccccaccagcccagcagaaccagtacgtccacatttccagttctccgcagaacaccggccgcaccgcctctcctccggccatccccgtccacctccacccccaccagacgatgatcccacacacgctcaccctggggcccccctcccaggtcgtcatgcaatacgccgactccggcagccactttgtccctcgggaggccaccaagaaagctgagagcagccggctgcagcaggccatccaggccaaggaggtcctgaacggtgagatggagaagagccggcggtacggggccccgtcctcagccgacctgggcctgggcaaggcaggcggcaagtcggttcctcacccgtacgagtccaggcacgtggtggtccacccgagcccctcagactacagcagtcgtgatccttcgggggtccgggcctctgtgatggtcctgcccaacagcaacacgcccgcagctgacctggaggtgcaacaggccactcatcgtgaagcctccccttctaccctcaacgacaaaagtggcctgcatttagggaagcctggccaccggtcctacgcgctctcaccccacacggtcattcagaccacacacagtgcttcagagccactcccggtgggactgccagccacggccttctacgcagggactcaaccccctgtcatcggctacctgagcggccagcagcaagcaatcacctacgccggcagcctgccccagcacctggtgatccccggcacacagcccctgctcatcccggtcggcagcactgacatggaagcgtcgggggcagccccggccatagtcacgtcatccccccagtttgctgcagtgcctcacacgttcgtcaccaccgcccttcccaagagcgagaacttcaaccctgaggccctggtcacccaggccgcctacccagccatggtgcaggcccagatccacctgcctgtggtgcagtccgtggcctccccggcggcggctccccctacgctgcctccctacttcatgaaaggctccatcatccagttggccaacggggagctaaagaaggtggaagacttaaaaacagaagatttcatccagagtgcagagataagcaacgacctgaagatcgactccagcaccgtagagaggattgaagacagccatagcccgggcgtggccgtgatacagttcgccgtcggggagcaccgagcccaggtcagcgttgaagttttggtagagtatcctttttttgtgtttggacagggctggtcatcctgctgtccggagagaaccagccagctctttgatttgccgtgttccaaactctcagttggggatgtctgcatctcgcttaccctcaagaacctgaagaacggctctgttaaaaagggccagcccgtggatcccgccagcgtcctgctgaagcactcaaaggccgacggcctggcgggcagcagacacaggtatgccgagcaggaaaacggaatcaaccaggggagtgcccagatgctctctgagaatggcgaactgaagtttccagagaaaatgggattgcctgcagcgcccttcctcaccaaaatagaacccagcaagcccgcggcaacgaggaagaggaggtggtcggcgccagagagccgcaaactggagaagtcagaagacgaaccacctttgactcttcctaagccttctctaattcctcaggaggttaagatttgcattgaaggccggtctaatgtaggcaagtagaggcagcgtgggggaaaggaaacgtggctctcccttatcatttgtatccagattactgtactgtaggctaaaataacacagtatttacatgttatcttcttaattttaggtttctgttctaaccttgtcattagagttacagcaggtgtgtcgcaggagactggtgcatatgctttttccacgagtgtctgtcagtgagcgggcgggaggaagggcacagcaggagcggtcagggctccaggcatccccggggaagaaaggaacggggcttcacagtgcctgccttctctagcggcacagaagcagccgggggcgctgactcccgctagtgtcaggagaaaagtcccgtgggaagagtcctgcaggggtgcagggttgcacgcatgtgggggtgcacaggcgctgtggcggcgagtgagggtctctttttctctgcctccctctgcctcactctcttgctatcggcatgggccgggggggttcagagcagtgtcctcctggggttcccacgtgcaaaatcaacatcaggaacccagcttcagggcatcgcggagacgcgtcagatggcagatttggaaagttaaccatttaaaagaacatttttctctccaacatattttacaataaaagcaacttttaattgtatagatatatatttccccctatggggcctgactgcactgatatatattttttttaaagagcaactgccacatgcgggatttcatttctgctttttactagtgcagcgatgtcaccagggtgttgtggtggacagggaagcccctgctgtcatggccccacatggggtaaggggggttgggggtgggggagagggagagagcgaacacccacgctggtttctgtgcagtgttaggaaaaccaatcaggttattgcattgacttcactcccaagaggtagatgcaaactgcccttcagtgagagcaacagaagctcttcacgttgagtttgcgaaatctttttgtctttgaactctagtactgtttatagttcatgactatggacaactcgggtgccactttttttttttttcagattccagtgtgacatgaggaattagattttgaagatgagcatatattactatctttaagcatttaaaaatactgttcacactttattaccaagcatcttggtctctcattcaacaagtactgtatctcactttaaactctttggggaaaaaacaaaaacaaaaaaaactaagttgctttctttttttcaacactgtaactacatttcagctctgcagaattgctgaagagcaagatattgaaagtttcaatgtggtttaaagggatgaatgtgaattatgaactagtatgtgacaataaatgaccaccaagtactacctgacgggaggcacttttcactttgatgtctgagaatcagttcaaggcatatgcagagttggcagagaaactgagagaaaagggatggagaagagaatactcatttttgtccagtgtttttctttttaagatgaacttttaaagaaccttgcgatttgcacatattgagtttataacttgtgtgatattcctgcagtttttatccaataacattgtgggaaaggtttgggggactgaacgagcataaataaatgtagcaaaatttctttctaacctgcctaaactctaggccattttataaggttatgttcctttgaaaattcattttggtctttttaccacatctgtcacaaaaagccaggtcttagcgggctcttagaaactctgagaattttcttcagattcattgagagagttttccataaagacatttatatatgtgagcaagattttttttaaacaattactttattattgttgttattaatgttattttcagaatggcttttttttttctattcaaaatcaaatcgagatttaatgtttggtacaaacccagaaagggtatttcatagtttttaaacctttcattcccagagatccgaaatatcatttgtgggttttgaatgcatctttaaagtgctttaaaaaaaagttttataagtagggagaaatttttaaatattcttacttggatggctgcaactaaactgaacaaatacctgacttttcttttaccccattgaaaatagtactttcttcgtttcacaaattaaaaaaaaaatctggtatcaacccacattttggctgtctagtattcatttacatttagggttcaccaggactaatgatttttataaaccgttttctggggtgtaccaaaaacatttgaataggtttagaatagctagaatagttccttgactttcctcgaatttcattaccctctcagcatgcttgcagagagctgggtgggctcattcttgcagtcatactgcttatttagtgctgtattttttaaacgtttctgttcagagaacttgcttaatcttccatatattctgctcagggcacttgcaattattaggttttgtttttctttttgttttttagcctttgatggtaagaggaatacgggctgccacatagactttgttctcattaatatcactatttacaactcatgtggactcagaaaaacacacaccaccttttggcttacttcgagtattgaattgactggatccactaaaccaacactaagatgggaaaacacacatggtttggagcaataggaacatcatcataatttttgtggttctatttcaggtataggaattataaaataattggttctttctaaacacttgtcccatttcattctcttgcttttttagcatgtgcaatactttctgtgccaatagagtctgaccagtgtgctatatagttaaagctcattcccttttggctttttccttgtttggttgatcttccccattctggccagagcagggctggagggaaggagccaggagggagagagcctcccacctttcccctgctgcggatgctgagtgctggggcggggagccttcaggagccccgtgcgtctgccgccacgttgcagaaagagccagccaaggagacccgggggaggaaccgcagtgtcccctgtcaccacacggaatagtgaatgtggagtgtggagaggaaggaggcagattcatttctaagacgcactctggagccatgtagcctggagtcaacccattttccacggtcttttctgcaagtgggcaggcccctcctcggggtctgtgtccttgagacttggagccctgcctctgagcctggacgggaagtgtggcctgttgtgtgtgtgcgttctgagcgtgttggccagtggctgtggaggggaccacctgccacccacggtcaccactcccttgtggcagctttctcttcaaataggaagaacgcacagagggcaggagcctcctgtttgcagacgttggcgggccccgaggctcccagagcagcctctgtcaccgcttctgtgtagcaaacattaacgatgacaggggtagaaattcttcggtgccgttcagcttacaaggatcagccatgtgcctctgtactatgtccactttgcaatatttaccgacagccgtcttttgttctttctttcctgttttccatttttaaactagtaacagcaggccttttgcgtttacaatggaacacaatcaccaagaaattagtcagggcgaaaagaaaaaaataatactattaataagaaaccaacaaacaagaacctctctttctagggatttctaaatatataaaatgactgttccttagaatgtttaacttaagaattatttcagtttgtctgggccacactggggcagaggggggagggagggatacagagatggatgccacttacctcagatcttttaaagtggaaatccaaattgaattttcatttggactttcaggataattttctatgttggtcaacttttcgttttccctaactcacccagtttagtttgggatgatttgatttctgttgttgttgatcccatttctaacttggaattgtgagcctctatgttttctgttaggtgagtgtgttgggttttttccccccaccaggaagtggcagcatccctccttctcccctaaagggactctgcggaacctttcacacctctttctcagggacggggcaggtgtgtgtgtggtacactgacgtgtccagaagcagcactttgactgctctggagtagggttgtacaatttcaaggaatgtttggatttcctgcatcttgtggattactccttagataccgcatagattgcaatataatgctgcatgttcaagatgaacagtagctcctagtaatcataaaatccactctttgcacagtttgatctttactgaaatatgttgccaaaatttatttttgttgttgtagctctggattttgttttgttttgttttttaaggaaacgattgacaataccctttaacatctgtgactactaaggaaacctatttctttcatagagagaaaaatctccaatgcttttgaagacactaataccgtgctatttcagatatgggtgaggaagcagagctctcggtaccgaaggccgggcttcttgagctgtgttggttgtcatggctactgtttcatgaaccacaagcagctcaacagactggtctgttgccttctgaaaccctttgcacttcaatttgcaccaggtgaaaacagggccagcagactccatggcccaattcggtttcttcggtggtgatgtgaaaggagagaattacactttttttttttttaagtggcgtggaggcctttgcttccacatttgtttttaacccagaatttctgaaatagagaatttaagaacacatcaagtaataaatatacagagaatatacttttttataaagcacatgcatctgctattgtgttgggttggtttcctctcttttccacggacagtgttgtgtttctggcatagggaaactccaaacaacttgcacacctctactccggagctgagatttcttttacatagatgacctcgcttcaaatacgttaccttactgatgataggatcttttcttgtagcactataccttgtgggaatttttttttaaatgtacacctgatttgagaagctgaagaaaacaaaattttgaagcactcactttgaggagtacaggtaatgttttaaaaaattgcacaaaagaaaaatgaatgtcgaaatgattcattcagtgtttgaaagatatggctctgttgaaacaatgagtttcatactttgtttgtaaaaaaaaaaaagcagagaagggttgaaagttacatgtttttttgtatatagaaatttgtcatgtctaaatgatcagatttgtatggttatggcctggaagaattactacgtaaaaggctcttaaactatacctatgcttattgttatttttgttacatatagccctcgtctgagggaggggaactcggtattctgcgatttgagaatactgttcattcctatgctgaaagtacttctctgagctcccttcttagtctaaactcttaagccattgcaacttctttttcttcagagatgatgtttgacattttcagcacttcctgttcctataaacccaaagaatataatcttgaacacgaagtgtttgtaacaagggatccaggctaccaatcaaacaggactcattatggggacaaaaaaaaaaattatttcaccttctttccccccacacctcatttaaatggggggagtaaaaacatgatttcaatgtaaatgcctcattttattttagttttattttgatttttatttaatataaagaggccagaataaatacggagcatcttctcagaatagtattcctgtccaaaaatcaagccggacagtggaaactggacagctgtggggatattaagcacccccacttacaattcttaaattcagaatctcgtcccctcccttctcgttgaaggcaactgttctggtagctaactttctcctgtgtaatggcgggagggaacaccggcttcagtttttcatgtccccatgacttgcatacaaatggttcaactgtattaaaattaagtgcatttggccaataggtagtatctatacaataacaacaatctctaagaatttccataacttttcttatctgaaaggactcaagtcttccactgcagatacattggaggcttcacccacgttttctttccctttagtttgtttgctgtctggatggccaatgagcctgtctccttttctgtggccaatctgaaggccttcgttggaagtgttgtttacagtaatccttaccaagataacatactgtcctccagaataccaagtattaggtgacactagctcaagctgttgtcttcagagcagttaccaagaagctcggtgcacaggttttctctggttcttacaggaaccacctactctttcagttttctggcccaggagtggggtaaatcctttagttagtgcatttgaacttgatacctgtgcattcagttctgtgaatactgccctttttggcggggtttcctcatctccccagcctgaactgctcaactctaaacccaaattagtgtcagccgaaaggaggtttcaagatagtcctgtcagtatttgtggtgaccttcagattagacagtcttcatttccagccagtggagtcctggctccagagccatctctgagactcgtactactggatgttttaatatcagatcattacccaccatatgcctcccacaggccaagggaaaacagacaccagaacttgggttgagggcactaccagactgacatggccagtacagaggagaactagggaaggaatgatgttttgcaccttattgaaaagaaaattttaagtgcatacataatagttaagagcttttattgtgacaggagaacttttttccatatgcgtgcatactctctgtaattccagtgtaaaatattgtacttgcactagcttttttaaacaaatattaaaaaatggaagaattcatattctattttctaatcgtggtgtgtctatttgtaggatacactcgagtctgtttattgaattttatggtccctttctttgatggtgcttgcaggttttctaggtagaaattatttcattattataataaaacaatgtttgattcaaaatttgaacaaaattgttttaaataaattgtctgtataccagtacaagtttattgtttcagtatactcgtactaataaaataacagtgccaattgcaaaaaaaaaaaaaaaaaaaaaaaaaaaaaaaaaaaaaaaaaaaaaaaaaaaaaaaaa

SEQ ID NO: 324 - protein, 815 aa, Homo sapiens
MKSNQERSNECLPPKKREIPATSRSSEEKAPTLPSDNHRVEGTAWLPGNPGGRGHGGGRHGPAGTSVELGLQQGIGLHKALSTGLDYSPPSAPRSVPVATTLPAAYATPQPGTPVSPVQYAHLPHTFQFIGSSQYSGTYASFIPSQLIPPTANPVTSAVASAAGATTPSQRSQLEAYSTLLANMGSLSQTPGHKAEQQQQQQQQQQQQHQHQQQQQQQQQQQQQQHLSRAPGLITPGSPPPAQQNQYVHISSSPQNTGRTASPPAIPVHLHPHQTMIPHTLTLGPPSQVVMQYADSGSHFVPREATKKAESSRLQQAIQAKEVLNGEMEKSRRYGAPSSADLGLGKAGGKSVPHPYESRHVVVHPSPSDYSSRDPSGVRASVMVLPNSNTPAADLEVQQATHREASPSTLNDKSGLHLGKPGHRSYALSPHTVIQTTHSASEPLPVGLPATAFYAGTQPPVIGYLSGQQQAITYAGSLPQHLVIPGTQPLLIPVGSTDMEASGAAPAIVTSSPQFAAVPHTFVTTALPKSENFNPEALVTQAAYPAMVQAQIHLPVVQSVASPAAAPPTLPPYFMKGSIIQLANGELKKVEDLKTEDFIQSAEISNDLKIDSSTVERIEDSHSPGVAVIQFAVGEHRAQVSVEVLVEYPFFVFGQGWSSCCPERTSQLFDLPCSKLSVGDVCISLTLKNLKNGSVKKGQPVDPASVLLKHSKADGLAGSRHRYAEQENGINQGSAQMLSENGELKFPEKMGLPAAPFLTKIEPSKPAATRKRRWSAPESRKLEKSEDEPPLTLPKPSLIPQEVKICIEGRSNVGK

SEQ ID NO: 325 - DNA, 971 bp, Homo sapiens
gattgcttgaggagagaagtatgtgatcagaaagcattctttgtctattaactcctgcccagcaaaagtgaaagaaaattcatgggagcatgcaagaacaaagagcacagcaaagctggacaaacacagcaatccaggcaggggatttccaactcaactctggtatgtaagctgcatgcaaagtcctttttctgtctctggtttctggccccttgtctgcagagatggctcccaatgcttcctgcctctgtgtgcatgtccgttccgaggaatgggatttaatgacctttgatgccaacccatatgacagcgtgaaaaaaatcaaagaacatgtccggtctaagaccaaggttcctgtgcaggaccaggttcttttgctgggctccaagatcttaaagccacggagaagcctctcatcttacggcattgacaaagagaagaccatccaccttaccctgaaagtggtgaagcccagtgatgaggagctgcccttgtttcttgtggagtcaggtgatgaggcaaagaggcacctcctccaggtgcgaaggtccagctcagtggcacaagtgaaagcaatgatcgagactaagacgggtataatccctgagacccagattgtgacttgcaatggaaagagactggaagatgggaagatgatggcagattacggcatcagaaagggcaacttactcttcctggcatcttattgtattggagggtgaccaccctgggcatggggtgttggcaggggtcaaaaagcttatttcttttaatctcttactcaacgaacacatcttctgatgatttcccaaaattaatgagaatgagatgagtagagtaagatttgggtgggatgggtaggatgaagtatattgcccaactctatgtttctttgattctaacacaattaattaagtgacatgatttttactaatgtattactgagactagtaaataaatttttaagccaa

SEQ ID NO: 326 - protein, 165 aa, Homo sapiens
MAPNASCLCVHVRSEEWDLMTFDANPYDSVKKIKEHVRSKTKVPVQDQVLLLGSKILKPRRSLSSYGIDKEKTIHLTLKVVKPSDEELPLFLVESGDEAKRHLLQVRRSSSVAQVKAMIETKTGIIPETQIVTCNGKRLEDGKMMADYGIRKGNLLFLASYCIGG

SEQ ID NO: 327 - DNA, 1063 bp, Homo sapiens
tgacagcctcatccctccaggtacaaacaagaacaggccatggttaaccaaagctccacaccgggcttcctccttctgggcttctctgaacacccagggctggaaaggactctcttcgtggttgtcctcacttcctacctcctaaccctagtgggcaacacactcatcatcctgctgtctgcgctggaccccaagctccactctccaatgtactttttcctctccaacctctccttcttggacctctgtttcaccacgagttgtgttccccaaatgctggtcaacctctggggcccaaagaagaccatcagcttcctggactgctctgtccagatcttcatcttcctgtccctggggacaactgagtgcatcctcttgacagtgatggcttttgatcgctacgtggctgtctgccagcccctccactatgccaccatcatccacccccgcctgtgctggcagctggcatctgtggcctgggtcattgggctagtggagtcagtggtccagacaccatccaccctgcacctgcccttctgccccgatcggcaggtggatgattttgtctgtgaggtcccagctctaattcgactctcctgtgaagacacctcctacaatgagatccaggtggctgttgccagtgtcttcatcttggttgtgcctctcagcctcatccttgtctcttacggagccattacctgggcagtgctgaggattaactctgcaaaagggcggaggaaagcttttgggacctgctcctcccatctcactgtggtcaccctcttctacagctcagtcattgctgtctacctccagcccaaaaatccctatgcccaagagaggggcaagttctttggtctcttctatgcagtgggcactccttcacttaaccctctcatatacaccctgaggaacaaggaggtaaccagggcattcaggagattgctggggaaggaaatggggctcacacaaagctgagggagagctgcttaatgtgctttaaaagagaggagattctatgtgcttttatcagaaagtttgagttccctgcccctctgccttc

SEQ ID NO: 328 - protein, 312 aa, Homo sapiens
MVNQSSTPGFLLLGFSEHPGLERTLFVVVLTSYLLTLVGNTLIILLSALDPKLHSPMYFFLSNLSFLDLCFTTSCVPQMLVNLWGPKKTISFLDCSVQIFIFLSLGTTECILLTVMAFDRYVAVCQPLHYATIIHPRLCWQLASVAWVIGLVESVVQTPSTLHLPFCPDRQVDDFVCEVPALIRLSCEDTSYNEIQVAVASVFILVVPLSLILVSYGAITWAVLRINSAKGRRKAFGTCSSHLTVVTLFYSSVIAVYLQPKNPYAQERGKFFGLFYAVGTPSLNPLIYTLRNKEVTRAFRRLLGKEMGLTQS

SEQ ID NO: 329 - DNA, 4445 bp, Homo sapiens
cgctccccgctcccgtggctgccgccgccccggggaagaagagacaggggtggggtttgggggaagcgagagaggaggggagagaccctggccaggctggagcctggattcgaggggaggagggacgggaggaggagaaaggtggaggagaagggaggggggagcggggaggagcggccgggcctggggccttgaggcccggggagagccggggagccgggcccgcgcgccgagatgttgctgctgctgttactggcgccactcttcctccgccccccgggcgcgggcggggcgcagacccccaacgccacctcagaaggttgccagatcatacacccgccctgggaagggggcatcaggtaccggggcctgactcgggaccaggtgaaggctatcaacttcctgccagtggactatgagattgagtatgtgtgccggggggagcgcgaggtggtggggcccaaggtccgcaagtgcctggccaacggctcctggacagatatggacacacccagccgctgtgtccgaatctgctccaagtcttatttgaccctggaaaatgggaaggttttcctgacgggtggggacctcccagctctggacggagcccgggtggatttccggtgtgaccccgacttccatctggtgggcagctcccggagcatctgtagtcagggccagtggagcacccccaagccccactgccaggtgaatcgaacgccacactcagaacggcgcgcagtgtacatcggggcactgtttcccatgagcgggggctggccagggggccaggcctgccagcccgcggtggagatggcgctggaggacgtgaatagccgcagggacatcctgccggactatgagctcaagctcatccaccacgacagcaagtgtgatccaggccaagccaccaagtacctatatgagctgctctacaacgaccctatcaagatcatccttatgcctggctgcagctctgtctccacgctggtggctgaggctgctaggatgtggaacctcattgtgctttcctatggctccagctcaccagccctgtcaaaccggcagcgtttccccactttcttccgaacgcacccatcagccacactccacaaccctacccgcgtgaaactctttgaaaagtggggctggaagaagattgctaccatccagcagaccactgaggtcttcacttcgactctggacgacctggaggaacgagtgaaggaggctggaattgagattactttccgccagagtttcttctcagatccagctgtgcccgtcaaaaacctgaagcgccaggatgcccgaatcatcgtgggacttttctatgagactgaagcccggaaagttttttgtgaggtgtacaaggagcgtctctttgggaagaagtacgtctggttcctcattgggtggtatgctgacaattggttcaagatctacgacccttctatcaactgcacagtggatgagatgactgaggcggtggagggccacatcacaactgagattgtcatgctgaatcctgccaatacccgcagcatttccaacatgacatcccaggaatttgtggagaaactaaccaagcgactgaaaagacaccctgaggagacaggaggcttccaggaggcaccgctggcctatgatgccatctgggccttggcactggccctgaacaagacatctggaggaggcggccgttctggtgtgcgcctggaggacttcaactacaacaaccagaccattaccgaccaaatctaccgggcaatgaactcttcgtcctttgagggtgtctctggccatgtggtgtttgatgccagcggctctcggatggcatggacgcttatcgagcagcttcagggtggcagctacaagaagattggctactatgacagcaccaaggatgatctttcctggtccaaaacagataaatggattggagggtcccccccagctgaccagaccctggtcatcaagacattccgcttcctgtcacagaaactctttatctccgtctcagttctctccagcctgggcattgtcctagctgttgtctgtctgtcctttaacatctacaactcacatgtccgttatatccagaactcacagcccaacctgaacaacctgactgctgtgggctgctcactggctttagctgctgtcttccccctggggctcgatggttaccacattgggaggaaccagtttcctttcgtctgccaggcccgcctctggctcctgggcctgggctttagtctgggctacggttccatgttcaccaagatttggtgggtccacacggtcttcacaaagaaggaagaaaagaaggagtggaggaagactctggaaccctggaagctgtatgccacagtgggcctgctggtgggcatggatgtcctcactctcgccatctggcagatcgtggaccctctgcaccggaccattgagacatttgccaaggaggaacctaaggaagatattgacgtctctattctgccccagctggagcattgcagctccaggaagatgaatacatggcttggcattttctatggttacaaggggctgctgctgctgctgggaatcttccttgcttatgagaccaagagtgtgtccactgagaagatcaatgatcaccgggctgtgggcatggctatctacaatgtggcagtcctgtgcctcatcactgctcctgtcaccatgattctgtccagccagcaggatgcagcctttgcctttgcctctcttgccatagttttctcctcctatatcactcttgttgtgctctttgtgcccaagatgcgcaggctgatcacccgaggggaatggcagtcggaggcgcaggacaccatgaagacagggtcatcgaccaacaacaacgaggaggagaagtcccggctgttggagaaggagaaccgtgaactggaaaagatcattgctgagaaagaggagcgtgtctctgaactgcgccatcaactccagtctcggcagcagctccgctcccggcgccacccaccgacacccccagaaccctctgggggcctgcccaggggaccccctgagccccccgaccggcttagctgtgatgggagtcgagtgcatttgctttataagtgagggtagggtgagggaggacaggccagtagggggagggaaagggagaggggaagggcaggggactcaggaagcagggggtccccatccccagctgggaagaacatgctatccaatctcatctcttgtaaatacatgtccccctgtgagttctgggctgatttgggtctctcatacctctgggaaacagacctttttctctcttactgcttcatgtaattttgtatcacctcttcacaatttagttcgtacctggcttgaagctgctcactgctcacacgctgcctcctcagcagcctcactgcatctttctcttcccatgcaacaccctcttctagttaccacggcaacccctgcagctcctctgcctttgtgctctgttcctgtccagcaggggtctcccaacaagtgctctttccaccccaaaggggcctctccttttctccactgtcataatctctttccatcttacttgcccttctatactttctcacatgtggctccccctgaattttgcttcctttgggagctcattcttttcgccaaggctcacatgctccttgcctctgctctgtgcactcacgctcagcacacatgcatcctcccctctcctgcgtgtgcccactgaacatgctcatgtgtacacacgcttttcccgtatgctttcttcatgttcagtcacatgtgctctcgggtgccctgcattcacagctacgtgtgcccctctcatggtcatgggtctgcccttgagcgtgtttgggtaggcatgtgcaatttgtctagcatgctgagtcatgtctttcctatttgcacacgtccatgtttatccatgtactttccctgtgtaccctccatgtaccttgtgtactttcttcccttaaatcatggtattcttctgacagagccatatgtaccctaccctgcacattgttatgcacttttccccaattcatgtttggtggggccatccacaccctctccttgtcacagaatctccatttctgctcagattccccccatctccattgcattcatgtactaccctcagtctacactcacaatcatcttctcccaagactgctcccttttgttttgtgtttttttgaggggaattaaggaaaaataagtgggggcaggtttggagagctgcttccagtggatagttgatgagaatcctgaccaaaggaaggcacccttgactgttgggatagacagatggacctatggggtgggaggtggtgtccctttcacactgtggtgtctcttggggaaggatctccccgaatctcaataaaccagtgaacagtgtgactcggcaaaaaaaaaaa

SEQ ID NO: 330 - protein, 961 aa, Homo sapiens
MLLLLLLAPLFLRPPGAGGAQTPNATSEGCQIIHPPWEGGIRYRGLTRDQVKAINFLPVDYEIEYVCRGEREVVGPKVRKCLANGSWTDMDTPSRCVRICSKSYLTLENGKVFLTGGDLPALDGARVDFRCDPDFHLVGSSRSICSQGQWSTPKPHCQVNRTPHSERRAVYIGALFPMSGGWPGGQACQPAVEMALEDVNSRRDILPDYELKLIHHDSKCDPGQATKYLYELLYNDPIKIILMPGCSSVSTLVAEAARMWNLIVLSYGSSSPALSNRQRFPTFFRTHPSATLHNPTRVKLFEKWGWKKIATIQQTTEVFTSTLDDLEERVKEAGIEITFRQSFFSDPAVPVKNLKRQDARIIVGLFYETEARKVFCEVYKERLFGKKYVWFLIGWYADNWFKIYDPSINCTVDEMTEAVEGHITTEIVMLNPANTRSISNMTSQEFVEKLTKRLKRHPEETGGFQEAPLAYDAIWALALALNKTSGGGGRSGVRLEDFNYNNQTITDQIYRAMNSSSFEGVSGHVVFDASGSRMAWTLIEQLQGGSYKKIGYYDSTKDDLSWSKTDKWIGGSPPADQTLVIKTFRFLSQKLFISVSVLSSLGIVLAVVCLSFNIYNSHVRYIQNSQPNLNNLTAVGCSLALAAVFPLGLDGYHIGRNQFPFVCQARLWLLGLGFSLGYGSMFTKIWWVHTVFTKKEEKKEWRKTLEPWKLYATVGLLVGMDVLTLAIWQIVDPLHRTIETFAKEEPKEDIDVSILPQLEHCSSRKMNTWLGIFYGYKGLLLLLGIFLAYETKSVSTEKINDHRAVGMAIYNVAVLCLITAPVTMILSSQQDAAFAFASLAIVFSSYITLVVLFVPKMRRLITRGEWQSEAQDTMKTGSSTNNNEEEKSRLLEKENRELEKIIAEKEERVSELRHQLQSRQQLRSRRHPPTPPEPSGGLPRGPPEPPDRLSCDGSRVHLLYK

SEQ ID NO: 331 - DNA, 4039 bp, Homo sapiens
agagccgcgggggccgtaggaagccaaccttccctgcttctccggggccctcgccccctcctccccacaaaatcagggatggaggcgcctccccggcaccctcttagcagccctccccaggaaaagtgtcccccctgagctcctaacgctccccaacagctacccctgccccccacgccatggggcccggggccccttttgcccgggtggggtggccactgccgcttctggttgtgatggcggcaggggtggctccggtgtgggcctcccactccccccatctcccgcggcctcactcgcgggtccccccgcacccctcctcagaacggcgcgcagtgtacatcggggcactgtttcccatgagcgggggctggccagggggccaggcctgccagcccgcggtggagatggcgctggaggacgtgaatagccgcagggacatcctgccggactatgagctcaagctcatccaccacgacagcaagtgtgatccaggccaagccaccaagtacctatatgagctgctctacaacgaccctatcaagatcatccttatgcctggctgcagctctgtctccacgctggtggctgaggctgctaggatgtggaacctcattgtgctttcctatggctccagctcaccagccctgtcaaaccggcagcgtttccccactttcttccgaacgcacccatcagccacactccacaaccctacccgcgtgaaactctttgaaaagtggggctggaagaagattgctaccatccagcagaccactgaggtcttcacttcgactctggacgacctggaggaacgagtgaaggaggctggaattgagattactttccgccagagtttcttctcagatccagctgtgcccgtcaaaaacctgaagcgccaggatgcccgaatcatcgtgggacttttctatgagactgaagcccggaaagttttttgtgaggtgtacaaggagcgtctctttgggaagaagtacgtctggttcctcattgggtggtatgctgacaattggttcaagatctacgacccttctatcaactgcacagtggatgagatgactgaggcggtggagggccacatcacaactgagattgtcatgctgaatcctgccaatacccgcagcatttccaacatgacatcccaggaatttgtggagaaactaaccaagcgactgaaaagacaccctgaggagacaggaggcttccaggaggcaccgctggcctatgatgccatctgggccttggcactggccctgaacaagacatctggaggaggcggccgttctggtgtgcgcctggaggacttcaactacaacaaccagaccattaccgaccaaatctaccgggcaatgaactcttcgtcctttgagggtgtctctggccatgtggtgtttgatgccagcggctctcggatggcatggacgcttatcgagcagcttcagggtggcagctacaagaagattggctactatgacagcaccaaggatgatctttcctggtccaaaacagataaatggattggagggtcccccccagctgaccagaccctggtcatcaagacattccgcttcctgtcacagaaactctttatctccgtctcagttctctccagcctgggcattgtcctagctgttgtctgtctgtcctttaacatctacaactcacatgtccgttatatccagaactcacagcccaacctgaacaacctgactgctgtgggctgctcactggctttagctgctgtcttccccctggggctcgatggttaccacattgggaggaaccagtttcctttcgtctgccaggcccgcctctggctcctgggcctgggctttagtctgggctacggttccatgttcaccaagatttggtgggtccacacggtcttcacaaagaaggaagaaaagaaggagtggaggaagactctggaaccctggaagctgtatgccacagtgggcctgctggtgggcatggatgtcctcactctcgccatctggcagatcgtggaccctctgcaccggaccattgagacatttgccaaggaggaacctaaggaagatattgacgtctctattctgccccagctggagcattgcagctccaggaagatgaatacatggcttggcattttctatggttacaaggggctgctgctgctgctgggaatcttccttgcttatgagaccaagagtgtgtccactgagaagatcaatgatcaccgggctgtgggcatggctatctacaatgtggcagtcctgtgcctcatcactgctcctgtcaccatgattctgtccagccagcaggatgcagcctttgcctttgcctctcttgccatagttttctcctcctatatcactcttgttgtgctctttgtgcccaagatgcgcaggctgatcacccgaggggaatggcagtcggaggcgcaggacaccatgaagacagggtcatcgaccaacaacaacgaggaggagaagtcccggctgttggagaaggagaaccgtgaactggaaaagatcattgctgagaaagaggagcgtgtctctgaactgcgccatcaactccagtctcggcagcagctccgctcccggcgccacccaccgacacccccagaaccctctgggggcctgcccaggggaccccctgagccccccgaccggcttagctgtgatgggagtcgagtgcatttgctttataagtgagggtagggtgagggaggacaggccagtagggggagggaaagggagaggggaagggcaggggactcaggaagcagggggtccccatccccagctgggaagaacatgctatccaatctcatctcttgtaaatacatgtccccctgtgagttctgggctgatttgggtctctcatacctctgggaaacagacctttttctctcttactgcttcatgtaattttgtatcacctcttcacaatttagttcgtacctggcttgaagctgctcactgctcacacgctgcctcctcagcagcctcactgcatctttctcttcccatgcaacaccctcttctagttaccacggcaacccctgcagctcctctgcctttgtgctctgttcctgtccagcaggggtctcccaacaagtgctctttccaccccaaaggggcctctccttttctccactgtcataatctctttccatcttacttgcccttctatactttctcacatgtggctccccctgaattttgcttcctttgggagctcattcttttcgccaaggctcacatgctccttgcctctgctctgtgcactcacgctcagcacacatgcatcctcccctctcctgcgtgtgcccactgaacatgctcatgtgtacacacgcttttcccgtatgctttcttcatgttcagtcacatgtgctctcgggtgccctgcattcacagctacgtgtgcccctctcatggtcatgggtctgcccttgagcgtgtttgggtaggcatgtgcaatttgtctagcatgctgagtcatgtctttcctatttgcacacgtccatgtttatccatgtactttccctgtgtaccctccatgtaccttgtgtactttcttcccttaaatcatggtattcttctgacagagccatatgtaccctaccctgcacattgttatgcacttttccccaattcatgtttggtggggccatccacaccctctccttgtcacagaatctccatttctgctcagattccccccatctccattgcattcatgtactaccctcagtctacactcacaatcatcttctcccaagactgctcccttttgttttgtgtttttttgaggggaattaaggaaaaataagtgggggcaggtttggagagctgcttccagtggatagttgatgagaatcctgaccaaaggaaggcacccttgactgttgggatagacagatggacctatggggtgggaggtggtgtccctttcacactgtggtgtctcttggggaaggatctccccgaatctcaataaaccagtgaacagtgtgactcggcaaaaaaaaaaa

SEQ ID NO: 332 - protein, 844 aa, Homo sapiens
MGPGAPFARVGWPLPLLVVMAAGVAPVWASHSPHLPRPHSRVPPHPSSERRAVYIGALFPMSGGWPGGQACQPAVEMALEDVNSRRDILPDYELKLIHHDSKCDPGQATKYLYELLYNDPIKIILMPGCSSVSTLVAEAARMWNLIVLSYGSSSPALSNRQRFPTFFRTHPSATLHNPTRVKLFEKWGWKKIATIQQTTEVFTSTLDDLEERVKEAGIEITFRQSFFSDPAVPVKNLKRQDARIIVGLFYETEARKVFCEVYKERLFGKKYVWFLIGWYADNWFKIYDPSINCTVDEMTEAVEGHITTEIVMLNPANTRSISNMTSQEFVEKLTKRLKRHPEETGGFQEAPLAYDAIWALALALNKTSGGGGRSGVRLEDFNYNNQTITDQIYRAMNSSSFEGVSGHVVFDASGSRMAWTLIEQLQGGSYKKIGYYDSTKDDLSWSKTDKWIGGSPPADQTLVIKTFRFLSQKLFISVSVLSSLGIVLAVVCLSFNIYNSHVRYIQNSQPNLNNLTAVGCSLALAAVFPLGLDGYHIGRNQFPFVCQARLWLLGLGFSLGYGSMFTKIWWVHTVFTKKEEKKEWRKTLEPWKLYATVGLLVGMDVLTLAIWQIVDPLHRTIETFAKEEPKEDIDVSILPQLEHCSSRKMNTWLGIFYGYKGLLLLLGIFLAYETKSVSTEKINDHRAVGMAIYNVAVLCLITAPVTMILSSQQDAAFAFASLAIVFSSYITLVVLFVPKMRRLITRGEWQSEAQDTMKTGSSTNNNEEEKSRLLEKENRELEKIIAEKEERVSELRHQLQSRQQLRSRRHPPTPPEPSGGLPRGPPEPPDRLSCDGSRVHLLYK

SEQ ID NO: 333 - DNA, 4260 bp, Homo sapiens
cgctccccgctcccgtggctgccgccgccccggggaagaagagacaggggtggggtttgggggaagcgagagaggaggggagagaccctggccaggctggagcctggattcgaggggaggagggacgggaggaggagaaaggtggaggagaagggaggggggagcggggaggagcggccgggcctggggccttgaggcccggggagagccggggagccgggcccgcgcgccgagatgttgctgctgctgctactggcgccactcttcctccgccccccgggcgcgggcggggcgcatacccccaacgccacctcagaaggttgccagatcatacacccgccctgggaagggggcatcaggtaccggggcctgactcgggaccaggtgaaggctatcaacttcctgccagtggactatgagattgagtatgtgtgccggggggagcgcgaggtggtggggcccaaggtccgcaagtgcctggccaacggctcctggacagatatggacacacccagccgctgtgtgaatcgaacgccacactcagaacggcgcgcagtgtacatcggggcactgtttcccatgagcgggggctggccagggggccaggcctgccagcccgcggtggagatggcgctggaggacgtgaatagccgcagggacatcctgccggactatgagctcaagctcatccaccacgacagcaagtgtgatccaggccaagccaccaagtacctatatgagctgctctacaacgaccctatcaagatcatccttatgcctggctgcagctctgtctccacgctggtggctgaggctgctaggatgtggaacctcattgtgctttcctatggctccagctcaccagccctgtcaaaccggcagcgtttccccactttcttccgaacgcacccatcagccacactccacaaccctacccgcgtgaaactctttgaaaagtggggctggaagaagattgctaccatccagcagaccactgaggtcttcacttcgactctggacgacctggaggaacgagtgaaggaggctggaattgagattactttccgccagagtttcttctcagatccagctgtgcccgtcaaaaacctgaagcgccaggatgcccgaatcatcgtgggacttttctatgagactgaagcccggaaagttttttgtgaggtgtacaaggagcgtctctttgggaagaagtacgtctggttcctcattgggtggtatgctgacaattggttcaagatctacgacccttctatcaactgcacagtggatgagatgactgaggcggtggagggccacatcacaactgagattgtcatgctgaatcctgccaatacccgcagcatttccaacatgacatcccaggaatttgtggagaaactaaccaagcgactgaaaagacaccctgaggagacaggaggcttccaggaggcaccgctggcctatgatgccatctgggccttggcactggccctgaacaagacatctggaggaggcggccgttctggtgtgcgcctggaggacttcaactacaacaaccagaccattaccgaccaaatctaccgggcaatgaactcttcgtcctttgagggtgtctctggccatgtggtgtttgatgccagcggctctcggatggcatggacgcttatcgagcagcttcagggtggcagctacaagaagattggctactatgacagcaccaaggatgatctttcctggtccaaaacagataaatggattggagggtcccccccagctgaccagaccctggtcatcaagacattccgcttcctgtcacagaaactctttatctccgtctcagttctctccagcctgggcattgtcctagctgttgtctgtctgtcctttaacatctacaactcacatgtccgttatatccagaactcacagcccaacctgaacaacctgactgctgtgggctgctcactggctttagctgctgtcttccccctggggctcgatggttaccacattgggaggaaccagtttcctttcgtctgccaggcccgcctctggctcctgggcctgggctttagtctgggctacggttccatgttcaccaagatttggtgggtccacacggtcttcacaaagaaggaagaaaagaaggagtggaggaagactctggaaccctggaagctgtatgccacagtgggcctgctggtgggcatggatgtcctcactctcgccatctggcagatcgtggaccctctgcaccggaccattgagacatttgccaaggaggaacctaaggaagatattgacgtctctattctgccccagctggagcattgcagctccaggaagatgaatacatggcttggcattttctatggttacaaggggctgctgctgctgctgggaatcttccttgcttatgagaccaagagtgtgtccactgagaagatcaatgatcaccgggctgtgggcatggctatctacaatgtggcagtcctgtgcctcatcactgctcctgtcaccatgattctgtccagccagcaggatgcagcctttgcctttgcctctcttgccatagttttctcctcctatatcactcttgttgtgctctttgtgcccaagatgcgcaggctgatcacccgaggggaatggcagtcggaggcgcaggacaccatgaagacagggtcatcgaccaacaacaacgaggaggagaagtcccggctgttggagaaggagaaccgtgaactggaaaagatcattgctgagaaagaggagcgtgtctctgaactgcgccatcaactccagtctcggcagcagctccgctcccggcgccacccaccgacacccccagaaccctctgggggcctgcccaggggaccccctgagccccccgaccggcttagctgtgatgggagtcgagtgcatttgctttataagtgagggtagggtgagggaggacaggccagtagggggagggaaagggagaggggaagggcaggggactcaggaagcagggggtccccatccccagctgggaagaacatgctatccaatctcatctcttgtaaatacatgtccccctgtgagttctgggctgatttgggtctctcatacctctgggaaacagacctttttctctcttactgcttcatgtaattttgtatcacctcttcacaatttagttcgtacctggcttgaagctgctcactgctcacacgctgcctcctcagcagcctcactgcatctttctcttcccatgcaacaccctcttctagttaccacggcaacccctgcagctcctctgcctttgtgctctgttcctgtccagcaggggtctcccaacaagtgctctttccaccccaaaggggcctctccttttctccactgtcataatctctttccatcttacttgcccttctatactttctcacatgtggctccccctgaattttgcttcctttgggagctcattcttttcgccaaggctcacatgctccttgcctctgctctgtgcactcacgctcagcacacatgcatcctcccctctcctgcgtgtgcccactgaacatgctcatgtgtacacacgcttttcccgtatgctttcttcatgttcagtcacatgtgctctcgggtgccctgcattcacagctacgtgtgcccctctcatggtcatgggtctgcccttgagcgtgtttgggtaggcatgtgcaatttgtctagcatgctgagtcatgtctttcctatttgcacacgtccatgtttatccatgtactttccctgtgtaccctccatgtaccttgtgtactttcttcccttaaatcatggtattcttctgacagagccatatgtaccctaccctgcacattgttatgcacttttccccaattcatgtttggtggggccatccacaccctctccttgtcacagaatctccatttctgctcagattccccccatctccattgcattcatgtactaccctcagtctacactcacaatcatcttctcccaagactgctcccttttgttttgtgtttttttgaggggaattaaggaaaaataagtgggggcaggtttggagagctgcttccagtggatagttgatgagaatcctgaccaaaggaaggcacccttgactgttgggatagacagatggacctatggggtgggaggtggtgtccctttcacactgtggtgtctcttggggaaggatctccccgaatctcaataaaccagtgaacagtgtgactcggcaaaaaaaaaaaa

SEQ ID NO: 334 - protein, 899 aa, Homo sapiens
MLLLLLLAPLFLRPPGAGGAHTPNATSEGCQIIHPPWEGGIRYRGLTRDQVKAINFLPVDYEIEYVCRGEREVVGPKVRKCLANGSWTDMDTPSRCVNRTPHSERRAVYIGALFPMSGGWPGGQACQPAVEMALEDVNSRRDILPDYELKLIHHDSKCDPGQATKYLYELLYNDPIKIILMPGCSSVSTLVAEAARMWNLIVLSYGSSSPALSNRQRFPTFFRTHPSATLHNPTRVKLFEKWGWKKIATIQQTTEVFTSTLDDLEERVKEAGIEITFRQSFFSDPAVPVKNLKRQDARIIVGLFYETEARKVFCEVYKERLFGKKYVWFLIGWYADNWFKIYDPSINCTVDEMTEAVEGHITTEIVMLNPANTRSISNMTSQEFVEKLTKRLKRHPEETGGFQEAPLAYDAIWALALALNKTSGGGGRSGVRLEDFNYNNQTITDQIYRAMNSSSFEGVSGHVVFDASGSRMAWTLIEQLQGGSYKKIGYYDSTKDDLSWSKTDKWIGGSPPADQTLVIKTFRFLSQKLFISVSVLSSLGIVLAVVCLSFNIYNSHVRYIQNSQPNLNNLTAVGCSLALAAVFPLGLDGYHIGRNQFPFVCQARLWLLGLGFSLGYGSMFTKIWWVHTVFTKKEEKKEWRKTLEPWKLYATVGLLVGMDVLTLAIWQIVDPLHRTIETFAKEEPKEDIDVSILPQLEHCSSRKMNTWLGIFYGYKGLLLLLGIFLAYETKSVSTEKINDHRAVGMAIYNVAVLCLITAPVTMILSSQQDAAFAFASLAIVFSSYITLVVLFVPKMRRLITRGEWQSEAQDTMKTGSSTNNNEEEKSRLLEKENRELEKIIAEKEERVSELRHQLQSRQQLRSRRHPPTPPEPSGGLPRGPPEPPDRLSCDGSRVHLLYK

SEQ ID NO: 335 - DNA, 4294 bp, Homo sapiens
cgctccccgctcccgtggctgccgccgccccggggaagaagagacaggggtggggtttgggggaagcgagagaggaggggagagaccctggccaggctggagcctggattcgaggggaggagggacgggaggaggagaaaggtggaggagaagggaggggggagcggggaggagcggccgggcctggggccttgaggcccggggagagccggggagccgggcccgcgcgccgagatgttgctgctgctgctactggcgccactcttcctccgccccccgggcgcgggcggggcgcagacccccaacgccacctcagaaggttgccagatcatacacccgccctgggaagggggcatcaggtaccggggcctgactcgggaccaggtgaaggctatcaacttcctgccagtggactatgagattgagtatgtgtgccggggggagcgcgaggtggtggggcccaaggtccgcaagtgcctggccaacggctcctggacagatatggacacacccagccgctgtgtccgaatctgctccaagtcttatttgaccctggaaaatgggaaggttttcctgacgggtggggacctcccagctctggacggagcccgggtggatttccggtgtgaccccgacttccatctggtgggcagctcccggagcatctgtagtcagggccagtggagcacccccaagccccactgccaggtgaatcgaacgccacactcagaacggcgcgcagtgtacatcggggcactgtttcccatgagcgggggctggccagggggccaggcctgccagcccgcggtggagatggcgctggaggacgtgaatagccgcagggacatcctgccggactatgagctcaagctcatccaccacgacagcaagtgtgatccaggccaagccaccaagtacctatatgagctgctctacaacgaccctatcaagatcatccttatgcctggctgcagctctgtctccacgctggtggctgaggctgctaggatgtggaacctcattgtgctttcctatggctccagctcaccagccctgtcaaaccggcagcgtttccccactttcttccgaacgcacccatcagccacactccacaaccctacccgcgtgaaactctttgaaaagtggggctggaagaagattgctaccatccagcagaccactgaggtcttcacttcgactctggacgacctggaggaacgagtgaaggaggctggaattgagattactttccgccagagtttcttctcagatccagctgtgcccgtcaaaaacctgaagcgccaggatgcccgaatcatcgtgggacttttctatgagactgaagcccggaaagttttttgtgaggtgtacaaggagcgtctctttgggaagaagtacgtctggttcctcattgggtggtatgctgacaattggttcaagatctacgacccttctatcaactgcacagtggatgagatgactgaggcggtggagggccacatcacaactgagatcgtcatgctgaatcctgccaatacccgcagcatttccaacatgacatcccaggaatttgtggagaaactaaccaagcgactgaaaagacaccctgaggagacaggaggcttccaggaggcaccgctggcctatgatgccatctgggccttggcactggccctgaacaagacatctggaggaggcagccgttccggcgtgcgcctggaggacttcaactacaacaaccagaccattaccgaccaaatctaccgggcaatgaactcctcgtcctttgagggtgtctctggccatgtggtgtttgatgccagcggctctcggatggcatggacgcttatcgagcagcttcagggtggcagctacaagaagattggctactatgacagcaccaaggatgatctttcctggtccaaaacagataaatggattgttatatccagaactcacagcccaacctgacaacctgactgctgtgggctgctcactggctttagctgctgtcttccccctggggctcgatggttaccacattgggaggaaccagtttcctttcgtctgccaggcccgcctctggctcctgggcctgggctttagtctgggctacggttccatgttcaccaagatttggtgggtccacacggtcttcacaaagaaggaagaaaagaaggagtggaggaagactctggaaccctggaagctgtatgccacagtgggcctgctggtgggcatggatgtcctcactctcgccatctggcagatcgtggaccctctgcaccggaccattgagacatttgccaaggaggaacctaaggaagatattgacgtctctattctgccccagctggagcattgcagctccaggaagatgaatacatggcttggcattttctatggttacaaggggctgctgctgctgctgggaatcttccttgcttatgagaccaagagtgtgtccactgagaagatcaatgatcaccgggctgtgggcatggctatctacaatgtggcagtcctgtgcctcatcactgctcctgtcaccatgattctgtccagccagcaggatgcagcctttgcctttgcctctcttgccatagttttctcctcctatatcactcttgttgtgctctttgtgcccaagatgcgcaggctgatcacccgaggggaatggcagtcggaggcgcaggacaccatgaagacagggtcatcgaccaacaacaacgaggaggagaagtcccggctgttggagaaggagaaccgtgaactggaaaagatcattgctgagaaagaggagcgtgtctctgaactgcgccatcaactccagtctcggcagcagctccgctcccggcgccacccaccgacacccccagaaccctctgggggcctgcccaggggaccccctgagccccccgaccggcttagctgtgatgggagtcgagtgcatttgctttataagtgagggtagggtgagggaggacaggccagtagggggagggaaagggagaggggaagggcaggggactcaggaagcagggggtccccatccccagctgggaagaacatgctatccaatctcatctcttgtaaatacatgtccccctgtgagttctgggctgatttgggtctctcatacctctgggaaacagacctttttctctcttactgcttcatgtaattttgtatcacctcttcacaatttagttcgtacctggcttgaagctgctcactgctcacacgctgcctcctcagcagcctcactgcatctttctcttcccatgcaacaccctcttctagttaccacggcaacccctgcagctcctctgcctttgtgctctgttcctgtccagcaggggtctcccaacaagtgctctttccaccccaaaggggcctctccttttctccactgtcataatctctttccatcttacttgcccttctatactttctcacatgtggctccccctgaattttgcttcctttgggagctcattcttttcgccaaggctcacatgctccttgcctctgctctgtgcactcacgctcagcacacatgcatcctcccctctcctgcgtgtgcccactgaacatgctcatgtgtacacacgcttttcccgtatgctttcttcatgttcagtcacatgtgctctcgggtgccctgcattcacagctacgtgtgcccctctcatggtcatgggtctgcccttgagcgtgtttgggtaggcatgtgcaatttgtctagcatgctgagtcatgtctttcctatttgcacacgtccatgtttatccatgtactttccctgtgtaccctccatgtaccttgtgtactttcttcccttaaatcatggtattcttctgacagagccatatgtaccctaccctgcacattgttatgcacttttccccaattcatgtttggtggggccatccacaccctctccttgtcacagaatctccatttctgctcagattccccccatctccattgcattcatgtactaccctcagtctacactcacaatcatcttctcccaagactgctcccttttgttttgtgtttttttgaggggaattaaggaaaaataagtgggggcaggtttggagagctgcttccagtggatagttgatgagaatcctgaccaaaggaaggcacccttgactgttgggatagacagatggacctatggggtgggaggtggtgtccctttcacactgtggtgtctcttggggaaggatctccccgaatctcaataaaccagtgaacagtgtgactcggcaaaaaaaaaaaa

SEQ ID NO: 336 - protein, 578 aa, Homo sapiens
MLLLLLLAPLFLRPPGAGGAQTPNATSEGCQIIHPPWEGGIRYRGLTRDQVKAINFLPVDYEIEYVCRGEREVVGPKVRKCLANGSWTDMDTPSRCVRICSKSYLTLENGKVFLTGGDLPALDGARVDFRCDPDFHLVGSSRSICSQGQWSTPKPHCQVNRTPHSERRAVYIGALFPMSGGWPGGQACQPAVEMALEDVNSRRDILPDYELKLIHHDSKCDPGQATKYLYELLYNDPIKIILMPGCSSVSTLVAEAARMWNLIVLSYGSSSPALSNRQRFPTFFRTHPSATLHNPTRVKLFEKWGWKKIATIQQTTEVFTSTLDDLEERVKEAGIEITFRQSFFSDPAVPVKNLKRQDARIIVGLFYETEARKVFCEVYKERLFGKKYVWFLIGWYADNWFKIYDPSINCTVDEMTEAVEGHITTEIVMLNPANTRSISNMTSQEFVEKLTKRLKRHPEETGGFQEAPLAYDAIWALALALNKTSGGGSRSGVRLEDFNYNNQTITDQIYRAMNSSSFEGVSGHVVFDASGSRMAWTLIEQLQGGSYKKIGYYDSTKDDLSWSKTDKWIVISRTHSPT

SEQ ID NO: 337 - DNA, 2050 bp, Homo sapiens
gtggggctgtttctgcgggcacagctgcagcaattaccggagtggaggcagggcccaggcagcactgccctccaagatcttcccttgggcttttcagcagtaaggggacatgcaccccaagggcctccacttggcctgaccttgctgcgggggctctctgtccccaggaacagtagagatggcaagcttatcaagaccctctctgcccagctgcctctgctccttcctcctcctcctcctcctccaagtgtcttccagctatgcagggcagttcagagtgataggaccaagacaccctatccgggctctggtcggggatgaagtggaattgccatgtcgcatatctcctgggaagaacgctacaggcatggaggtggggtggtaccgcccccccttctctagggtggttcatctctacagaaatggcaaggaccaagatggagaccaggcacctgaatatcggggccggacagagctgctgaaagatgctattggtgagggaaaggtgactctcaggatccggaatgtaaggttctcagatgaaggaggtttcacctgcttcttccgagatcattcttaccaagaggaggcagcaatggaattgaaagtagaagatcctttctactgggtgagccctggagtgctggttctcctcgcggtgctgcctgtgctcctcctgcagatcactgttggcctcatcttcctctgcctgcagtacagactgagaggaaaacttcgagcagagatagagaatctccaccggacttttgagtcctttggtgttctaggaccccaggttaaggaaccaaaaaagacagggcaattccttgaagagctacgaaatcccttctgagtgatgtcacatcttggcaggggtggaggagagcctggttgcccagggatttgtccttggggacatctcatccatcaagttgcacactcactggcatctttgctatggggacattccaatttgcactttcaggaacactctgaattccaagtagaattgatttcccttcttctgtcatctaccttttctcttcattttcccatttttattacccttctttccatttctctctccagtcttccacctggaagccctctctggctaaggacaggcaggtgcccctctctccatcagaggacacctgtactggagagcaacacaggatggtctctgccatgaactggaggccaggaatctcctcactgaaaattacagtatggtaactttgcaaatggtggttgtttcttccaagactccagccctgattgcgcaaaactgaaaggcatgtgaagggaaggaagaggaagagtgcaaaacattgaagagagagctgagtgagctgaagagtgaggatatgagtagccccaacccaaacctggagatggggagaaacctacagaatactagccagagctcctccttgtcttggcagcctactagggacctggggaagcaaaaacgaaagctgggcaacatgcctgctttagaatgttttccttctacttacacatcttccacaggtctcagaatctttccttcctctcatccttttctcctatcttcatatctatcagagtatccactgtttattcaacaactactacttgatggtcagacacaaacaaacaagctaggtgctaattaataaagatacgagttttggccgggtgcggtggctcacgcctgtaatcccagcactttgggaggccgaggcgggcgaatcacgaggtcaggagttcaagaccagcctggccaacatggtgaaaccccatctctactaaaaatacaaacaattaactgagcatagtggtgggcacctataataccagctactccggaggctgaggcaggagaatcgcttgaacccaggaggcagaggttgcagtgagctgagatcgtgccactgcactctagccggagtgacagagtaagactctgtctcaaaaataaataaataaataaataaataaataaataaataaataaataaaaaataataatacaagttttcataagcacacttctaaaaaaaaaaaa

SEQ ID NO: 338 - protein, 224 aa, Homo sapiens
MASLSRPSLPSCLCSFLLLLLLQVSSSYAGQFRVIGPRHPIRALVGDEVELPCRISPGKNATGMEVGWYRPPFSRVVHLYRNGKDQDGDQAPEYRGRTELLKDAIGEGKVTLRIRNVRFSDEGGFTCFFRDHSYQEEAAMELKVEDPFYWVSPGVLVLLAVLPVLLLQITVGLIFLCLQYRLRGKLRAEIENLHRTFESFGVLGPQVKEPKKTGQFLEELRNPF

SEQ ID NO: 339 - DNA, 1731 bp, Homo sapiens
gtggggctgtttctgcgggcacagctgcagcaattaccggagtggaggcagggcccaggcagcactgccctccaagatcttcccttgggcttttcagcagtaaggggacatgcaccccaagggcctccacttggcctgaccttgctgcgggggctctctgtccccaggaacagtagagatggcaagcttatcaagaccctctctgcccagctgcctctgctccttcctcctcctcctcctcctccaagtgtcttccagctatgcagggcagttcagagtgataggaccaagacaccctatccgggctctggtcggggatgaagtggaattgccatgtcgcatatctcctgggaagaacgctacaggcatggaggtggggtggtaccgcccccccttctctagggtggttcatctctacagaaatggcaaggaccaagatggagaccaggcacctgaatatcggggccggacagagctgctgaaagatgctattggtgagggaaaggtgactctcaggatccggaatgtaaggttctcagatgaaggaggtttcacctgcttcttccgagatcattcttaccaagaggaggcagcaatggaattgaaagtagaagatcctttctactgggtgagccctggagtgctggttctcctcgcggtgctgcctgtgctcctcctgcagatcactgttggcctcatcttcctctgcctgcagtacagactgagaggaaaacttcgagcagagatagagaatctccaccggacttttgtcttccacctggaagccctctctggctaaggacaggcaggtgcccctctctccatcagaggacacctgtactggagagcaacacaggatggtctctgccatgaactggaggccaggaatctcctcactgaaaattacagtatggtaactttgcaaatggtggttgtttcttccaagactccagccctgattgcgcaaaactgaaaggcatgtgaagggaaggaagaggaagagtgcaaaacattgaagagagagctgagtgagctgaagagtgaggatatgagtagccccaacccaaacctggagatggggagaaacctacagaatactagccagagctcctccttgtcttggcagcctactagggacctggggaagcaaaaacgaaagctgggcaacatgcctgctttagaatgttttccttctacttacacatcttccacaggtctcagaatctttccttcctctcatccttttctcctatcttcatatctatcagagtatccactgtttattcaacaactactacttgatggtcagacacaaacaaacaagctaggtgctaattaataaagatacgagttttggccgggtgcggtggctcacgcctgtaatcccagcactttgggaggccgaggcgggcgaatcacgaggtcaggagttcaagaccagcctggccaacatggtgaaaccccatctctactaaaaatacaaacaattaactgagcatagtggtgggcacctataataccagctactccggaggctgaggcaggagaatcgcttgaacccaggaggcagaggttgcagtgagctgagatcgtgccactgcactctagccggagtgacagagtaagactctgtctcaaaaataaataaataaataaataaataaataaataaataaataaataaaaaataataatacaagttttcataagcacacttctaaaaaaaaaaaa

SEQ ID NO: 340 - protein, 206 aa, Homo sapiens
MASLSRPSLPSCLCSFLLLLLLQVSSSYAGQFRVIGPRHPIRALVGDEVELPCRISPGKNATGMEVGWYRPPFSRVVHLYRNGKDQDGDQAPEYRGRTELLKDAIGEGKVTLRIRNVRFSDEGGFTCFFRDHSYQEEAAMELKVEDPFYWVSPGVLVLLAVLPVLLLQITVGLIFLCLQYRLRGKLRAEIENLHRTFVFHLEALSG

SEQ ID NO: 341 - DNA, 1869 bp, Homo sapiens
gtggggctgtttctgcgggcacagctgcagcaattaccggagtggaggcagggcccaggcagcactgccctccaagatcttcccttgggcttttcagcagtaaggggacatgcaccccaagggcctccacttggcctgaccttgctgcgggggctctctgtccccaggaacagtagagatggcaagcttatcaagaccctctctgcccagctgcctctgctccttcctcctcctcctcctcctccaagtgtcttccagctatgcagggcagttcagagtgataggaccaagacaccctatccgggctctggtcggggatgaagtggaattgccatgtcgcatatctcctgggaagaacgctacaggcatggaggtggggtggtaccgcccccccttctctagggtggttcatctctacagaaatggcaaggaccaagatggagaccaggcacctgaatatcggggccggacagagctgctgaaagatgctattggtgagggaaaggtgactctcaggatccggaatgtaaggttctcagatgaaggaggtttcacctgcttcttccgagatcattcttaccaagaggaggcagcaatggaattgaaagtagaagatcctttctactgggtgagccctggagtgctggttctcctcgcggtgctgcctgtgctcctcctgcagatcactgttggcctcatcttcctctgcctgcagtacagactgagaggaaaacttcgagcagagatagagaatctccaccggacttttgatccccactttctgagggtgccctgctggaagataaccctgtttgtaattgtgccggttcttggacccttggttgccttgatcatctgctacaactggctacatcgaagactagcagggcaattccttgaagagctactcttccacctggaagccctctctggctaaggacaggcaggtgcccctctctccatcagaggacacctgtactggagagcaacacaggatggtctctgccatgaactggaggccaggaatctcctcactgaaaattacagtatggtaactttgcaaatggtggttgtttcttccaagactccagccctgattgcgcaaaactgaaaggcatgtgaagggaaggaagaggaagagtgcaaaacattgaagagagagctgagtgagctgaagagtgaggatatgagtagccccaacccaaacctggagatggggagaaacctacagaatactagccagagctcctccttgtcttggcagcctactagggacctggggaagcaaaaacgaaagctgggcaacatgcctgctttagaatgttttccttctacttacacatcttccacaggtctcagaatctttccttcctctcatccttttctcctatcttcatatctatcagagtatccactgtttattcaacaactactacttgatggtcagacacaaacaaacaagctaggtgctaattaataaagatacgagttttggccgggtgcggtggctcacgcctgtaatcccagcactttgggaggccgaggcgggcgaatcacgaggtcaggagttcaagaccagcctggccaacatggtgaaaccccatctctactaaaaatacaaacaattaactgagcatagtggtgggcacctataataccagctactccggaggctgaggcaggagaatcgcttgaacccaggaggcagaggttgcagtgagctgagatcgtgccactgcactctagccggagtgacagagtaagactctgtctcaaaaataaataaataaataaataaataaataaataaataaataaataaaaaataataatacaagttttcataagcacacttctaaaaaaaaaaaa

SEQ ID NO: 342 - protein, 252 aa, Homo sapiens
MASLSRPSLPSCLCSFLLLLLLQVSSSYAGQFRVIGPRHPIRALVGDEVELPCRISPGKNATGMEVGWYRPPFSRVVHLYRNGKDQDGDQAPEYRGRTELLKDAIGEGKVTLRIRNVRFSDEGGFTCFFRDHSYQEEAAMELKVEDPFYWVSPGVLVLLAVLPVLLLQITVGLIFLCLQYRLRGKLRAEIENLHRTFDPHFLRVPCWKITLFVIVPVLGPLVALIICYNWLHRRLAGQFLEELLFHLEALSG

SEQ ID NO: 343 - DNA, 2119 bp, Homo sapiens
gtggggctgtttctgcgggcacagctgcagcaattaccggagtggaggcagggcccaggcagcactgccctccaagatcttcccttgggcttttcagcagtaaggggacatgcaccccaagggcctccacttggcctgaccttgctgcgggggctctctgtccccaggaacagtagagatggcaagcttatcaagaccctctctgcccagctgcctctgctccttcctcctcctcctcctcctccaagtgtcttccagctatgcagggcagttcagagtgataggaccaagacaccctatccgggctctggtcggggatgaagtggaattgccatgtcgcatatctcctgggaagaacgctacaggcatggaggtggggtggtaccgcccccccttctctagggtggttcatctctacagaaatggcaaggaccaagatggagaccaggcacctgaatatcggggccggacagagctgctgaaagatgctattggtgagggaaaggtgactctcaggatccggaatgtaaggttctcagatgaaggaggtttcacctgcttcttccgagatcattcttaccaagaggaggcagcaatggaattgaaagtagaagatcctttctactgggtgagccctggagtgctggttctcctcgcggtgctgcctgtgctcctcctgcagatcactgttggcctcatcttcctctgcctgcagtacagactgagaggaaaacttcgagcagagatagagaatctccaccggacttttgatccccactttctgagggtgccctgctggaagataaccctgtttgtaattgtgccggttcttggacccttggttgccttgatcatctgctacaactggctacatcgaagactagcagggcaattccttgaagagctacgaaatcccttctgagtgatgtcacatcttggcaggggtggaggagagcctggttgcccagggatttgtccttggggacatctcatccatcaagttgcacactcactggcatctttgctatggggacattccaatttgcactttcaggaacactctgaattccaagtagaattgatttcccttcttctgtcatctaccttttctcttcattttcccatttttattacccttctttccatttctctctccagtcttccacctggaagccctctctggctaaggacaggcaggtgcccctctctccatcagaggacacctgtactggagagcaacacaggatggtctctgccatgaactggaggccaggaatctcctcactgaaaattacagtatggtaactttgcaaatggtggttgtttcttccaagactccagccctgattgcgcaaaactgaaaggcatgtgaagggaaggaagaggaagagtgcaaaacattgaagagagagctgagtgagctgaagagtgaggatatgagtagccccaacccaaacctggagatggggagaaacctacagaatactagccagagctcctccttgtcttggcagcctactagggacctggggaagcaaaaacgaaagctgggcaacatgcctgctttagaatgttttccttctacttacacatcttccacaggtctcagaatctttccttcctctcatccttttctcctatcttcatatctatcagagtatccactgtttattcaacaactactacttgatggtcagacacaaacaaacaagctaggtgctaattaataaagatacgagttttggccgggtgcggtggctcacgcctgtaatcccagcactttgggaggccgaggcgggcgaatcacgaggtcaggagttcaagaccagcctggccaacatggtgaaaccccatctctactaaaaatacaaacaattaactgagcatagtggtgggcacctataataccagctactccggaggctgaggcaggagaatcgcttgaacccaggaggcagaggttgcagtgagctgagatcgtgccactgcactctagccggagtgacagagtaagactctgtctcaaaaataaataaataaataaataaataaataaataaataaataaataaaaaataataatacaagttttcataagcacacttctaaaaaaaaaaaa

SEQ ID NO: 344 - protein, 247 aa, Homo sapiens
MASLSRPSLPSCLCSFLLLLLLQVSSSYAGQFRVIGPRHPIRALVGDEVELPCRISPGKNATGMEVGWYRPPFSRVVHLYRNGKDQDGDQAPEYRGRTELLKDAIGEGKVTLRIRNVRFSDEGGFTCFFRDHSYQEEAAMELKVEDPFYWVSPGVLVLLAVLPVLLLQITVGLIFLCLQYRLRGKLRAEIENLHRTFDPHFLRVPCWKITLFVIVPVLGPLVALIICYNWLHRRLAGQFLEELRNPF

SEQ ID NO: 345 - DNA, 1752 bp, Homo sapiens
gtggggctgtttctgcgggcacagctgcagcaattaccggagtggaggcagggcccaggcagcactgccctccaagatcttcccttgggcttttcagcagtaaggggacatgcaccccaagggcctccacttggcctgaccttgctgcgggggctctctgtccccaggaacagtagagatggcaagcttatcaagaccctctctgcccagctgcctctgctccttcctcctcctcctcctcctccaagtgtcttccagctatgcagggcagttcagagtgataggaccaagacaccctatccgggctctggtcggggatgaagtggaattgccatgtcgcatatctcctgggaagaacgctacaggcatggaggtggggtggtaccgcccccccttctctagggtggttcatctctacagaaatggcaaggaccaagatggagaccaggcacctgaatatcggggccggacagagctgctgaaagatgctattggtgagggaaaggtgactctcaggatccggaatgtaaggttctcagatgaaggaggtttcacctgcttcttccgagatcattcttaccaagaggaggcagcaatggaattgaaagtagaagatcctttctactgggtgagccctggagtgctggttctcctcgcggtgctgcctgtgctcctcctgcagatcactgttggcctcatcttcctctgcctgcagtacagactgagaggaaaacttcgagcagagatagagaatctccaccggacttttgggcaattccttgaagagctactcttccacctggaagccctctctggctaaggacaggcaggtgcccctctctccatcagaggacacctgtactggagagcaacacaggatggtctctgccatgaactggaggccaggaatctcctcactgaaaattacagtatggtaactttgcaaatggtggttgtttcttccaagactccagccctgattgcgcaaaactgaaaggcatgtgaagggaaggaagaggaagagtgcaaaacattgaagagagagctgagtgagctgaagagtgaggatatgagtagccccaacccaaacctggagatggggagaaacctacagaatactagccagagctcctccttgtcttggcagcctactagggacctggggaagcaaaaacgaaagctgggcaacatgcctgctttagaatgttttccttctacttacacatcttccacaggtctcagaatctttccttcctctcatccttttctcctatcttcatatctatcagagtatccactgtttattcaacaactactacttgatggtcagacacaaacaaacaagctaggtgctaattaataaagatacgagttttggccgggtgcggtggctcacgcctgtaatcccagcactttgggaggccgaggcgggcgaatcacgaggtcaggagttcaagaccagcctggccaacatggtgaaaccccatctctactaaaaatacaaacaattaactgagcatagtggtgggcacctataataccagctactccggaggctgaggcaggagaatcgcttgaacccaggaggcagaggttgcagtgagctgagatcgtgccactgcactctagccggagtgacagagtaagactctgtctcaaaaataaataaataaataaataaataaataaataaataaataaataaaaaataataatacaagttttcataagcacacttctaaaaaaaaaaaa

SEQ ID NO: 346 - protein, 213 aa, Homo sapiens
MASLSRPSLPSCLCSFLLLLLLQVSSSYAGQFRVIGPRHPIRALVGDEVELPCRISPGKNATGMEVGWYRPPFSRVVHLYRNGKDQDGDQAPEYRGRTELLKDAIGEGKVTLRIRNVRFSDEGGFTCFFRDHSYQEEAAMELKVEDPFYWVSPGVLVLLAVLPVLLLQITVGLIFLCLQYRLRGKLRAEIENLHRTFGQFLEELLFHLEALSG

SEQ ID NO: 347 - DNA, 1800 bp, Homo sapiens
gtggggctgtttctgcgggcacagctgcagcaattaccggagtggaggcagggcccaggcagcactgccctccaagatcttcccttgggcttttcagcagtaaggggacatgcaccccaagggcctccacttggcctgaccttgctgcgggggctctctgtccccaggaacagtagagatggcaagcttatcaagaccctctctgcccagctgcctctgctccttcctcctcctcctcctcctccaagtgtcttccagctatgcagggcagttcagagtgataggaccaagacaccctatccgggctctggtcggggatgaagtggaattgccatgtcgcatatctcctgggaagaacgctacaggcatggaggtggggtggtaccgcccccccttctctagggtggttcatctctacagaaatggcaaggaccaagatggagaccaggcacctgaatatcggggccggacagagctgctgaaagatgctattggtgagggaaaggtgactctcaggatccggaatgtaaggttctcagatgaaggaggtttcacctgcttcttccgagatcattcttaccaagaggaggcagcaatggaattgaaagtagaagatcctttctactgggtgagccctggagtgctggttctcctcgcggtgctgcctgtgctcctcctgcagatcactgttggcctcatcttcctctgcctgcagtacagactgagaggaaaacttcgagcagagatagagaatctccaccggacttttgagtcctttggtgttctaggaccccaggttaaggaaccaaaaaagacagggcaattccttgaagagctactcttccacctggaagccctctctggctaaggacaggcaggtgcccctctctccatcagaggacacctgtactggagagcaacacaggatggtctctgccatgaactggaggccaggaatctcctcactgaaaattacagtatggtaactttgcaaatggtggttgtttcttccaagactccagccctgattgcgcaaaactgaaaggcatgtgaagggaaggaagaggaagagtgcaaaacattgaagagagagctgagtgagctgaagagtgaggatatgagtagccccaacccaaacctggagatggggagaaacctacagaatactagccagagctcctccttgtcttggcagcctactagggacctggggaagcaaaaacgaaagctgggcaacatgcctgctttagaatgttttccttctacttacacatcttccacaggtctcagaatctttccttcctctcatccttttctcctatcttcatatctatcagagtatccactgtttattcaacaactactacttgatggtcagacacaaacaaacaagctaggtgctaattaataaagatacgagttttggccgggtgcggtggctcacgcctgtaatcccagcactttgggaggccgaggcgggcgaatcacgaggtcaggagttcaagaccagcctggccaacatggtgaaaccccatctctactaaaaatacaaacaattaactgagcatagtggtgggcacctataataccagctactccggaggctgaggcaggagaatcgcttgaacccaggaggcagaggttgcagtgagctgagatcgtgccactgcactctagccggagtgacagagtaagactctgtctcaaaaataaataaataaataaataaataaataaataaataaataaataaaaaataataatacaagttttcataagcacacttctaaaaaaaaaaaa

SEQ ID NO: 348 - protein, 229 aa, Homo sapiens
MASLSRPSLPSCLCSFLLLLLLQVSSSYAGQFRVIGPRHPIRALVGDEVELPCRISPGKNATGMEVGWYRPPFSRVVHLYRNGKDQDGDQAPEYRGRTELLKDAIGEGKVTLRIRNVRFSDEGGFTCFFRDHSYQEEAAMELKVEDPFYWVSPGVLVLLAVLPVLLLQITVGLIFLCLQYRLRGKLRAEIENLHRTFESFGVLGPQVKEPKKTGQFLEELLFHLEALSG

SEQ ID NO: 349 - DNA, 2002 bp, Homo sapiens
gtggggctgtttctgcgggcacagctgcagcaattaccggagtggaggcagggcccaggcagcactgccctccaagatcttcccttgggcttttcagcagtaaggggacatgcaccccaagggcctccacttggcctgaccttgctgcgggggctctctgtccccaggaacagtagagatggcaagcttatcaagaccctctctgcccagctgcctctgctccttcctcctcctcctcctcctccaagtgtcttccagctatgcagggcagttcagagtgataggaccaagacaccctatccgggctctggtcggggatgaagtggaattgccatgtcgcatatctcctgggaagaacgctacaggcatggaggtggggtggtaccgcccccccttctctagggtggttcatctctacagaaatggcaaggaccaagatggagaccaggcacctgaatatcggggccggacagagctgctgaaagatgctattggtgagggaaaggtgactctcaggatccggaatgtaaggttctcagatgaaggaggtttcacctgcttcttccgagatcattcttaccaagaggaggcagcaatggaattgaaagtagaagatcctttctactgggtgagccctggagtgctggttctcctcgcggtgctgcctgtgctcctcctgcagatcactgttggcctcatcttcctctgcctgcagtacagactgagaggaaaacttcgagcagagatagagaatctccaccggacttttgggcaattccttgaagagctacgaaatcccttctgagtgatgtcacatcttggcaggggtggaggagagcctggttgcccagggatttgtccttggggacatctcatccatcaagttgcacactcactggcatctttgctatggggacattccaatttgcactttcaggaacactctgaattccaagtagaattgatttcccttcttctgtcatctaccttttctcttcattttcccatttttattacccttctttccatttctctctccagtcttccacctggaagccctctctggctaaggacaggcaggtgcccctctctccatcagaggacacctgtactggagagcaacacaggatggtctctgccatgaactggaggccaggaatctcctcactgaaaattacagtatggtaactttgcaaatggtggttgtttcttccaagactccagccctgattgcgcaaaactgaaaggcatgtgaagggaaggaagaggaagagtgcaaaacattgaagagagagctgagtgagctgaagagtgaggatatgagtagccccaacccaaacctggagatggggagaaacctacagaatactagccagagctcctccttgtcttggcagcctactagggacctggggaagcaaaaacgaaagctgggcaacatgcctgctttagaatgttttccttctacttacacatcttccacaggtctcagaatctttccttcctctcatccttttctcctatcttcatatctatcagagtatccactgtttattcaacaactactacttgatggtcagacacaaacaaacaagctaggtgctaattaataaagatacgagttttggccgggtgcggtggctcacgcctgtaatcccagcactttgggaggccgaggcgggcgaatcacgaggtcaggagttcaagaccagcctggccaacatggtgaaaccccatctctactaaaaatacaaacaattaactgagcatagtggtgggcacctataataccagctactccggaggctgaggcaggagaatcgcttgaacccaggaggcagaggttgcagtgagctgagatcgtgccactgcactctagccggagtgacagagtaagactctgtctcaaaaataaataaataaataaataaataaataaataaataaataaataaaaaataataatacaagttttcataagcacacttctaaaaaaaaaaaa

SEQ ID NO: 350 - protein, 208 aa, Homo sapiens
MASLSRPSLPSCLCSFLLLLLLQVSSSYAGQFRVIGPRHPIRALVGDEVELPCRISPGKNATGMEVGWYRPPFSRVVHLYRNGKDQDGDQAPEYRGRTELLKDAIGEGKVTLRIRNVRFSDEGGFTCFFRDHSYQEEAAMELKVEDPFYWVSPGVLVLLAVLPVLLLQITVGLIFLCLQYRLRGKLRAEIENLHRTFGQFLEELRNPF

SEQ ID NO: 351 - DNA, 2959 bp, Homo sapiens
actacattgcccagtaacctcctgggctccgctgtgtttttctattctggggtgtaaggggcagctggaccactccagctgggactgctaggaaggttgcgggtccacccggccgagccgaacgagggaaatggtcctcacccggccactcgccggttgaaaaggggccgccctggcagggaagcggccgccgcggcgcggtgcagcgcagcggcgagaaggagtgcgttatcgtcttgcgctactgctgaatgtccgtcccggaggaggaggagaggcttttgccgctgacccagagatggccccgagcgagcaaattcctactgtccggctgcgcggctaccgtggccgagctagcaacctttcccctggatctcacaaaaactcgactccaaatgcaaggagaagcagctcttgctcggttgggagacggtgcaagagaatctgccccctataggggaatggtgcgcacagccctagggatcattgaagaggaaggctttctaaagctttggcaaggagtgacacccgccatttacagacacgtagtgtattctggaggtcgaatggtcacatatgaacatctccgagaggttgtgtttggcaaaagtgaagatgagcattatcccctttggaaatcagtcattggagggatgatggctggtgttattggccagtttttagccaatccaactgacctagtgaaggttcagatgcaaatggaaggaaaaaggaaactggaaggaaaaccattgcgatttcgtggtgtacatcatgcatttgcaaaaatcttagctgaaggaggaatacgagggctttgggcaggctgggtacccaatatacaaagagcagcactggtgaatatgggagatttaaccacttatgatacagtgaaacactacttggtattgaatacaccacttgaggacaatatcatgactcacggtttatcaagtttatgttctggactggtagcttctattctgggaacaccagccgatgtcatcaaaagcagaataatgaatcaaccacgagataaacaaggaaggggacttttgtataaatcatcgactgactgcttgattcaggctgttcaaggtgaaggattcatgagtctatataaaggctttttaccatcttggctgagaatgaccccttggtcaatggtgttctggcttacttatgaaaaaatcagagagatgagtggagtcagtccattttaaacccctaaagatgcaacccttaaagatacagtgttcagtattattgaaatatgggcatctgcaacacataccccctattatttctacctctttaggaagacacctattccacagagactgatttatagggggcagcactttatttttttctggaaacccaagttctctttgactcctctttttgtccaaaagtgatctggtcggatctcacaaggccatccaatgagaccccgcacagcattttctaaagaagaatcgaagcctgaccactttcaccttgggcaagaaggtttggcctttgagttgctattctatgctgaagagcctgcttagaggaggagtaccaggagggagccagcatttcagatctgaagtagacgataggaatgtggaagaacacatacatagtgcttaagaaatacatttaacctgttatgtcagtatttatcaatgaagtttgataattcacttttctgtcattgttaaagcgtacatactgtaaattaaagggaggtgaatggaaattaatgaataaacattttgagtttccctagtgttgaaggaaggtgtactttttcttgtcagaaagataaaaaaaatcaagttgagatgatgtttgaatttcaagaaaagaggctgctttctgtcagtgccctctcattagatctgtgttaattagttagcactccactgcacatgctaatgacttcctctgacagccacacaccgaatcttgatgaaaaaagagaagagcatttgccttgttacatagtctgttacaagccagatatgttgctagctctcaagagttgtaatatattaagaactacaacttatttgattaaaactcagctgtatagatccttttataaagcaccttttgttaaacatcagcctttcattggtattttaaaagcaaggcagatagatatgaagtcagccaactctgacatgcgtcctttcttatctcccttacctgacactaggggctctagagaggcagagagagcactcacaaatcacactaaaactgccagcggcctgactcttactcagtttagcaaaaattcttgcctaaaaagtgataagtaaaaatctgtttatggtatacagttatgtctcgaatctttgaatcaaatccatgttcttattttagaaaggtaagagttcttcaaattcagctacataccaccggctctcccaacctcagacggtgggcatttctggatggatggctgcggttatggataaaggctgtaactgttaacacagaaaaacatgaaaagctcaggcccaagaaaggccttggagccagccaaacagaatttgttctaatggacatggatgatgttgaacagaaaaaagtttacaagtgctttgtggttgcactaatgtatactcactgccattttaagagggggaagtacattttaaaatatatttgaatgtcatgtactgatatgcagtagcttattgtttttctagttgcagagaatgtgaagtttaatctcttaaaatatttagatggtctactttttcattgaatttgtcaatatgtaattgcgttgtaaaatattatatatatatatatatatatatatatatatatatgcttaacttcccaagtgttctgcattgaaccacttagggaaaattttgtttgtttttatgttttgtaatttttaaaattaagtaaagactggatcaaaataattgcatccaacctggaccgtgaa

SEQ ID NO: 352 - protein, 323 aa, Homo sapiens
MSVPEEEERLLPLTQRWPRASKFLLSGCAATVAELATFPLDLTKTRLQMQGEAALARLGDGARESAPYRGMVRTALGIIEEEGFLKLWQGVTPAIYRHVVYSGGRMVTYEHLREVVFGKSEDEHYPLWKSVIGGMMAGVIGQFLANPTDLVKVQMQMEGKRKLEGKPLRFRGVHHAFAKILAEGGIRGLWAGWVPNIQRAALVNMGDLTTYDTVKHYLVLNTPLEDNIMTHGLSSLCSGLVASILGTPADVIKSRIMNQPRDKQGRGLLYKSSTDCLIQAVQGEGFMSLYKGFLPSWLRMTPWSMVFWLTYEKIREMSGVSPF

SEQ ID NO: 353 - DNA, 6817 bp, Homo sapiens
atgtgctcgacgcccggaatgccggcgccgggggcctcgctggccctgcgggtgtccttcgtggacgtgcatcccgatgtgatcccggtgcagctgtgggggctggtgggcgagcggcggggcgagtacctgcggctgagccgggaaatccaggaagcggcggccacgcgcggccagtgggcgctgggcagcgcctcggcctcgcccggcgagctgtgcctggtgcaggtcgggcttttgtggcaccgctgccgcgtggtcagccggcaggcacaggagagccgtgtcttcctgctggacgagggccgcaccatcacggccggagcaggctcgctggcgcctgggcgcagagagttcttcaatttgccctcggaagtgctgggctgcgtgctagcgggcctggtgccggcaggctgcggcgcgggctcaggcgagccgccgcagcactggcccgccgacgccgtggacttccttagcaaccttcagggcaaggaggtgcacgggtgcgtcctggacgtgctgctgctccatcgcctggtcctcctggaggtgcctgatgtgttccaacagatgcgggagctgggcctggctcggcgggtgcccgacagcctcttccgttcgctgctggagcgctatctcacagcggccactgctagcgtgggctccggggtcccggttctctcgcgagtcccgctcaagcaaaagcagcctggtctggattacttctatccccagctgcagctgggcgtgacggaggccgtggtcataacccaagtgtgccatccccaccgcattcactgccagctccgcagcgtctcgcaggagatccaccgcctctccgagagcatggcccaggtataccggggttccacggggacaggggatgagaactctaccagtgccacctgggaggagagggaggagagcccagataagccgggctctccgtgtgcatcctgtggcctggatggacattggtacagagcactgttgcttgagacttttcggccccagcgctgtgcccaggtgcttcatgtggactatggaaggaaggagttagtgagttgcagcagccttcggtacttgctgcctgaatattttcgaatgccggtggtgacctacccttgtgctttgtatggactctgggacggtgggagaggctggtctcggtcacaggtcggtgacctgaagacactgatactaggcaaggcagtgaatgcaaagattgaattttattgctcctttgagcatgtgtattatgtcagcctgtatggagaagatgggattaatctgaaccgtgtgtttggagtacagtcgtgttgcttggctgaccgagtccttcagagccaggcaacagaggaggaggaaccagaaacatctcagtctcagtctcctgctgaagaagtagatgaagagatttcactcccagccttaagatctatcaggttaaagatgaatgccttctacgatgcgcaggtagagtttgttaaaaatccttctgagttttggattaggttgaggaaacacaatgtcaccttcagtaagctgatgaggagaatgtgtggtttctattcctctgccagtaagctggatggtgtagttttgaaacctgaacctgatgacctttgctgtgtcaagtggaaagaaaatggttattatagggccatagtcaccaaattggatgacaagagtgtggatgtattcttagttgaccgaggcaattcggaaaatgtggactggtatgacgtaaggatgctgcttcctcagtttaggcagctaccaatattggctgtgaagtgcaccctggctgatatttggcctttgggaaaaacttggagccaggaggcagtttccttttttaaaaagactgtgctccacaaagaattagtcatccatattcttgataaacaggatcatcaatatgttattgagattcttgacgaatcaagaacaggggaagaaaacattagtaaggtaattgcccaagctggatatgccaagtatcaggaatttgaaacaaaggaaaatatcctggtaaatgcccactccccagggcatgtttcaaaccactttactacggagagtaacaaaataccttttgccaagactggagaaggagagcagaaagccaagagagagaataaaaccacatctgtttcaaaagctttgagtgacacaacagttgtaacaaatggttcaactgaactagttgtgcaggaaaaagtgaaaagagcatctgtttattttcctcttatgcagaattgcttggaaattaagccaggctcctctagtaaaggagagctggaagttggaagtacagtagaagtcagagtgtcttatgttgaaaaccctggctatttctggtgtcagctgaccaggaacatacaaggacttaaaactctaatgtctgatattcagtactattgcaaaaatacagctgctcctcaccagagaaacacccttgcttgtttggctaagcgaacagtaaacagacagtggtccagagcacttattagtgggatacagtctgtggagcatgtcaatgtaacatttgtagattatggagacagagaaatggtatctgtgaagaatatttattcaattagtgaagaatttctgaaggttaaggcacaggcttttaggtgcagtctttataatttaattcaaccagttggccagaatccctttgtttgggatgtaaaggcaatacaagctttcaatgaatttatagataatgcatggcaaaaaaatctagaattaaaatgtacaatatttgctctggcttcaattaatgaagaactgtttaacattgtggatttgctaaccccctttcagagtgcatgccatttcttggtagaaaagagacttgcaagaccagtaaaacttcagaagcctttggagtcctctgttcagctacattcctacttctattctacacatgatatgaaaattggaagtgaagaattagtttatataacgcatattgatgacccttggacattttattgccagctggcaagaaatgcaaatattttagaacagttgtcatgtagtattacacaattaagtaaagttttgctgaatttaaaaacatctcccttgaaccctggaaccttgtgccttgccaagtatactgatggaaactggtataggggcatagtaatagagaaagagccaaagaaagtcttctttgttgattttgggaatatttatgtagtaacaagtgatgatctgcttccaatacctagtgatgcatatgatgtcttacttttgcccatgcaagctgtcagatgttcattatctgatattcctgatcatataccagaagaagtggtggtgtggtttcaggagactattttagataagtcattgaaggctttagttgtagcaaaagatccagatggaacactgattatagaactatatggtgacaatattcaaattagtgctagtattaataagaagttggggctacttagttacaaagatagaataagaaaaaaagaaagtgaagtcctctgttctacaactgaaactcttgaagaaaaaaatgagaatatgaagttgccatgtacagagtatttaagtaaatcagtagggtacaagttacctaataaagaaattttggaagagtcatataaacctcagatcaactcatcatacaaggaactcaaacttttacaaagtttaacaaaaacaaacttagtcactcaatatcaagactctgtgggaaataaaaatagtcaagtgtttccattaacaacagaaaagaaagaagaaatttctgctgagacacccttgaaaacagcaagagtagaagctactctttcagagagaaaaataggagattcatgtgacaaagatttgcctctgaaattttgtgagttcccacagaagactataatgcctggatttaaaacaactgtatatgtttctcatataaatgacctttcagacttttatgttcaactaatagaagatgaagctgaaattagtcatctttcagagagattaaacagtgttaaaacaaggcccgaatattatgtaggtccacctttgcaaagaggagatatgatatgtgctgttttcccagaagataatttatggtatcgtgctgtgatcaaggagcaacaacccaatgaccttctctctgtgcagtttatagattatggcaatgtttctgtggttcatactaacaaaataggtaggcttgaccttgttaatgcaatattgccggggttgtgcattcattgctccttgcagggatttgaggttcctgacaataaaaattctaagaaaatgatgcattacttttcccaacggaccagcgaggctgcaataagatgtgaatttgttaaatttcaagacagatgggaagttattcttgctgatgaacatgggatcatagcagatgatatgattagcaggtatgctctcagtgaaaaatctcaagtagaactttctacccaagtaattaaaagtgccagttcaaagtctgttaacaaatcagacattgacacttcagtatttcttaactggtataatccagaaaaaaaaatgataagagcttatgccactgtgatagatggacctgagtacttttggtgtcagtttgctgatacggagaaacttcagtgtttagaagtagaagtacagactgctggagaacaggtagcagacaggagaaattgtatcccatgtccttatattggagatccttgtatagtaagatacagagaagatggacattattatagggcacttatcactaatatttgtgaagattatcttgtatctgtcaggcttgtggactttggaaacattgaagactgtgtggacccaaaagcactctgggccattccttctgaacttctgtcggttcccatgcaagcctttccatgttgcctctcagggtttaacatttcagaaggattatgttctcaagagggaaatgactatttctatgaaataataacagaagatgtgttggaaataacaatactagaaatcagaagggatgtttgtgatatccctttagcaattgttgacttgaaaagcaaaggtaaaagtattaatgagaaaatggagaaatattctaagactggtattaaaagtgctcttccctatgaaaatattgactcagagataaagcagactcttgggtcctacaatcttgatgtaggacttaagaaattaagtaataaagctgtacaaaataaaatatatatggaacaacagacagatgagcttgctgaaataactgaaaaagatgtaaacattattggaaccaaaccaagtaacttccgtgaccctaaaactgataacatttgtgaagggtttgaaaacccctgcaaagataaaattgatactgaggaactggaaggtgaattagagtgccatctggttgacaaagcagagtttgatgataaatacctgattacaggatttaacacattactaccacatgctaatgaaacaaaggagatactagaactgaattcacttgaggtgccgctttctcctgatgatgaatcaaaagaattcttagaactggaatctattgagttacagaattctctggtggtggatgaagaaaaaggggagctaagcccggtgccaccgaatgtgccactctcccaagagtgtgtcacaaaaggcgccatggagctatttacactgcagcttcctctcagctgtgaagctgagaaacagccagaactagaactacctacagcccagctgcctttagatgacaagatggatcctttgtctttaggagttagtcagaaagcacaggaatccatgtgtactgaggacatgagaaagtcaagttgtgtagaatcttttgatgaccagcgcaggatgtcattgcatctacatggagcagattgtgatcctaaaacacagaatgaaatgaatatatgtgaagaagaatttgtagagtataaaaacagggatgccatttcggcattgatgcctttgttctctgaggaagaaagcagtgatggaagcaagcacaataatggtttaccagatcatatctcagctcaactacagaacacctacactctgaaagcctttactgttggatctaaatgtgttgtgtggtcaagtctaagaaacacatggtctaaatgtgagattttagaaacagctgaagaaggaacaagggttttgaacctttcaaatggtatggaggagatagtgaaccctgagaatgtctggaatggcatacccaaattggataagagtccacctgagaaaaggggtttggaggtgatggagatttaaccgtggatctatagctgtggccaatcagtcagaagctgcccttgaacaagtggcatcttacgcagaccaacagagtatttgagaaaattgaaaacatgtaaccacaagaagttgtcattttcaaaaacttctatataggtggaaaacaaattaggtctcaggttgatggtggggtgtgtttatagtgatcctgttatatatacagatctgggatctttcgtctttattgtcttacgtttctaattagttgggaggatttattttgctaaacagtttactaacacattacatttcaaaaactattttggtacctttcaaatacagtgtttaaattaaaatagaaaaataagggctcatgacaagtacattatttgattctacttaggatagctttttagcaggatctccttcagaatttttgtcttgactttgaatctttgcctgtttgtctaaacatttgactaacattctgtttgaatttggaagtattctaatacaagatttgaataaagtttatccttaaata

SEQ ID NO: 354 - protein, 2096 aa, Homo sapiens
MCSTPGMPAPGASLALRVSFVDVHPDVIPVQLWGLVGERRGEYLRLSREIQEAAATRGQWALGSASASPGELCLVQVGLLWHRCRVVSRQAQESRVFLLDEGRTITAGAGSLAPGRREFFNLPSEVLGCVLAGLVPAGCGAGSGEPPQHWPADAVDFLSNLQGKEVHGCVLDVLLLHRLVLLEVPDVFQQMRELGLARRVPDSLFRSLLERYLTAATASVGSGVPVLSRVPLKQKQPGLDYFYPQLQLGVTEAVVITQVCHPHRIHCQLRSVSQEIHRLSESMAQVYRGSTGTGDENSTSATWEEREESPDKPGSPCASCGLDGHWYRALLLETFRPQRCAQVLHVDYGRKELVSCSSLRYLLPEYFRMPVVTYPCALYGLWDGGRGWSRSQVGDLKTLILGKAVNAKIEFYCSFEHVYYVSLYGEDGINLNRVFGVQSCCLADRVLQSQATEEEEPETSQSQSPAEEVDEEISLPALRSIRLKMNAFYDAQVEFVKNPSEFWIRLRKHNVTFSKLMRRMCGFYSSASKLDGVVLKPEPDDLCCVKWKENGYYRAIVTKLDDKSVDVFLVDRGNSENVDWYDVRMLLPQFRQLPILAVKCTLADIWPLGKTWSQEAVSFFKKTVLHKELVIHILDKQDHQYVIEILDESRTGEENISKVIAQAGYAKYQEFETKENILVNAHSPGHVSNHFTTESNKIPFAKTGEGEQKAKRENKTTSVSKALSDTTVVTNGSTELVVQEKVKRASVYFPLMQNCLEIKPGSSSKGELEVGSTVEVRVSYVENPGYFWCQLTRNIQGLKTLMSDIQYYCKNTAAPHQRNTLACLAKRTVNRQWSRALISGIQSVEHVNVTFVDYGDREMVSVKNIYSISEEFLKVKAQAFRCSLYNLIQPVGQNPFVWDVKAIQAFNEFIDNAWQKNLELKCTIFALASINEELFNIVDLLTPFQSACHFLVEKRLARPVKLQKPLESSVQLHSYFYSTHDMKIGSEELVYITHIDDPWTFYCQLARNANILEQLSCSITQLSKVLLNLKTSPLNPGTLCLAKYTDGNWYRGIVIEKEPKKVFFVDFGNIYVVTSDDLLPIPSDAYDVLLLPMQAVRCSLSDIPDHIPEEVVVWFQETILDKSLKALVVAKDPDGTLIIELYGDNIQISASINKKLGLLSYKDRIRKKESEVLCSTTETLEEKNENMKLPCTEYLSKSVGYKLPNKEILEESYKPQINSSYKELKLLQSLTKTNLVTQYQDSVGNKNSQVFPLTTEKKEEISAETPLKTARVEATLSERKIGDSCDKDLPLKFCEFPQKTIMPGFKTTVYVSHINDLSDFYVQLIEDEAEISHLSERLNSVKTRPEYYVGPPLQRGDMICAVFPEDNLWYRAVIKEQQPNDLLSVQFIDYGNVSVVHTNKIGRLDLVNAILPGLCIHCSLQGFEVPDNKNSKKMMHYFSQRTSEAAIRCEFVKFQDRWEVILADEHGIIADDMISRYALSEKSQVELSTQVIKSASSKSVNKSDIDTSVFLNWYNPEKKMIRAYATVIDGPEYFWCQFADTEKLQCLEVEVQTAGEQVADRRNCIPCPYIGDPCIVRYREDGHYYRALITNICEDYLVSVRLVDFGNIEDCVDPKALWAIPSELLSVPMQAFPCCLSGFNISEGLCSQEGNDYFYEIITEDVLEITILEIRRDVCDIPLAIVDLKSKGKSINEKMEKYSKTGIKSALPYENIDSEIKQTLGSYNLDVGLKKLSNKAVQNKIYMEQQTDELAEITEKDVNIIGTKPSNFRDPKTDNICEGFENPCKDKIDTEELEGELECHLVDKAEFDDKYLITGFNTLLPHANETKEILELNSLEVPLSPDDESKEFLELESIELQNSLVVDEEKGELSPVPPNVPLSQECVTKGAMELFTLQLPLSCEAEKQPELELPTAQLPLDDKMDPLSLGVSQKAQESMCTEDMRKSSCVESFDDQRRMSLHLHGADCDPKTQNEMNICEEEFVEYKNRDAISALMPLFSEEESSDGSKHNNGLPDHISAQLQNTYTLKAFTVGSKCVVWSSLRNTWSKCEILETAEEGTRVLNLSNGMEEIVNPENVWNGIPKLDKSPPEKRGLEVMEI

SEQ ID NO: 355 - DNA, 1561 bp, Homo sapiens
cgcacgccacccgcccgccgcctgccagagctgctcggcccgcagccagggggacagcggctggtcggaggctcgcagtgctgtcggcgagaagcagtcgggtttggagcgcttgggtcgcgttggtgcgcggtggacacgagggaccccagttcccgcgagcagctccgcgccggccctgagagactaagctgaaactgctgctcagctcccaagatggtgccacccaaattgcatgtgcttttctgcctctgcggctgcctggctgtggtttatccttttgactggcaatacataaatcctgttgcccatatgaaatcatcagcatgggtcaacaaaatacaagtactgatggctgctgcaagctttggccaaactaaaatcccccggggaaatgggccttattccgttggttgtacagacttaatgtttgatcacactaataagggcaccttcttgcgtttatattatccatcccaagataatgatcgccttgacaccctttggatcccaaataaagaatatttttggggtcttagcaaatttcttggaacacactggcttatgggcaacattttgaggttactctttggttcaatgacaactcctgcaaactggaattcccctctgaggcctggtgaaaaatatccacttgttgttttttctcatggtcttggggcattcaggacactttattctgctattggcattgacctggcatctcatgggtttatagttgctgctgtagaacacagagatagatctgcatctgcaacttactatttcaaggaccaatctgctgcagaaataggggacaagtcttggctctaccttagaaccctgaaacaagaggaggagacacatatacgaaatgagcaggtacggcaaagagcaaaagaatgttcccaagctctcagtctgattcttgacattgatcatggaaagccagtgaagaatgcattagatttaaagtttgatatggaacaactgaaggactctattgatagggaaaaaatagcagtaattggacattcttttggtggagcaacggttattcagactcttagtgaagatcagagattcagatgtggtattgccctggatgcatggatgtttccactgggtgatgaagtatattccagaattcctcagcccctcttttttatcaactctgaatatttccaatatcctgctaatatcataaaaatgaaaaaatgctactcacctgataaagaaagaaagatgattacaatcaggggttcagtccaccagaattttgctgacttcacttttgcaactggcaaaataattggacacatgctcaaattaaagggagacatagattcaaatgcagctattgatcttagcaacaaagcttcattagcattcttacaaaagcatttaggacttcataaagattttgatcagtgggactgcttgattgaaggagatgatgagaatcttattccagggaccaacattaacacaaccaatcaacacatcatgttacagaactcttcaggaatagagaaatacaattaggattaaaataggtttttta

SEQ ID NO: 356 - protein, 441 aa, Homo sapiens
MVPPKLHVLFCLCGCLAVVYPFDWQYINPVAHMKSSAWVNKIQVLMAAASFGQTKIPRGNGPYSVGCTDLMFDHTNKGTFLRLYYPSQDNDRLDTLWIPNKEYFWGLSKFLGTHWLMGNILRLLFGSMTTPANWNSPLRPGEKYPLVVFSHGLGAFRTLYSAIGIDLASHGFIVAAVEHRDRSASATYYFKDQSAAEIGDKSWLYLRTLKQEEETHIRNEQVRQRAKECSQALSLILDIDHGKPVKNALDLKFDMEQLKDSIDREKIAVIGHSFGGATVIQTLSEDQRFRCGIALDAWMFPLGDEVYSRIPQPLFFINSEYFQYPANIIKMKKCYSPDKERKMITIRGSVHQNFADFTFATGKIIGHMLKLKGDIDSNAAIDLSNKASLAFLQKHLGLHKDFDQWDCLIEGDDENLIPGTNINTTNQHIMLQNSSGIEKYN

SEQ ID NO: 357 - DNA, 1163 bp, Homo sapiens
atgacgccgggcgccatctttgacgctggcagtcttggttttctgctagtgctgctgctgctgggaggacgacggacggcagcggccaagcgagaagaaagacgtggcagcaagcgggagtcggggatagtgtcatcggttcgggtcccactactttggagcttgtctcaaactccacatacagaaagccaccgaccttattccgattatattgttcagctatggaagatggattttttttcatgatcctttgactctcaagttcatctttaaatgaactcttttttttgttttgtttttgaggagataactaaccctagctgtctccagtctgacaaaggttatttgaatggacttaatctcccagtagttgggagatgttttaaaaacacatgctgtgtttgaattgtggctgagaggttttcttggcaatgtgaggaggaaaattttttctgcttcattattattaattcatggattgagtgttggttcgacctacaggcgtaatagattggaactcagtgaagacacagacgttcctgttgagagcaatcagctaatgattacagtttaaagacaatttctgtgatcaagttgtcatttggaagattaaacccatttcacgaggacttggagcctggtccttgctttgaggaagcagtggcttgtttcaagaagccacttctgatctaagaatctacccagcatgcctaatcaaggagaagactgctatttttttttctattctacatgtaccaaaggtgacagctgcccattccgtcactgtgaagctgcactaggcaatgaaactgtttgcacattatggcaagaagggcgctgttttcgacgggtgtgcaggtttcggcacatggagattgataaaaaacgcagtgaaattccttgttattgggaaaatcagccaacaggatgtcaaaaattaaactgcgctttccatcacaatagaggacgatatgttgatggccttttcctacctccgagcaaaagtgtgttgcccactgtgcctgagtcaccagaagaggaagtgaaggctagccaactttcagttcagcagaacaaattgtctgtccagtccaatccttcccctcagctgcggagcgttatgaaagtagaaagttccgaaaatgttcctagccccaagcatc

SEQ ID NO: 358 - protein, 81 aa, Homo sapiens [sequence omitted]

SEQ ID NO: 359 - DNA, 4956 bp, Homo sapiens
ggacggcagcggccaagcgagaagaaagacgtggcagcaagcgggagtcggggatagtgtcatcggttcgggtcccactactttggagcttgtctcaaactccacatacagaaagccaccgaccttattccggtatcctacacccattccccaccctcattacactcccacccctggccctcagcgtgggagtcaagagcaacagggacacttccgtactccttgtaggattggtgaaaccgtaatgacgaacacccctaaactcccataattggatttggggatattccctgcccaaaaaattcctggaaaattgactagtattaagtctatggaagatggattttttttcatgatcctttgactctcaagttcatctttaaatgaactcttttttttgttttgtttttgaggagataactaaccctagctgtctccagtctgacaaaggttatttgaatggacttaatctcccagtagttgggagatgttttaaaaacacatgctgtgtttgaattgtggctgagaggttttcttggcaatgtgaggaggaaaattttttctgcttcattattattaattcatggattgagtgttggttcgacctacaggcgtaatagattggaactcagtgaagacacagacgttcctgttgagagcaatcagctaatgattacagtttaaagacaatttctgtgatcaagttgtcatttggaagattaaacccatttcacgaggacttggagcctggtccttgctttgaggaagcagtggcttgtttcaagaagccacttctgatctaagaatctacccagcatgcctaatcaaggagaagactgctatttttttttctattctacatgtaccaaaggtgacagctgcccattccgtcactgtgaagctgcactaggcaatgaaactgtttgcacattatggcaagaagggcgctgttttcgacgggtgtgcaggtttcggcacatggagattgataaaaaacgcagtgaaattccttgttattgggaaaatcagccaacaggatgtcaaaaattaaactgcgctttccatcacaatagaggacgatatgttgatggccttttcctacctccgagcaaaagtgtgttgcccactgtgcctgagtcaccagaagaggaagtgaaggctagccaactttcagttcagcagaacaaattgtctgtccagtccaatccttcccctcagctgcggagcgttatgaaagtagaaagttccgaaaatgttcctagccccaagcatccaccagttgtaattaatgctgcagatgatgatgaagatgatgatgatcagttttctgaggaaggtgatgaaaccaaaacacctaccctgcaaccaactcctgaagttcacaatggattacgagtgacttctgtccggaaacctgcagtcaatataaagcaaggtgaatgtttgcattttggaataaaaactcttgaggaaattaagtcaaagaaaatgaaggaaaaatctgaggagcaaggtgagggttcttcaggagtttccagtcttttactccaccctgagcctgttccaggtcctgaaaaagaaaatgtcaggactgtggtgaggacagtaactctctccaccaaacaaggagaagaacccttggttagattgggccttactgagacactggggaaacgaaaattttcgacaggcggtgacagtgatcctccattaaagcgcagcctggcacagaggctagggaagaaagttgaagctccagaaactaacactgacgaaacaccaaagaaagctcaagtttccaagtctcttaaggagcgattaggcatgtcagctgatccaaataatgaggacgcaacagataaagttaataaagttggtgagatccatgtgaagacattagaagaaatgcttcttgaaagagccagtcagaaacatggggaatcgcaaactaaactcaagacagaaggaccttcaaaaactgatgattctacttcaggagcaagaagctcctccactatccgtatcaaaaccttctctgaggtcctggctgaagaagaacataggcagcaggaagcagagagacaaaaaagcaaaaaggatacaacttgcatcaagctaaagactgatagtgaaattaaaaaaacagtagttttgccacccattgttgccagcaaaggacaatcagaggagcctgcaggtaaaacaaagtccatgcaggaggtgcacatgaagacggtggaagaaattaaactggagaaggcactgagggtgcagcagagctctgagagcagcaccagctccccgtctcaacatgaggccactccaggggcaaggttgctactgcgaatcaccaaaagaacatggaggaaagaagagaagaaacttcaggaaggaaatgaagttgattttctgagccgtgttagaatggaagctacagaggcttcagttgagaccacaggagttgacatcactaaaattcaagtcaagagatgtgagatcatgagagagacgcgcatgcagaaacagcaggagagggaaaaatcagtcttgacacctcttcagggagatgtagcctcttgcaatacccaagtggcagagaaaccagtgctcactgctgtgccaggaatcacatggcacctgaccaagcagcttcccacaaagtcatcccagaaggtggaggtagaaacctcagggattgcagactcattattgaatgtgaaatggtcagcacagaccttggaaaaaaggggtgaagctaaacccacagtgaacgtgaagcaatctgtggttaaagttgtgtcatcccccaaattggccccaaaacgtaaggcagtggagatgcaccctgctgtcactgccgctgtgaagccactcagctccagcagcgtcctacaggaacccccagccaaaaaggcagctgtggatgctgttgtcctgcttgtctctgaggacaaatcagtcactgtgcctgaaacagaaaatcctagagacagtcttgtgctgcctctaacccagtcctcttcagattcctcacccccggaggtgtctggcccttcctcatcccaaatgagcatgaaaactcgccgactcagctctgcctcaacaggaaagcccccactctctgtggaggatgattttgagaaactaacatgggagatttcaggaggcaaattggaagctgagattgacctggatcctgggaaagatgaagatgaccttccgcttgagctatgagaaatgattgatagctgaaggtggtagtgaggacactttaaaaaaaaatcgccaaaaaactggacttagtttcatctattgtaacatttacctgagatgatcatttctttagtctagaatttgccccaaatcagaagtatacctctgaattatctgtatgtgtcctggattccttggggtcagatttttaaagttactttataaccattttgtccatttgatgccattgtttatcatcttttgagaaaaaagttctgtcatacccttctctccacaaaaaagagactgagagggagatcaagtgaaagggtgcaagcaaacttagtgactccttgaggtgtttgtcagttttggcttttttctcctttgttgtattctttatgtattgtcttgatgtacttaatattacctgagtttgaaatggatgaagacagctgctaccattaaggaccaaattttatgctaccactaaacaaaaatacccactcagtctgtgttagattgtatgtctttttaaaggtatttagagattcaactaagctttaaagagggctgagcagctcaggaagcctgtaatgtgggcataactctttggacctgatcttgatgcttctgctgctctgttggcctctgaagagcaatatctaatttattattactgtaattttttaaaaggctttaaagtgcctcaggggtcccctgaaactaattttctatttctgggattccctggattcattatatgagatggtgacatgattagaggaattcttttttagtatgaaaattgtcccttttcttcttcagtacttgcctccttgctggcattgaattaacacagggacaaaatatggttaattttttatttctaattctcccaacaaacccctgttgcccagtatttatgtggtggcctttaaccacctgagggaaaaaatgagcttattcaagctgccaatatttatctatgggctgtagcagtacactgaattgtactgtgccagggatattgagatgctctgggggtatattgtatacctgccagttttcttcatttctgaattgagttttcttttcttgatgttggtttccttcatatcacctcaaggtttagatttgtgaaggaataagcatgatggaaataatagtcttgaaaggagatatgttgtatataatcaggaggaagaggaaggaaggacttacccattttgatattttgctgtaggtggccagttttgtttctcatagggaaatctgacccccacctgtcatgttggctcctaaggaactgctgttgtaagcggctcatcaagagttgaacttcacgtagccttgttgggaatatggaaaaggaagaaagccacaggactgcccattcagtcttgttaagattgggatgattctgcacaagcaaaaatgacttgaaatttatgtatcgacacacctctaccaatccatcttcagctgactgaatgttgtatgatagcccttctccaaagcaggggtagaatgttcaggtttcaccacggattttctacttatttcgcttttggaatcagcttacagattccaggtcccttttgtagatattctttattcttttgcttttttaaaaaataaactggtattagtcaatgtttcgtgttccgcattatttgaaccatttgcccttacagaaagagaaatacttgtttgtgttttaaataaaactgatgtaggata

SEQ ID NO: 360 - protein, 805 aa, Homo sapiens
MPNQGEDCYFFFYSTCTKGDSCPFRHCEAALGNETVCTLWQEGRCFRRVCRFRHMEIDKKRSEIPCYWENQPTGCQKLNCAFHHNRGRYVDGLFLPPSKSVLPTVPESPEEEVKASQLSVQQNKLSVQSNPSPQLRSVMKVESSENVPSPKHPPVVINAADDDEDDDDQFSEEGDETKTPTLQPTPEVHNGLRVTSVRKPAVNIKQGECLHFGIKTLEEIKSKKMKEKSEEQGEGSSGVSSLLLHPEPVPGPEKENVRTVVRTVTLSTKQGEEPLVRLGLTETLGKRKFSTGGDSDPPLKRSLAQRLGKKVEAPETNTDETPKKAQVSKSLKERLGMSADPNNEDATDKVNKVGEIHVKTLEEMLLERASQKHGESQTKLKTEGPSKTDDSTSGARSSSTIRIKTFSEVLAEEEHRQQEAERQKSKKDTTCIKLKTDSEIKKTVVLPPIVASKGQSEEPAGKTKSMQEVHMKTVEEIKLEKALRVQQSSESSTSSPSQHEATPGARLLLRITKRTWRKEEKKLQEGNEVDFLSRVRMEATEASVETTGVDITKIQVKRCEIMRETRMQKQQEREKSVLTPLQGDVASCNTQVAEKPVLTAVPGITWHLTKQLPTKSSQKVEVETSGIADSLLNVKWSAQTLEKRGEAKPTVNVKQSVVKVVSSPKLAPKRKAVEMHPAVTAAVKPLSSSSVLQEPPAKKAAVDAVVLLVSEDKSVTVPETENPRDSLVLPLTQSSSDSSPPEVSGPSSSQMSMKTRRLSSASTGKPPLSVEDDFEKLTWEISGGKLEAEIDLDPGKDEDDLPLEL

SEQ ID NO: 361 - DNA, 4494 bp, Homo sapiens
gctagtgctgctgctgctgggaggacgacggacggcagcggccaagcgagaagaaagacgtggcagcaagcgggagtcggggatagtgtcatcggatttggggatattccctgcccaaaaaattcctggaaaattgactagtattaagtgcgtaatagattggaactcagtgaagacacagacgttcctgttgagagcaatcagctaatgattacagtttaaagacaatttctgtgatcaagttgtcatttggaagattaaacccatttcacgaggacttggagcctggtccttgctttgaggaagcagtggcttgtttcaagaagccacttctgatctaagaatctacccagcatgcctaatcaaggagaagactgctatttttttttctattctacatgtaccaaaggtgacagctgcccattccgtcactgtgaagctgcactaggcaatgaaactgtttgcacattatggcaagaagggcgctgttttcgacgggtgtgcaggtttcggcacatggagattgataaaaaacgcagtgaaattccttgttattgggaaaatcagccaacaggatgtcaaaaattaaactgcgctttccatcacaatagaggacgatatgttgatggccttttcctacctccgagcaaaagtgtgttgcccactgtgcctgagtcaccagaagaggaagtgaaggctagccaactttcagttcagcagaacaaattgtctgtccagtccaatccttcccctcagctgcggagcgttatgaaagtagaaagttccgaaaatgttcctagccccaagcatccaccagttgtaattaatgctgcagatgatgatgaagatgatgatgatcagttttctgaggaaggtgatgaaaccaaaacacctaccctgcaaccaactcctgaagttcacaatggattacgagtgacttctgtccggaaacctgcagtcaatataaagcaaggtgaatgtttgcattttggaataaaaactcttgaggaaattaagtcaaagaaaatgaaggaaaaatctgaggagcaaggtgagggttcttcaggagtttccagtcttttactccaccctgagcctgttccaggtcctgaaaaagaaaatgtcaggactgtggtgaggacagtaactctctccaccaaacaaggagaagaacccttggttagattgggccttactgagacactggggaaacgaaaattttcgacaggcggtgacagtgatcctccattaaagcgcagcctggcacagaggctagggaagaaagttgaagctccagaaactaacactgacgaaacaccaaagaaagctcaagtttccaagtctcttaaggagcgattaggcatgtcagctgatccaaataatgaggacgcaacagataaagttaataaagttggtgagatccatgtgaagacattagaagaaatgcttcttgaaagagccagtcagaaacatggggaatcgcaaactaaactcaagacagaaggaccttcaaaaactgatgattctacttcaggagcaagaagctcctccactatccgtatcaaaaccttctctgaggtcctggctgaagaagaacataggcagcaggaagcagagagacaaaaaagcaaaaaggatacaacttgcatcaagctaaagactgatagtgaaattaaaaaaacagtagttttgccacccattgttgccagcaaaggacaatcagaggagcctgcaggtaaaacaaagtccatgcaggaggtgcacatgaagacggtggaagaaattaaactggagaaggcactgagggtgcagcagagctctgagagcagcaccagctccccgtctcaacatgaggccactccaggggcaaggttgctactgcgaatcaccaaaagaacatggaggaaagaagagaagaaacttcaggaaggaaatgaagttgattttctgagccgtgttagaatggaagctacagaggcttcagttgagaccacaggagttgacatcactaaaattcaagtcaagagatgtgagatcatgagagagacgcgcatgcagaaacagcaggagagggaaaaatcagtcttgacacctcttcagggagatgtagcctcttgcaatacccaagtggcagagaaaccagtgctcactgctgtgccaggaatcacatggcacctgaccaagcagcttcccacaaagtcatcccagaaggtggaggtagaaacctcagggattgcagactcattattgaatgtgaaatggtcagcacagaccttggaaaaaaggggtgaagctaaacccacagtgaacgtgaagcaatctgtggttaaagttgtgtcatcccccaaattggccccaaaacgtaaggcagtggagatgcaccctgctgtcactgccgctgtgaagccactcagctccagcagcgtcctacaggaacccccagccaaaaaggcagctgtggatgctgttgtcctgcttgtctctgaggacaaatcagtcactgtgcctgaaacagaaaatcctagagacagtcttgtgctgcctctaacccagtcctcttcagattcctcacccccggaggtgtctggcccttcctcatcccaaatgagcatgaaaactcgccgactcagctctgcctcaacaggaaagcccccactctctgtggaggatgattttgagaaactaacatgggagatttcaggaggcaaattggaagctgagattgacctggatcctgggaaagatgaagatgaccttccgcttgagctatgagaaatgattgatagctgaaggtggtagtgaggacactttaaaaaaaaatcgccaaaaaactggacttagtttcatctattgtaacatttacctgagatgatcatttctttagtctagaatttgccccaaatcagaagtatacctctgaattatctgtatgtgtcctggattccttggggtcagatttttaaagttactttataaccattttgtccatttgatgccattgtttatcatcttttgagaaaaaagttctgtcatacccttctctccacaaaaaagagactgagagggagatcaagtgaaagggtgcaagcaaacttagtgactccttgaggtgtttgtcagttttggcttttttctcctttgttgtattctttatgtattgtcttgatgtacttaatattacctgagtttgaaatggatgaagacagctgctaccattaaggaccaaattttatgctaccactaaacaaaaatacccactcagtctgtgttagattgtatgtctttttaaaggtatttagagattcaactaagctttaaagagggctgagcagctcaggaagcctgtaatgtgggcataactctttggacctgatcttgatgcttctgctgctctgttggcctctgaagagcaatatctaatttattattactgtaattttttaaaaggctttaaagtgcctcaggggtcccctgaaactaattttctatttctgggattccctggattcattatatgagatggtgacatgattagaggaattcttttttagtatgaaaattgtcccttttcttcttcagtacttgcctccttgctggcattgaattaacacagggacaaaatatggttaattttttatttctaattctcccaacaaacccctgttgcccagtatttatgtggtggcctttaaccacctgagggaaaaaatgagcttattcaagctgccaatatttatctatgggctgtagcagtacactgaattgtactgtgccagggatattgagatgctctgggggtatattgtatacctgccagttttcttcatttctgaattgagttttcttttcttgatgttggtttccttcatatcacctcaaggtttagatttgtgaaggaataagcatgatggaaataatagtcttgaaaggagatatgttgtatataatcaggaggaagaggaaggaaggacttacccattttgatattttgctgtaggtggccagttttgtttctcatagggaaatctgacccccacctgtcatgttggctcctaaggaactgctgttgtaagcggctcatcaagagttgaacttcacgtagccttgttgggaatatggaaaaggaagaaagccacaggactgcccattcagtcttgttaagattgggatgattctgcacaagcaaaaatgacttgaaatttatgtatcgacacacctctaccaatccatcttcagctgactgaatgttgtatgatagcccttctccaaagcaggggtagaatgttcaggtttcaccacggattttctacttatttcgcttttggaatcagcttacagattccaggtcccttttgtagatattctttattcttttgcttttttaaaaaataaactggtattagtcaatgtttcgtgttccgcattatttgaaccatttgcccttacagaaagagaaatacttgtttgtgttttaaataaaactgatgtaggata

SEQ ID NO: 362 - protein, 805 aa, Homo sapiens; identical to SEQ ID NO: 360

SEQ ID NO: 363 - DNA, 4726 bp, Homo sapiens
gacgctggcagtcttggttttctgctagtgctgctgctgctgggaggacgacggacggcagcggccaagcgagaagaaagacgtggcagcaagcgggagtcggggatagtgtcatcggttcgggtcccactactttggagcttgtctcaaactccacatacagaaagccaccgaccttattccggtatcctacacccattccccaccctcattacactcccacccctggccctcagcgtgggagtcaagagcaacagggacacttccgtactccttgtaggattggtgaaaccgtaatgacgaacacccctaaactcccataattggatttggggatattccctgcccaaaaaattcctggaaaattgactagtattaagtgcgtaatagattggaactcagtgaagacacagacgttcctgttgagagcaatcagctaatgattacagtttaaagacaatttctgtgatcaagttgtcatttggaagattaaacccatttcacgaggacttggagcctggtccttgctttgaggaagcagtggcttgtttcaagaagccacttctgatctaagaatctacccagcatgcctaatcaaggagaagactgctatttttttttctattctacatgtaccaaaggtgacagctgcccattccgtcactgtgaagctgcactaggcaatgaaactgtttgcacattatggcaagaagggcgctgttttcgacgggtgtgcaggtttcggcacatggagattgataaaaaacgcagtgaaattccttgttattgggaaaatcagccaacaggatgtcaaaaattaaactgcgctttccatcacaatagaggacgatatgttgatggccttttcctacctccgagcaaaagtgtgttgcccactgtgcctgagtcaccagaagaggaagtgaaggctagccaactttcagttcagcagaacaaattgtctgtccagtccaatccttcccctcagctgcggagcgttatgaaagtagaaagttccgaaaatgttcctagccccaagcatccaccagttgtaattaatgctgcagatgatgatgaagatgatgatgatcagttttctgaggaaggtgatgaaaccaaaacacctaccctgcaaccaactcctgaagttcacaatggattacgagtgacttctgtccggaaacctgcagtcaatataaagcaaggtgaatgtttgcattttggaataaaaactcttgaggaaattaagtcaaagaaaatgaaggaaaaatctgaggagcaaggtgagggttcttcaggagtttccagtcttttactccaccctgagcctgttccaggtcctgaaaaagaaaatgtcaggactgtggtgaggacagtaactctctccaccaaacaaggagaagaacccttggttagattgggccttactgagacactggggaaacgaaaattttcgacaggcggtgacagtgatcctccattaaagcgcagcctggcacagaggctagggaagaaagttgaagctccagaaactaacactgacgaaacaccaaagaaagctcaagtttccaagtctcttaaggagcgattaggcatgtcagctgatccaaataatgaggacgcaacagataaagttaataaagttggtgagatccatgtgaagacattagaagaaatgcttcttgaaagagccagtcagaaacatggggaatcgcaaactaaactcaagacagaaggaccttcaaaaactgatgattctacttcaggagcaagaagctcctccactatccgtatcaaaaccttctctgaggtcctggctgaagaagaacataggcagcaggaagcagagagacaaaaaagcaaaaaggatacaacttgcatcaagctaaagactgatagtgaaattaaaaaaacagtagttttgccacccattgttgccagcaaaggacaatcagaggagcctgcaggtaaaacaaagtccatgcaggaggtgcacatgaagacggtggaagaaattaaactggagaaggcactgagggtgcagcagagctctgagagcagcaccagctccccgtctcaacatgaggccactccaggggcaaggttgctactgcgaatcaccaaaagaacatggaggaaagaagagaagaaacttcaggaaggaaatgaagttgattttctgagccgtgttagaatggaagctacagaggcttcagttgagaccacaggagttgacatcactaaaattcaagtcaagagatgtgagatcatgagagagacgcgcatgcagaaacagcaggagagggaaaaatcagtcttgacacctcttcagggagatgtagcctcttgcaatacccaagtggcagagaaaccagtgctcactgctgtgccaggaatcacatggcacctgaccaagcagcttcccacaaagtcatcccagaaggtggaggtagaaacctcagggattgcagactcattattgaatgtgaaatggtcagcacagaccttggaaaaaaggggtgaagctaaacccacagtgaacgtgaagcaatctgtggttaaagttgtgtcatcccccaaattggccccaaaacgtaaggcagtggagatgcaccctgctgtcactgccgctgtgaagccactcagctccagcagcgtcctacaggaacccccagccaaaaaggcagctgtggatgctgttgtcctgcttgtctctgaggacaaatcagtcactgtgcctgaaacagaaaatcctagagacagtcttgtgctgcctctaacccagtcctcttcagattcctcacccccggaggtgtctggcccttcctcatcccaaatgagcatgaaaactcgccgactcagctctgcctcaacaggaaagcccccactctctgtggaggatgattttgagaaactaacatgggagatttcaggaggcaaattggaagctgagattgacctggatcctgggaaagatgaagatgaccttccgcttgagctatgagaaatgattgatagctgaaggtggtagtgaggacactttaaaaaaaaatcgccaaaaaactggacttagtttcatctattgtaacatttacctgagatgatcatttctttagtctagaatttgccccaaatcagaagtatacctctgaattatctgtatgtgtcctggattccttggggtcagatttttaaagttactttataaccattttgtccatttgatgccattgtttatcatcttttgagaaaaaagttctgtcatacccttctctccacaaaaaagagactgagagggagatcaagtgaaagggtgcaagcaaacttagtgactccttgaggtgtttgtcagttttggcttttttctcctttgttgtattctttatgtattgtcttgatgtacttaatattacctgagtttgaaatggatgaagacagctgctaccattaaggaccaaattttatgctaccactaaacaaaaatacccactcagtctgtgttagattgtatgtctttttaaaggtatttagagattcaactaagctttaaagagggctgagcagctcaggaagcctgtaatgtgggcataactctttggacctgatcttgatgcttctgctgctctgttggcctctgaagagcaatatctaatttattattactgtaattttttaaaaggctttaaagtgcctcaggggtcccctgaaactaattttctatttctgggattccctggattcattatatgagatggtgacatgattagaggaattcttttttagtatgaaaattgtcccttttcttcttcagtacttgcctccttgctggcattgaattaacacagggacaaaatatggttaattttttatttctaattctcccaacaaacccctgttgcccagtatttatgtggtggcctttaaccacctgagggaaaaaatgagcttattcaagctgccaatatttatctatgggctgtagcagtacactgaattgtactgtgccagggatattgagatgctctgggggtatattgtatacctgccagttttcttcatttctgaattgagttttcttttcttgatgttggtttccttcatatcacctcaaggtttagatttgtgaaggaataagcatgatggaaataatagtcttgaaaggagatatgttgtatataatcaggaggaagaggaaggaaggacttacccattttgatattttgctgtaggtggccagttttgtttctcatagggaaatctgacccccacctgtcatgttggctcctaaggaactgctgttgtaagcggctcatcaagagttgaacttcacgtagccttgttgggaatatggaaaaggaagaaagccacaggactgcccattcagtcttgttaagattgggatgattctgcacaagcaaaaatgacttgaaatttatgtatcgacacacctctaccaatccatcttcagctgactgaatgttgtatgatagcccttctccaaagcaggggtagaatgttcaggtttcaccacggattttctacttatttcgcttttggaatcagcttacagattccaggtcccttttgtagatattctttattcttttgcttttttaaaaaataaactggtattagtcaatgtttcgtgttccgcattatttgaaccatttgcccttacagaaagagaaatacttgtttgtgttttaaataaaactgatgtaggata

SEQ ID NO: 364 - protein, 805 aa, Homo sapiens; identical to SEQ ID NO: 360

SEQ ID NO: 365 - DNA, 5197 bp, Homo sapiens
agaaccctcgcgccctgcgtcgtgctggcacttttaccggccgggccttagagcgcagcctgtagccgggcgccatctttgacgctggcagtcttggttttctgctagtgctgctgctgctgggaggacgacggacggcagcggccaagcgagaagaaagacgtggcagcaagcgggagtcggggatagtgtcatcggttcgggtcccactactttggagcttgtctcaaactccacatacagaaagccaccgaccttattccggtatcctacacccattccccaccctcattacactcccacccctggccctcagcgtgggagtcaagagcaacagggacacttccgtactccttgtaggattggtgaaaccgtaatgacgaacacccctaaactcccataattggtgcggattcctgtggggaaggcctatactgttgacatcttccaggccatctcaaggttctggaccttgagaaggaggctgtggaactagagatagtgatgctttttaggatttggggatattccctgcccaaaaaattcctggaaaattgactagtattaagtctatggaagatggattttttttcatgatcctttgactctcaagttcatctttaaatgaactcttttttttgttttgtttttgaggagataactaaccctagctgtctccagtctgacaaaggttatttgaatggacttaatctcccagtagttgggagatgttttaaaaacacatgctgtgtttgaattgtggctgagaggttttcttggcaatgtgaggaggaaaattttttctgcttcattattattaattcatggattgagtgttggttcgacctacaggcgtaatagattggaactcagtgaagacacagacgttcctgttgagagcaatcagctaatgattacagtttaaagacaatttctgtgatcaagttgtcatttggaagattaaacccatttcacgaggacttggagcctggtccttgctttgaggaagcagtggcttgtttcaagaagccacttctgatctaagaatctacccagcatgcctaatcaaggagaagactgctatttttttttctattctacatgtaccaaaggtgacagctgcccattccgtcactgtgaagctgcactaggcaatgaaactgtttgcacattatggcaagaagggcgctgttttcgacgggtgtgcaggtttcggcacatggagattgataaaaaacgcagtgaaattccttgttattgggaaaatcagccaacaggatgtcaaaaattaaactgcgctttccatcacaatagaggacgatatgttgatggccttttcctacctccgagcaaaagtgtgttgcccactgtgcctgagtcaccagaagaggaagtgaaggctagccaactttcagttcagcagaacaaattgtctgtccagtccaatccttcccctcagctgcggagcgttatgaaagtagaaagttccgaaaatgttcctagccccaagcatccaccagttgtaattaatgctgcagatgatgatgaagatgatgatgatcagttttctgaggaaggtgatgaaaccaaaacacctaccctgcaaccaactcctgaagttcacaatggattacgagtgacttctgtccggaaacctgcagtcaatataaagcaaggtgaatgtttgcattttggaataaaaactcttgaggaaattaagtcaaagaaaatgaaggaaaaatctgaggagcaaggtgagggttcttcaggagtttccagtcttttactccaccctgagcctgttccaggtcctgaaaaagaaaatgtcaggactgtggtgaggacagtaactctctccaccaaacaaggagaagaacccttggttagattgggccttactgagacactggggaaacgaaaattttcgacaggcggtgacagtgatcctccattaaagcgcagcctggcacagaggctagggaagaaagttgaagctccagaaactaacactgacgaaacaccaaagaaagctcaagtttccaagtctcttaaggagcgattaggcatgtcagctgatccaaataatgaggacgcaacagataaagttaataaagttggtgagatccatgtgaagacattagaagaaatgcttcttgaaagagccagtcagaaacatggggaatcgcaaactaaactcaagacagaaggaccttcaaaaactgatgattctacttcaggagcaagaagctcctccactatccgtatcaaaaccttctctgaggtcctggctgaagaagaacataggcagcaggaagcagagagacaaaaaagcaaaaaggatacaacttgcatcaagctaaagactgatagtgaaattaaaaaaacagtagttttgccacccattgttgccagcaaaggacaatcagaggagcctgcaggtaaaacaaagtccatgcaggaggtgcacatgaagacggtggaagaaattaaactggagaaggcactgagggtgcagcagagctctgagagcagcaccagctccccgtctcaacatgaggccactccaggggcaaggttgctactgcgaatcaccaaaagaacatggaggaaagaagagaagaaacttcaggaaggaaatgaagttgattttctgagccgtgttagaatggaagctacagaggcttcagttgagaccacaggagttgacatcactaaaattcaagtcaagagatgtgagatcatgagagagacgcgcatgcagaaacagcaggagagggaaaaatcagtcttgacacctcttcagggagatgtagcctcttgcaatacccaagtggcagagaaaccagtgctcactgctgtgccaggaatcacatggcacctgaccaagcagcttcccacaaagtcatcccagaaggtggaggtagaaacctcagggattgcagactcattattgaatgtgaaatggtcagcacagaccttggaaaaaaggggtgaagctaaacccacagtgaacgtgaagcaatctgtggttaaagttgtgtcatcccccaaattggccccaaaacgtaaggcagtggagatgcaccctgctgtcactgccgctgtgaagccactcagctccagcagcgtcctacaggaacccccagccaaaaaggcagctgtggatgctgttgtcctgcttgtctctgaggacaaatcagtcactgtgcctgaaacagaaaatcctagagacagtcttgtgctgcctctaacccagtcctcttcagattcctcacccccggaggtgtctggcccttcctcatcccaaatgagcatgaaaactcgccgactcagctctgcctcaacaggaaagcccccactctctgtggaggatgattttgagaaactaacatgggagatttcaggaggcaaattggaagctgagattgacctggatcctgggaaagatgaagatgaccttccgcttgagctatgagaaatgattgatagctgaaggtggtagtgaggacactttaaaaaaaaatcgccaaaaaactggacttagtttcatctattgtaacatttacctgagatgatcatttctttagtctagaatttgccccaaatcagaagtatacctctgaattatctgtatgtgtcctggattccttggggtcagatttttaaagttactttataaccattttgtccatttgatgccattgtttatcatcttttgagaaaaaagttctgtcatacccttctctccacaaaaaagagactgagagggagatcaagtgaaagggtgcaagcaaacttagtgactccttgaggtgtttgtcagttttggcttttttctcctttgttgtattctttatgtattgtcttgatgtacttaatattacctgagtttgaaatggatgaagacagctgctaccattaaggaccaaattttatgctaccactaaacaaaaatacccactcagtctgtgttagattgtatgtctttttaaaggtatttagagattcaactaagctttaaagagggctgagcagctcaggaagcctgtaatgtgggcataactctttggacctgatcttgatgcttctgctgctctgttggcctctgaagagcaatatctaatttattattactgtaattttttaaaaggctttaaagtgcctcaggggtcccctgaaactaattttctatttctgggattccctggattcattatatgagatggtgacatgattagaggaattcttttttagtatgaaaattgtcccttttcttcttcagtacttgcctccttgctggcattgaattaacacagggacaaaatatggttaattttttatttctaattctcccaacaaacccctgttgcccagtatttatgtggtggcctttaaccacctgagggaaaaaatgagcttattcaagctgccaatatttatctatgggctgtagcagtacactgaattgtactgtgccagggatattgagatgctctgggggtatattgtatacctgccagttttcttcatttctgaattgagttttcttttcttgatgttggtttccttcatatcacctcaaggtttagatttgtgaaggaataagcatgatggaaataatagtcttgaaaggagatatgttgtatataatcaggaggaagaggaaggaaggacttacccattttgatattttgctgtaggtggccagttttgtttctcatagggaaatctgacccccacctgtcatgttggctcctaaggaactgctgttgtaagcggctcatcaagagttgaacttcacgtagccttgttgggaatatggaaaaggaagaaagccacaggactgcccattcagtcttgttaagattgggatgattctgcacaagcaaaaatgacttgaaatttatgtatcgacacacctctaccaatccatcttcagctgactgaatgttgtatgatagcccttctccaaagcaggggtagaatgttcaggtttcaccacggattttctacttatttcgcttttggaatcagcttacagattccaggtcccttttgtagatattctttattcttttgcttttttaaaaaataaactggtattagtcaatgtttcgtgttccgcattatttgaaccatttgcccttacagaaagagaaatacttgtttgtgttttaaataaaactgatgtaggata

SEQ ID NO: 366 - protein, 805 aa, Homo sapiens; identical to SEQ ID NO: 360

SEQ ID NO: 367 - DNA, 2245 bp, Homo sapiens
caaaattcatatgttgcaacatttacccttagtgtgactatatttggagatagggcttttaggaggtgttttttgaaaactaatcagaagaggaatgcttatctcccaagaaaattgaaaccatctgtaaaagaatcttggctgtgctgtgttttgattagattgaagcttggtgtaaagagaaaacacaaaagaccgcagaatatttacaacatttgaattcctgtttctccatcaaagcacattgtcatcaaagctactttgggtatagaaaaaaggtcaattccaattcccaggaatccttaaccacaactttacttggaaatttccggtaatacttaaaacaccattttgcagcaattctttatgataaactgtaaaatacagctacccgaaaatgactgacaaatcaatcgtcattctgagcctgatggtttttcacagctctttcataaatggaaaaacatgtagacggcaattggtggaagaatggcatccacaaccctcatcatatgtggtaaattggacactaacagaaaacatctgcttggacttctacagagattgctggtttttgggtgtaaacactaaaatagatacttcaggcaatcaagctgttccccagatttgccctttgcaaattcaattaggagatatccttgtaatttcttctgaaccatctcttcaatttccagaaataaatttgatgaatgtttctgaaacatctttcgttggctgtgtgcaaaataccacaacggaagatcagttactttttggctgcagactaaaaggaatgcacactgttaattctaagtggctgagtgttgggacacattattttatcacagttatggcaagtggtccatcaccttgtccactgggacttcgactaaatgtgacagtgaaacagcagttctgccaggaatctctgagttcagaattttgctctggtcatggtaaatgtcttagtgaagcttggagcaagacatatagctgccattgccagcctccattttctggaaaatactgccaggaacttgatgcatgttcttttaaaccatgtaaaaataatggcagttgcattaataaaagagaaaattgggatgagcaagcatatgaatgtgtctgtcacccaccatttacaggaaagaattgctcagaaataattggccagtgtcaaccacatgtctgtttccatggaaactgcagcaatattacttcaaatagtttcatttgtgaatgtgatgagcaattttcaggtccattctgtgaggtgtcagcaaaaccttgtgtttctctgcttttttggaaaagaggaatttgcccaaatagcagttctgcttatacttatgaatgcccaaaaggatcttccagccaaaatggtgaaactgatgtcagtgagttttcattagtaccatgtcagaatggtactgactgcatcaaaatatcaaatgatgttatgtgcatctgttcaccaatatttacagatttgctttgtaagagcattcaaacatcatgtgagtcatttcctttgaggaataatgctacatgtaagaaatgtgagaaagattatccttgcagctgtatatcaggatttactgaaaaaaactgtgagaaagcaattgaccactgtaaactgctcagcatcaactgtctgaatgaagaatggtgtttcaatataattggaagattcaaatatgtatgcattccagggtgcacaaaaaatccatgttggtttttgaagaatgtttacctaattcatcaacacctctgctactgtggagtcaccttccatggtatttgccaagataaaggtcctgctcaatttgaatatgtgtggcaattgggatttgcaggatctgaaggcgaaaagtgccaaggggttattgatgcctatttctttctggctgcaaactgcactgaagatgcaacctatgtgaacgatcctgaagataataattcttcatgttggttcccacatgaaggcacaaaagagatttgtgcaaatggatgcagttgtttgagtgaagaagacagtcaggaatatcggtatctatgttttctcagatgggctggcaacatgtatctggaaaatacaactgatgatcaagaaaatgagtgtcaacatgaagctgtttgtaaagatgaaattaatagacccaggtatttatgtatcatttgagcagataatatcacatatcaaaaagttataattaaattgatagtcatcaaaaaaaaaaaaaaa

SEQ ID NO: 368 - protein, 594 aa, Homo sapiens
MTDKSIVILSLMVFHSSFINGKTCRRQLVEEWHPQPSSYVVNWTLTENICLDFYRDCWFLGVNTKIDTSGNQAVPQICPLQIQLGDILVISSEPSLQFPEINLMNVSETSFVGCVQNTTTEDQLLFGCRLKGMHTVNSKWLSVGTHYFITVMASGPSPCPLGLRLNVTVKQQFCQESLSSEFCSGHGKCLSEAWSKTYSCHCQPPFSGKYCQELDACSFKPCKNNGSCINKRENWDEQAYECVCHPPFTGKNCSEIIGQCQPHVCFHGNCSNITSNSFICECDEQFSGPFCEVSAKPCVSLLFWKRGICPNSSSAYTYECPKGSSSQNGETDVSEFSLVPCQNGTDCIKISNDVMCICSPIFTDLLCKSIQTSCESFPLRNNATCKKCEKDYPCSCISGFTEKNCEKAIDHCKLLSINCLNEEWCFNIIGRFKYVCIPGCTKNPCWFLKNVYLIHQHLCYCGVTFHGICQDKGPAQFEYVWQLGFAGSEGEKCQGVIDAYFFLAANCTEDATYVNDPEDNNSSCWFPHEGTKEICANGCSCLSEEDSQEYRYLCFLRWAGNMYLENTTDDQENECQHEAVCKDEINRPRYLCII

SEQ ID NO: 369 - DNA, 531 bp, Homo sapiens
agaaatgccagacactaattacaagactgaagatttgtgattattaaagtgataagtttccagtgacatatacatgaaatgccagcacatagctaatatcactgaccacatggactgctggggacatggattcctaaatgctatgtatgtgctcactttcactttaataagcagcagtacaagtggaggagaagtgtcctggaagaggaaacctgcactcaagggatagaagacgaagcccagaagagtggaacaataggctaagcttaggacagatgggcaaaaaagcatcattgaatgacaaagctgaaaaggaactggatatcagggatcacaaacccaaatgcttacaggggctaccacacggatattggacaagaggacttaagactctgaaaggtaacagcagaaacaacttccttccaccctgtgtgtgtcactgtctacagcagcatggagaagtcaggcgagtgtttcccataaattcagtgggattcttatggtaaccgtgggaagaagagagtgcaggac

SEQ ID NO: 370 - protein, 76 aa, Homo sapiens [sequence omitted]

SEQ ID NO: 371 - DNA, 522 bp, Homo sapiens
atggtgcccggcaccatcagcttttgtcctctgctgcagctaaagtgtcttcctcctggaccagggagagggggagggggtgtggacaggacccgcctgctgacggtgacacctcttcgacaccacgtccacgccagtcctcagctccaggagctgggcgggatccctcatcccgctcagctgggagatgccccgggagggcgtcccccggctccgggcggcgagggtagtagccgaccccaatccactccgggggccgccgggggccgcgtgaaggcaggtgttccggggagaaacgtggaagggaggcgcggcctggggccggtggcgctcggctgggggccgcagttggctcccctgggggctctgggcggcggcagctcccgcctgtggggaggagaaggagccggatgggcgggttcaggcgcgcgcggcggcggtcccggggccgccggctcctccccgcgagggtgcctgtccgccgctcgccgcgctgaggcagtgcggggcgggcgcgcctag

SEQ ID NO: 372 - protein, 173 aa, Homo sapiens [sequence omitted]

SEQ ID NO: 373 - DNA, 1755 bp, Homo sapiens
cgcgagggtgcctgtccgccgctcgccgcgctgaggcagtgcggggcgggcgcgcctaggctgccgcccagcgccctcgccgcggccatgcccgggccctagagcgcctgccgcagcttgcgccccgcagccccgcagccccgcgcccgccgccgcctcttcaatgggcaacctgctcggcggggtcagcttccgcgagcccaccaccgtggaggactgcgactccacctggcagaccgactcggagcccgagcccgaagaaccagggccgggcggcggcagcgagggcccggggcaggagtccgagcagcccgcgcagcccccggagcaagccggcgggcggcccggcgccagccccgcgccggacgaggacgccgaggcggcgggcgccgagcagggtggtgattccactgaagcaactgccaaaccaaagagaagtttttatgctgccagggatttgtacaagtaccgacaccagtacccaaacttcaaagatatccgatatcaaaatgacttgagcaatcttcgtttttataagaataaaattccattcaagccagatggtgtttacattgaagaagttctaagtaaatggaaaggagattatgaaaaactggagcacaaccacacttacattcaatggcttttccccctgagagaacaaggcttgaacttctatgccaaagaactaactacatatgaaattgaggaattcaaaaaaacaaaagaagcaattagaagattcctcctggcttataaaatgatgctagaattttttggaataaaactgactgataaaactggaaatgttgctcgggctgttaactggcaggaaagatttcagcatctgaatgagtcccagcacaactatttaagaatcactcgtattcttaaaagccttggtgagcttggatatgaaagttttaaatctcctcttgtaaaatttattcttcatgaagctcttgtggagaatactattcccaatattaagcagagtgctctagagtattttgtttatacaattagagacagaagagaaaggagaaagctcctgcggttcgcccagaaacactacacgccttcagagaactttatctggggaccgcctcgaaaagaacagtcggagggaagcaaagcccagaaaatgtcttcccctctcgcctccagtcataacagtcaaacttctatgcacaaaaaagccaaggactccaaaaattcctcctcagctgttcatttaaatagcaaaacagctgaagacaaaaaagtggcaccaaaagagcctgtggaagagacagacaggcccagcccagagcccagcaatgaagctgccaagccaagaaatacagagaaggacagtaatgctgagaacatgaattctcaacctgagaaaacagttactactcccacagaaaaaaaggagagtgtatctcctgagaataacgaagaaggtggaaatgataaccaagacaatgaaaatcctggaaatacaaattgccatgatgttgtactagtacagtgaattatcagaaaacccagaagccagtttaggctagagaggaaaaaactactgtatcatttatcctaaagaacagagatgaggtcaatttcaaattttagccatctgtttgtgatttctgtcataagcattttgttgtttgtttttttattttggatgacaatgaattgaatatctaataaggagatttaagataagacccaataaatgaatgtattctgtaaaaaaaaaaaaaaaaa

SEQ ID NO: 374 - protein, 451 aa, Homo sapiens
MGNLLGGVSFREPTTVEDCDSTWQTDSEPEPEEPGPGGGSEGPGQESEQPAQPPEQAGGRPGASPAPDEDAEAAGAEQGGDSTEATAKPKRSFYAARDLYKYRHQYPNFKDIRYQNDLSNLRFYKNKIPFKPDGVYIEEVLSKWKGDYEKLEHNHTYIQWLFPLREQGLNFYAKELTTYEIEEFKKTKEAIRRFLLAYKMMLEFFGIKLTDKTGNVARAVNWQERFQHLNESQHNYLRITRILKSLGELGYESFKSPLVKFILHEALVENTIPNIKQSALEYFVYTIRDRRERRKLLRFAQKHYTPSENFIWGPPRKEQSEGSKAQKMSSPLASSHNSQTSMHKKAKDSKNSSSAVHLNSKTAEDKKVAPKEPVEETDRPSPEPSNEAAKPRNTEKDSNAENMNSQPEKTVTTPTEKKESVSPENNEEGGNDNQDNENPGNTNCHDVVLVQ

SEQ ID NO: 375 - DNA, 2034 bp, Homo sapiens
cacaaagagcggggcggagaggcagctgcggggggagccggcggccgctgctgccgcccagggctctggggccccgccggccaggcccgccgtccgcggccagtgcccttcctcctcctcctcctctgccgccgcctcctcagtcgccgccgcctcctcagtcgccgccgcccgcgccgcccgcgccctccgcgcgcctctgagcccgcgccgggccgcgccggccccttcccatgcgggcggcgcgggccctgggaggggcgcccggagccagccgcgcagcatgcactggggggttggctttgcttcgtccaggccgtgcgtggtggatctgagctggaaccagagcatctccttcttcggctggtgggccgggtccgaggagcccttctccttttatggggacatcatcgctttccctttgcaggattacggtgggatcatggcagggctgggctccgatccctggtggaagaaaaccctttacttgaccgggggagctttgctggccgcagctgcgtatctgctccacgaactcctggtcattaggaaacagcaagagattgactctaaagatgctattattttgcatcagtttgcaagacctaacaatggtgttccaagtttatctcctttctgtttaaagatggaaacttatttaaggatggctgacttaccgtatcagaactattttggtggaaaactctctgctcaagggaaaatgccttggattgaatataatcatgaaaaagtttctggcacagaattcataattgactttctggaagagaagcttggagtgaatttaaacaaaaaccttggccctcatgaaagagccatctccagagcggtgaccaagatggtggaggagcacttctactggacgttagcttattgccagtgggtggacaatctcaatgagacccggaagatgctctctcttagtggtggtggtcccttcagcaacctgctgaggtgggttgtgtgccacataacgaaaggaattgtgaaacgcgagatgcacggccacggcattggccgcttctccgaggaagagatttacatgctgatggagaaggacatgcggtctttagcagggcttttgggtgataagaagtacatcatggggcccaagctttccactcttgacgccactgtctttggacacttggcacaggcaatgtggaccttaccagggacaagacccgaacggctgatcaaaggtgagctgatcaaccttgccatgtactgtgagaggataaggaggaaattttggccagagtggcaccacgatgatgacaataccatctatgagtctgaggagagcagcgaaggcagcaaaacccacaccccgctgctggattttagcttttactcaaggacagagacctttgaagatgagggagcagaaaacagtttttccagaaccccagacacagattttactggacactcactctttgattcggatgtggacatggatgactatacagaccacgaacagtgcaagtgacgtccagcctcactgaccctcttccttgggacctgccactccctgggtcggtccattttcccaggtagcaatccatccgagctgggaggagatcttcgtgcttggcagagttttcacatgctaactggactatagcagccttatttctttttttgtacaaacaaaacacagaaccattcagatgactccattgaaaacaaacaggcaaaaaataatgtcagcatggttcctgaaatccatttttgttttcattagaaaactattaataatattgtgtggtagagcaggtgtaagagctggttgtcagctgatagtttttatgatgatcctcttcaaccctgaggtcttaattgtgagatggattcttgaacctccttcctccaccaggatttgaagtaatgagagatatcatcagaaaaatgttttacggtggctgcttgtactttatgtgtgtatattgtatgttgagacataagtcaaataaaatccacagatattaaacgaaaaaaaaaaaaaaaaaa

SEQ ID NO: 376 - protein, 409 aa, Homo sapiens
MHWGVGFASSRPCVVDLSWNQSISFFGWWAGSEEPFSFYGDIIAFPLQDYGGIMAGLGSDPWWKKTLYLTGGALLAAAAYLLHELLVIRKQQEIDSKDAIILHQFARPNNGVPSLSPFCLKMETYLRMADLPYQNYFGGKLSAQGKMPWIEYNHEKVSGTEFIIDFLEEKLGVNLNKNLGPHERAISRAVTKMVEEHFYWTLAYCQWVDNLNETRKMLSLSGGGPFSNLLRWVVCHITKGIVKREMHGHGIGRFSEEEIYMLMEKDMRSLAGLLGDKKYIMGPKLSTLDATVFGHLAQAMWTLPGTRPERLIKGELINLAMYCERIRRKFWPEWHHDDDNTIYESEESSEGSKTHTPLLDFSFYSRTETFEDEGAENSFSRTPDTDFTGHSLFDSDVDMDDYTDHEQCK

SEQ ID NO: 377 - DNA, 2386 bp, Homo sapiens
agcatacgccgagccggtctttgagcgctaacgtctttctgtctccccgcggtggtgatgacggtgaaaactgaggctgctaagggcaccctcacttactccaggatgaggggcatggtggcaattctcatcgctttcatgaagcagaggaggatgggtctgaacgactttattcagaagattgccaataactcctatgcatgcaaacaccctgaagttcagtccatcttgaagatctcccaacctcaggagcctgagcttatgaatgccaacccttctcctccaccaagtccttctcagcaaatcaaccttggcccgtcgtccaatcctcatgctaaaccatctgactttcacttcttgaaagtgatcggaaagggcagttttggaaaggttcttctagcaagacacaaggcagaagaagtgttctatgcagtcaaagttttacagaagaaagcaatcctgaaaaagaaagaggagaagcatattatgtcggagcggaatgttctgttgaagaatgtgaagcaccctttcctggtgggccttcacttctctttccagactgctgacaaattgtactttgtcctagactacattaatggtggagagttgttctaccatctccagagggaacgctgcttcctggaaccacgggctcgtttctatgctgctgaaatagccagtgccttgggctacctgcattcactgaacatcgtttatagagacttaaaaccagagaatattttgctagattcacagggacacattgtccttactgacttcggactctgcaaggagaacattgaacacaacagcacaacatccaccttctgtggcacgccggagtatctcgcacctgaggtgcttcataagcagccttatgacaggactgtggactggtggtgcctgggagctgtcttgtatgagatgctgtatggcctgccgcctttttatagccgaaacacagctgaaatgtacgacaacattctgaacaagcctctccagctgaaaccaaatattacaaattccgcaagacacctcctggagggcctcctgcagaaggacaggacaaagcggctcggggccaaggatgacttcatggagattaagagtcatgtcttcttctccttaattaactgggatgatctcattaataagaagattactcccccttttaacccaaatgtgagtgggcccaacgacctacggcactttgaccccgagtttaccgaagagcctgtccccaactccattggcaagtcccctgacagcgtcctcgtcacagccagcgtcaaggaagctgccgaggctttcctaggcttttcctatgcgcctcccacggactctttcctctgaaccctgttagggcttggttttaaaggattttatgtgtgtttccgaatgttttagttagccttttggtggagccgccagctgacaggacatcttacaagagaatttgcacatctctggaagcttagcaatcttattgcacactgttcgctggaagctttttgaagagcacattctcctcagtgagctcatgaggttttcatttttattcttccttccaacgtggtgctatctctgaaacgagcgttagagtgccgccttagacggaggcaggagtttcgttagaaagcggacgctgttctaaaaaaggtctcctgcagatctgtctgggctgtgatgacgaatattatgaaatgtgccttttctgaagagattgtgttagctccaaagcttttcctatcgcagtgtttcagttctttattttcccttgtggatatgctgtgtgaaccgtcgtgtgagtgtggtatgcctgatcacagatggattttgttataagcatcaatgtgacacttgcaggacactacaacgtgggacattgtttgtttcttccatatttggaagataaatttatgtgtagacttttttgtaagatacggttaataactaaaatttattgaaatggtcttgcaatgactcgtattcagatgcttaaagaaagcattgctgctacaaatatttctatttttagaaagggtttttatggaccaatgccccagttgtcagtcagagccgttggtgtttttcattgtttaaaatgtcacctgtaaaatgggcattatttatgtttttttttttgcattcctgataattgtatgtattgtataaagaacgtctgtacattgggttataacactagtatatttaaacttacaggcttatttgtaatgtaaaccaccattttaatgtactgtaattaacatggttataatacgtacaatccttccctcatcccatcacacaactttttttgtgtgtgataaactgattttggtttgcaataaaaccttgaaaaatatttacaaaaaaaaaaaaaaaa

SEQ ID NO: 378 - protein, 431 aa, Homo sapiens
MTVKTEAAKGTLTYSRMRGMVAILIAFMKQRRMGLNDFIQKIANNSYACKHPEVQSILKISQPQEPELMNANPSPPPSPSQQINLGPSSNPHAKPSDFHFLKVIGKGSFGKVLLARHKAEEVFYAVKVLQKKAILKKKEEKHIMSERNVLLKNVKHPFLVGLHFSFQTADKLYFVLDYINGGELFYHLQRERCFLEPRARFYAAEIASALGYLHSLNIVYRDLKPENILLDSQGHIVLTDFGLCKENIEHNSTTSTFCGTPEYLAPEVLHKQPYDRTVDWWCLGAVLYEMLYGLPPFYSRNTAEMYDNILNKPLQLKPNITNSARHLLEGLLQKDRTKRLGAKDDFMEIKSHVFFSLINWDDLINKKITPPFNPNVSGPNDLRHFDPEFTEEPVPNSIGKSPDSVLVTASVKEAAEAFLGFSYAPPTDSFL

SEQ ID NO: 379 - DNA, 210 bp, Homo sapiens
atggcccggatagcaaccactggagctggcgtggggtacacggtgggtcataccatcactgggggcttcaatgaaggaagtaatgctgagcctgcaagtcctgacatcacctaccaggagccccagggaacccagatgtcacagcggcagcagccttgcttctatgagataaaaccgtttttggagtgtgcccggaaccgggtgacataa

SEQ ID NO: 380 - protein, 69 aa, Homo sapiens [sequence omitted]

SEQ ID NO: 381 - DNA, 5538 bp, Homo sapiens
gcggcacagagccgcggcttgctttcaggacacgggtcgctggcgggttaggtggctgcgtggccgcctcacttcgcgcacgcgccgctaggctgggggagttgatttgcactgctccgggtgtcggctccggcgggacgggcggttctgcgtacccctctccagtgtcaacctggggctgaatcttcaacctgtcaaagccttcttaattatgtctgagaaaaggatcctgattgagtcaatgctttgcattctcagtcctctgcataaagctgagagatgcctacagctgagagtgaagcaaaagtaaaaaccaaagttcgctttgaagaattgcttaagacccacagtgatctaatgcgtgaaaagaaaaaactgaagaaaaaacttgtcaggtctgaagaaaacatctcacctgacactattagaagcaatcttcactatatgaaagaaactacaagtgatgatcccgacactattagaagcaatcttccccatattaaagaaactacaagtgatgatgtaagtgctgctaacactaacaacctgaagaagagcacgagagtcactaaaaacaaattgaggaacacacagttagcaactgaaaatcctaatggtgatgctagtgtagaggaagacaaacaaggaaagccaaataaaaaggtgataaagacggtgccccagttgactacacaagacctgaaaccggaaactcctgagaataaggttgattctacacaccagaaaacacatacaaagccacagccaggcgttgatcatcagaaaagtgagaaggcaaatgagggaagagaagagactgatttagaagaggatgaagaattgatgcaagcatatcagtgccatgtaactgaagaaatggcaaaggagattaagaggaaaataagaaagaaactgaaagaacagttgacttactttccctcagatactttattccatgatgacaaactaagcagtgaaaaaaggaaaaagaaaaaggaagttccagtcttctctaaagctgaaacaagtacattgaccatctctggtgacacagttgaaggtgaacaaaagaaagaatcttcagttagatcagtttcttcagattctcatcaagatgatgaaataagctcaatggaacaaagcacagaagacagcatgcaagatgatacaaaacctaaaccaaaaaaaacaaaaaagaagactaaagcagttgcagataataatgaagatgttgatggtgatggtgttcatgaaataacaagccgagatagcccggtttatcccaaatgtttgcttgatgatgaccttgtcttgggagtttacattcaccgaactgatagacttaagtcagattttatgatttctcacccaatggtaaaaattcatgtggttgatgagcatactggtcaatatgtcaagaaagatgatagtggacggcctgtttcatcttactatgaaaaagagaatgtggattatattcttcctattatgacccagccatatgattttaaacagttaaaatcaagacttccagagtgggaagaacaaattgtatttaatgaaaattttccctatttgcttcgaggctctgatgagagtcctaaagtcatcctgttctttgagattcttgatttcttaagcgtggatgaaattaagaataattctgaggttcaaaaccaagaatgtggctttcggaaaattgcctgggcatttcttaagcttctgggagccaatggaaatgcaaacatcaactcaaaacttcgcttgcagctatattacccacctactaagcctcgatccccattaagtgttgttgaggcatttgaatggtggtcaaaatgtccaagaaatcattacccatcaacactgtacgtaactgtaagaggactgaaagttccagactgtataaagccatcttaccgctctatgatggctcttcaggaggaaaaaggtaaaccagtgcattgtgaacgtcaccatgagtcaagctcagtagacacagaacctggattagaagagtcaaaggaagtaataaagtggaaacgactccctgggcaggcttgccgtatcccaaacaaacacctcttctcactaaatgcaggagaacgaggatgtttttgtcttgatttctcccacaatggaagaatattagcagcagcttgtgccagccgggatggatatccaattattttatatgaaattccttctggacgtttcatgagagaattgtgtggccacctcaatatcatttatgatctttcctggtcaaaagatgatcactacatccttacttcatcatctgatggcactgccaggatatggaaaaatgaaataaacaatacaaatactttcagagttttacctcatccttcttttgtttacacggctaaattccatccagctgtaagagagctagtagttacaggatgctatgattccatgatacggatatggaaagttgagatgagagaagattctgccatattggtccgacagtttgatgttcacaaaagttttatcaactcactttgttttgatactgaaggtcatcatatgtattcaggagattgtacaggggtgattgttgtttggaatacctatgtcaagattaatgatttggaacattcagtgcaccactggactataaataaggaaattaaagaaactgagtttaagggaattccaataagttatttggagattcatcccaatggaaaacgtttgttaatccataccaaagacagtactttgagaattatggatctccggatattagtagcaaggaagtttgtaggagcagcaaattatcgggagaagattcatagtactttgactccatgtgggacttttctgtttgctggaagtgaggatggtatagtgtatgtttggaacccagaaacaggagaacaagtagccatgtattctgacttgccattcaagtcacccattcgagacatttcttatcatccatttgaaaatatggttgcattctgtgcatttgggcaaaatgagccaattcttctgtatatttacgatttccatgttgcccagcaggaggctgaaatgttcaaacgctacaatggaacatttccattacctggaatacaccaaagtcaagatgccctatgtacctgtccaaaactaccccatcaaggctcttttcagattgatgaatttgtccacactgaaagttcttcaacgaagatgcagctagtaaaacagaggcttgaaactgtcacagaggtgatacgttcctgtgctgcaaaagtcaacaaaaatctctcatttacttcaccaccagcagtttcctcacaacagtctaagttaaagcagtcaaacatgctgaccgctcaagagattctacatcagtttggtttcactcagaccgggattatcagcatagaaagaaagccttgtaaccatcaggtagatacagcaccaacggtagtggctctttatgactacacagcgaatcgatcagatgaactaaccatccatcgcggagacattatccgagtgtttttcaaagataatgaagactggtggtatggcagcataggaaagggacaggaaggttattttccagctaatcatgtggctagtgaaacactgtatcaagaactgcctcctgagataaaggagcgatcccctcctttaagccctgaggaaaaaactaaaatagaaaaatctccagctcctcaaaagcaatcaatcaataagaacaagtcccaggacttcagactaggctcagaatctatgacacattctgaaatgagaaaagaacagagccatgaggaccaaggacacataatggatacacggatgaggaagaacaagcaagcaggcagaaaagtcactctaatagagtaaagaattgaagaaaagttaagagctgccgaaatgcacagaggtgaaaatgacaaaccaaatggaatttctcttcagagttcagaattttcagatactaaggaggaagaaaggatccactacttcttgttcttatgaatgactctagaaaaatcagaatcaagttgtgggtggaaaaatcaacgtggcctttgagttcagttgttataaaccattgtgactattgttggtcaaagtattggtacttatattgttagtaattgcatcataattacattaccagtgttggaaaactaatgaagaaaacactgtaattgctactcagcaaatgtgaataaaaggtgtttgcgttattaggatgtctgttaagtaatcatttaatattattatattggtaatggttgtatgtgtgatgctatgcccagaatatgaagtatctgtttttgaaattcactttatttaaaagataagcagctgactgggcacggtgcctcatgcctgtaatcctagcaccttgggaggctgaggcaggtggatcacctaaggtcaggagttcaacaacaccagcctgaccaacatggtgaaaccccatctctactaaaaatacaaaaatcagccgggtctcatggcaggcacctgtaatcccatctactgaggcaggagaattgcttgacccaggaggcagaggttgcagtgagccaagatcacgccattgcactccagcctgggggacagagcaagactctatctccaaaaaacaaaaaagataagcagctttagaatatggcgcattcaaaacagtctcagtaacaaagacattaaaagaaaacaatttactttctaattaaaattttgtgtttcttaagatcaaatcatataggtaacttcatagacctaaattaaaagtgatttttggctggactggcaacaatgttcccaatgtctttactttttaaaaaaggcttttcatatttaagcacatacctattttgtagacttacattgtttaatatttattttaatcttaatatttttacattattatattgcattatttattttttctaagttccagaataatagtgtcattattatagactatatgttttgaagtttgatattataatgggatattcattttttgttcttttcttgactcctttctcaagtgtgtgataaggtctgctgataaaatatttaaccccaagaaagtgaaaactaatataaaattagaaagacctatccaaattagacagtcaattccattaaaataagaagtgagaaaaacaatgttgggcattgaggtgtaaattttgcccagatgtatacccagtgtgaaatatcttctaataaaaatatatttggctcttatccctgcacatgtagaggcataaaaattggtaaacatgtcccgctgtgtagaactttaaaaaaaaggcatttttgaaagtgttgagtggcactgataactggtgaagcctacagccatccgcccaaaagtctgttctgatggcactgagttttcattgttctggatgtataagtctgtgtgtcaggtacagctgggcccagccagcttgagtcactcttgtacaagcttgtttttttctgtcttgtgaatgcacttgataatttaaaaataaaaatatctgtttctctgcaaaaaaaaaa

SEQ ID NO: 382 - protein, 1196 aa, Homo sapiens
MPTAESEAKVKTKVRFEELLKTHSDLMREKKKLKKKLVRSEENISPDTIRSNLHYMKETTSDDPDTIRSNLPHIKETTSDDVSAANTNNLKKSTRVTKNKLRNTQLATENPNGDASVEEDKQGKPNKKVIKTVPQLTTQDLKPETPENKVDSTHQKTHTKPQPGVDHQKSEKANEGREETDLEEDEELMQAYQCHVTEEMAKEIKRKIRKKLKEQLTYFPSDTLFHDDKLSSEKRKKKKEVPVFSKAETSTLTISGDTVEGEQKKESSVRSVSSDSHQDDEISSMEQSTEDSMQDDTKPKPKKTKKKTKAVADNNEDVDGDGVHEITSRDSPVYPKCLLDDDLVLGVYIHRTDRLKSDFMISHPMVKIHVVDEHTGQYVKKDDSGRPVSSYYEKENVDYILPIMTQPYDFKQLKSRLPEWEEQIVFNENFPYLLRGSDESPKVILFFEILDFLSVDEIKNNSEVQNQECGFRKIAWAFLKLLGANGNANINSKLRLQLYYPPTKPRSPLSVVEAFEWWSKCPRNHYPSTLYVTVRGLKVPDCIKPSYRSMMALQEEKGKPVHCERHHESSSVDTEPGLEESKEVIKWKRLPGQACRIPNKHLFSLNAGERGCFCLDFSHNGRILAAACASRDGYPIILYEIPSGRFMRELCGHLNIIYDLSWSKDDHYILTSSSDGTARIWKNEINNTNTFRVLPHPSFVYTAKFHPAVRELVVTGCYDSMIRIWKVEMREDSAILVRQFDVHKSFINSLCFDTEGHHMYSGDCTGVIVVWNTYVKINDLEHSVHHWTINKEIKETEFKGIPISYLEIHPNGKRLLIHTKDSTLRIMDLRILVARKFVGAANYREKIHSTLTPCGTFLFAGSEDGIVYVWNPETGEQVAMYSDLPFKSPIRDISYHPFENMVAFCAFGQNEPILLYIYDFHVAQQEAEMFKRYNGTFPLPGIHQSQDALCTCPKLPHQGSFQIDEFVHTESSSTKMQLVKQRLETVTEVIRSCAAKVNKNLSFTSPPAVSSQQSKLKQSNMLTAQEILHQFGFTQTGIISIERKPCNHQVDTAPTVVALYDYTANRSDELTIHRGDIIRVFFKDNEDWWYGSIGKGQEGYFPANHVASETLYQELPPEIKERSPPLSPEEKTKIEKSPAPQKQSINKNKSQDFRLGSESMTHSEMRKEQSHEDQGHIMDTRMRKNKQAGRKVTLIE

SEQ ID NO: 383 - DNA, 1007 bp, Homo sapiens
atggtgaaggtgaaggccagagtcaacgaatttggctatactgggtgcctggtcactagggctgcttttaactctggtaaagtggatattgttgccatcaatgaccccttcattgacctcaactacctggcctacatgctccagtatgattccacccatggcaagttccatggcaccatcaaggctgagaatgggaagcttgtcatcaatggaaatcccattaccatcttccaggagtaagatcccaccaaaatcaaatggggcgatgctggcactgagtacgttgtggagtccaccagcatcttcaccgccatggagaaggttggggctcatttgcagaggggagccaaaagggtcatgatctttgccccctctactgaagccatcatgttcatgatgaaagtgaattatgagaagtatgacaacagccttaagatcatcagcaatgcctcctgtaccaccaactgcttagcgcccctggccaaggtcatccatgacaactctggtattgttgaaagactcatgattacagtccatgtcatcactaccacccagaaaactgtggatggcccttgcaggaaactgcggcctgatggccacagggctctccagaacatcatacctgcatctactagcactgccaaggcaatggtcaaggtcatccctgagctgaacaagaagctcactggcatggcctcccatgtccccactgccaaggtgttggtcgtggacccgacctgccatctggaaaacctgccaaatattatgacatcaagaagatgatgaagcaggcttcagaggatcctatcaagggcatcctgggctacactgagcaccagattgtctcctccgacttcaacagtgacacacagtcttccacctttgatgctggggctggcattaccctcaacgaccactttgtcaagctcatttcctggtatgacaatgaatttggctacagcaacagggtggtggacctcatggcccacatggcttccaaggaataa

SEQ ID NO: 384 - DNA, 10835 bp, Homo sapiens
caaaaatcagtctgatctcgggaaacctggagaaatttattttctgtactctaatgttctttcattttggtgaccatcaaggtgctgggagaggaattagatggctgtaattcaaagttaatggaattagatgcagcagtacagaaattcttggaacagaatggccaactgggtaagccactggccaagaagataggaaaactgactgaacttcaccagcagaccattagacaagctgagaatcggctctccaagctcaatcaggcagcatcacatttagaagaatacaatgaaatgcttgaattaattttgaagtggattgaaaaagctaaagtcttggctcatggaactattgcatggaattctgcaagccagcttcgggaacaatatattttgcatcagaccctgctagaagaatccaaagaaattgacagtgagctggaagcaatgactgagaaattacagtacctcactagcgtgtactgtacagaaaaaatgtctcagcaagtggcagaactgggacgggagactgaggagttgcgacagatgatcaaaattcgtttgcagaacctccaagatgcagctaaggatatgaaaaaatttgaagcagagttgaaaaagttacaagctgccttggagcaagcccaggcaacactgacttctccagaagttggacgtctcagtctcaaggagcagctctctcatcggcagcatttgttgtctgagatggagtcactgaagccgaaggtgcaagcagtgcagctctgccagagtgccctccggatccccgaggatgtggttgccagcttacctctctgtcatgctgctctgcggctgcaggaagaggccagccggctgcagcacaccgccatccagcagtgtaacatcatgcaggcagctgtggtacaatatgaacaatatgagcaagaaatgaaacatctccagcaactgatagaaggagctcacagagagattgaggataaacctgttgccaccagtaacatacaggagctgcaggctcagatttctcggcatgaggagctggcgcagaaaattaagggctaccaggagcagatcgcttctttgaattccaagtgcaagatgctgacgatgaaagccaagcacgccaccatgctgctgacggtgaccgaggtcgaggggctggcggaagggacagaggacctggatggggagctcctccccacgccttcggcccacccctctgtggtcatgatgactgcaggtcgctgtcacactttgctgtcaccggtcactgaggagtctggggaggagggaaccaacagtgagatttcctctccacctgcctgtcgctccccttcacctgtggctaatacagatgcttctgttaaccaggacattgcatattaccaagccttgtctgctgagaggttgcagacagatgctgcaaaaattcaccccagcacatccgcatcccaggagttctatgaaccgggattggagccatccgctactgccaaactgggtgatttgcagcgttcttgggaaaccttaaagaatgtgatcagtgagaagcagcgcacactctatgaagctttggaacgccagcagaagtaccaggactccctccagtccatctctacgaagatggaggccattgagctgaaactcagtgagagcccagagcctggcaggagtccagaaagccagatggctgaacatcaggcattgatggatgagattctcatgctccaggatgaaatcaatgagctccagtcctctctcgcagaggagctggtatccgagtcttgtgaggccgaccctgcggagcagctggccttgcagtccacgctcactgtcttagccgagcgaatgtccaccatcaggatgaaagcctcggggaaacggcagcttttggaggagaagttgaatgatcagctggaggaacaaaggcaggaacaggccctgcagaggtatcgctgtgaagccgatgagctggacagctggctcttgagtaccaaggccactctggacactgcgctgagtccacccaaggagcccatggacatggaggcccagcttatggactgccagaatatgctggtggaaatagagcagaaggtggtggctttatcagaactgtcagtccacaatgagaacctgctgctggagggcaaagctcacaccaaggacgaggccgagcagctggctggaaagctgagaaggctcaaggggagcctgctggagctgcagagagccctgcatgataagcagctcaacatgcagggaacagcacaggagaaggaggagagcgatgttgacctaacagccacgcagagccccggcgtccaggaatggctggcccaagctcgcaccacatggacccagcagcggcagagcagtctccagcaacaaaaagagttagaacaggaattagccgagcagaagagtctccttcgctcagtagccagtcgtggagaggagattctaattcaacattcggcggcagagacctctggtgatgctggcgaaaaacctgatgtgttatcccaggagttggggatggaaggggagaaatcatccgctgaagaccagatgagaatgaaatgggaaagcctacatcaagaatttagtaccaagcagaaactactacagaatgttctggaacaggaacaagagcaagtgctttatagcaggccaaatcgactcttgtctggtgtgccactgtacaaaggggacgtgccaacccaagataaatctgcagttacatctttgctggatggactgaaccaagccttcgaggaggtttcatcccagagtggaggggcaaagaggcagagtatacacttggagcagaagttgtatgatggagtctcagccacctctacttggttggatgacgttgaagaacgtttatttgttgccacagcacttttaccagaagaaacagagacttgtctcttcaaccaagagattcttgccaaagacattaaggaaatgtctgaagaaatggataagaacaaaaacttgttttcccaagcttttccagagaatggtgataatcgagatgttattgaagatactttgggttgtcttttgggcaggttatccttgctagactcagtagtgaatcaacgatgtcatcagatgaaagaaagacttcagcaaatactaaatttccagaatgatctgaaagtgctgtttacatcactggctgacaacaaatacatcattctgcaaaaactggcaaatgtgtttgaacagcccgtagcagaacaaatagaggcaatacaacaggctgaagatggactcaaagaatttgatgcaggaatcattgaattaaagaggcgtggtgacaagctacaggtcgagcagccgtccatgcaagaactctccaagctccaggacatgtatgatgagctgatgatgatcattggctcccggaggagtggtctgaatcagaaccttacactcaagagtcagtatgagagggccctacaagatctggctgacctgctagaaactggtcaggagaagatggcaggagaccagaaaatcatcgtgtcttccaaagaggaaatccagcaactacttgacaaacataaggaatactttcagggcctggaatctcatatgatcttgactgaaacactcttcagaaagataatcagctttgcagtccaaaaggaaacccagttccatacagagctgatggctcaggcttctgctgtactgaaacgggctcacaagaggggtgtggagctggagtacattctagagacgtggtcccatctggatgaggaccagcaggagctcagcagacagctggaggtggtggaaagcagcatcccaagcgtgggtctggtggaggagaacgaggacaggcttattgaccgcataacactctaccagcatttaaaatctagccttaatgaataccagcccaaattatatcaagtattagatgatgggaaacgacttctgatatccatcagctgctcagatctagaaagccaactaaatcaacttggagagtgctggctaagtaacaccaataaaatgtctaaggaacttcacagactggaaacaatattgaaacactggaccagatatcaaagtgaatctgcagatctaattcactggttacaatctgcaaaagaccggctagaattttggactcagcaatctgtgacagtcccacaagagctggaaatggtccgtgatcatctaaatgctttcctggagttttctaaagaagtggatgcccaatcttccctgaaatcatctgttctgagtactggaaatcagctccttcgactaaaaaaggtggacacagccacgctgcgctctgagctgtcgcgcattgatagccagtggactgacctgctaaccaatatcccagccgtccaggagaagctccaccagctccagatggataaactgccttcccgccatgccatttctgaagtcatgagttggatttctctaatggaaaatgttattcagaaggatgaagataatattaaaaattccataggttacaaggcaattcatgaataccttcagaaatataagggttttaagatagacattaactgtaaacagctgacagtggattttgtgaaccagtccgtgctacaaatcagcagtcaggatgtggaaagtaagcgtagtgataagactgattttgctgagcaacttggagcaatgaataaaagttggcaaattctgcaaggtctagtaactgagaagatccagctgttggaaggcttattggaatcttggtcagaatatgaaaataatgtacaatgtctgaaaacatggtttgaaacccaggaaaagagactaaaacaacagcatcgaattggagatcaggcttctgttcaaaatgcactgaaagactgtcaggatctggaagatttgattaaagcaaaagaaaaagaagtagagaaaattgagcagaatggacttgctttgattcagaacaagaaagaagacgtctctagcattgtcatgagcacactgcgagagctcggccaaacctgggcaaatttagatcacatggttggacaattaaagatactgctgaaatcagtgcttgaccaatggagtagtcacaaagtggcctttgacaagataaacagttacctcatggaggccagatactctctttcccgattccgtctgctgactggctccttagaagctgtgcaagttcaggtggacaatcttcagaatctccaagatgatctggaaaaacaggaaaggagcttacagaaatttggctctatcaccaaccaattattaaaagagtgtcacccacccgtgacagaaactcttaccaatacactgaaagaagtcaacatgagatggaataacttgctggaagagattgctgagcagctacagtccagcaaggccctacttcagctttggcaaagatacaaggactactccaaacagtgtgcttcgacagttcagcagcaggaggatcgaaccaatgagctgttgaaggcagccacaaacaaggacattgccgatgatgaggttgccacatggattcaagattgcaacgacctcctcaaaggactgggcacagttaaagattccctcttttttctccatgagctgggagagcaactgaagcaacaagtggatgcttccgcagcatcagctattcaatcggatcaactctctttgagtcaacacttgtgtgccctggagcaagctctctgcaaacagcagacttcattacaggctggagttcttgattatgaaacctttgccaagagtttagaagctttggaggcctggatagtggaagctgaagaaatactacaagggcaggaccctagccactcatctgacctctccacaatccaggaaaggatggaagaacttaagggacagatgttaaaattcagcagcatggctccagatttagaccgtctaaatgagcttggatataggttacccttgaatgataaggaaatcaaaagaatgcagaatctgaaccgccattggtctctgatctcctctcagactacagaaagattcagcaagttgcagtcatttttgctacaacatcagactttcttggaaaaatgtgaaacatggatggaattcctagttcagacagaacaaaagttagcagtagagatttcaggaaattatcagcaccttttggaacagcagagagcacacgagttgtttcaagccgagatgttcagtcgtcagcagattttgcactcaatcattattgatgggcaacgtcttctagaacaaggtcaagttgatgacagggatgaattcaacctgaaattgacactcctcagtaatcaatggcagggagtgattcgcagggcccagcagaggcgggggatcattgacagccagattcgccagtggcagcgctatagggagatggcagaaaagcttcgtaaatggttggttgaagtgtcctacctccccatgagtggtctcggaagtgttcctataccactgcaacaagcaaggaccctctttgatgaagtgcagttcaaagaaaaagtgtttctgcggcaacaaggcagctacatcctgactgtggaggctggcaagcaactccttctctcggcggacagtggcgctgaggccgccttgcaggccgaactcgctgaaatccaagagaaatggaaatcagccagcatgcggctggaagaacagaagaaaaaactagccttcttgttgaaagactgggaaaaatgtgagaaaggaatagcagattccctggagaaactacgaactttcaaaaagaagctttcgcagtctctcccggatcaccatgaagagctccatgcagaacaaatgcgttgcaaggaattagaaaatgcagttgggagctggacagatgacttgacccagttgagcctgctgaaggacaccctctctgcctatatcagtgctgatgatatctccattcttaatgaacgcgtagagcttctgcaaaggcagtgggaagaactatgccaccagctctccttaaggcggcagcaaataggtgaaagattgaatgaatgggcagtcttcagtgaaaagaacaaggaactctgtgagtggttgactcaaatggaaagcaaagtttctcagaatggagacattctcattgaagaaatgatagagaagctcaagaaggattatcaagaggaaattgctattgctcaagagaacaaaatacagctccaacaaatgggagaacgacttgctaaagccagccatgaaagcaaagcatctgagattgaatacaagctgggaaaggtcaacgaccggtggcagcatctcctggacctcattgcagccagggtgaagaagctgaaggagaccctggtagccgtgcagcagcttgataagaacatgagcagcctgaggacctggctcgctcacatcgagtcagagctggccaagccaatagtctacgattcctgtaactcggaagaaatacagagaaagcttaatgagcagcaggagcttcagagagacatagagaagcacagtacaggtgttgcatctgtcctcaacctgtgtgaagtcctgctgcacgactgtgacgcctgtgccactgatgccgagtgtgactctatacagcaggctacgagaaacctggaccggcggtggagaaacatttgtgctatgtccatggaaaggaggctgaaaatcgaagagacgtggcgattgtggcagaaatttctggatgactattcacgttttgaagattggctgaagtcttcagaaaggacagctgcttttcccagctcttctggggtgatctatacagttgccaaggaagaactaaagaaatttgaggctttccagcgacaggtccacgagtgcctgacgcagctggaactgatcaacaagcagtaccgccgcctggccagggagaaccgcactgattcagcatgtagcctcaaacagatggttcacgaaggcaaccagagatgggacaacctgcaaaagcgtgtcacctccatcttgcgcagactcaagcattttattggccagcgtgaggagtttgagactgcgcgggacagcattctggtctggctcacagagatggatctgcagctcactaatattgaacatttttctgagtgtgatgttcaagctaaaataaagcaactcaaggccttccagcaggaaatttcactgaaccacaataagattgagcagataattgcccaaggagaacagctgatagaaaagagtgagcccttggatgcagcgatcatcgaggaggaactagatgagctccgacggtactgccaggaggtcttcgggcgtgtggaaagataccataagaaactgatccgcctgcctctcccagacgatgagcacgacctctcagacagggagctggagctggaagactctgcagctctgtcggacctgcactggcacgaccgctctgcagacagcctgctttctccacagccttcctccaatctctccctctcgctcgctcagcccctccggagcgagcggtcaggacgagacaccccggctagtgtggactccatccccctggagtgggatcacgactatgacctcagtcgggacctggagtctgcaatgtccagagctctgccctctgaggatgaagaaggtcaggatgacaaagatttctacctccggggagctgttggcttatcaggggaccacagtgccctagagtcacagatccgacaactgggcaaagccctggatgatagccgttttcagatacagcaaaccgaaaatatcattcgcagcaaaactcccacggggccggagctagacaccagctacaaaggctacatgaaactgctgggcgaatgcagtagcagtatagactccgtgaagagactggagcacaaactgaaggaggaagaggagagccttcctggctttgttaacctgcatagtaccgaaacccaaacggctggtgtgattgaccgatgggagcttctccaggcccaggcattgagcaaggagttgaggatgaagcagaacctccagaagtggcagcagtttaactcagacttgaacagcatctgggcctggctgggggacacggaggaggagttggaacagctccagcgtctggaactcagcactgacatccagaccatcgagctccagatcaaaaagctcaaggagctccagaaagctgtggaccaccgcaaagccatcatcctctccatcaatctctgcagccctgagttcacccaggctgacagcaaggagagccgggacctgcaggatcgcttgtcgcagatgaatgggcgctgggaccgagtgtgctctctgctggaggagtggcggggcctgctgcaggatgccctgatgcagtgccagggtttccatgaaatgagccatggtttgcttcttatgctggagaacattgacagaaggaaaaatgaaattgtccctattgattctaaccttgatgcagagatacttcaggaccatcacaaacagcttatgcaaataaagcatgagctgttggaatcccaactcagagtagcctctttgcaagacatgtcttgccaactactggtgaatgctgaaggaacagactgtttagaagccaaagaaaaagtccatgttattggaaatcggctcaaacttctcttgaaggaggtcagtcgtcatatcaaggaactggagaagttattagacgtgtcaagtagtcagcaggatttgtcttcctggtcttctgctgatgaactggacacctcagggtctgtgagtcccacatcaggaaggagcaccccaaacagacagaaaacgccacgaggcaagtgtagtctctcacagcctggaccctctgtcagcagtccacatagcaggtccacaaaaggtggctccgattcctccctttctgagccagggccaggtcggtccggccgcggcttcctgttcagagtcctccgagcagctcttccccttcagcttctcctgctcctcctcatcgggcttgcctgccttgtaccaatgtcagaggaagactacagctgtgccctctccaacaactttgcccggtcattccaccccatgctcagatacacgaatggccctcctccactctgaactaagcagatgccatctgcagaagtgctggtagcataaggaggatcgggtcataagcaatcccaaactaccaacaagaggaccttgatcttggcgaaagccctcggtgtggcagctttagccctcctccagatcacatgtgtgcaaattatggcttcagaggtggaagataaacagtgacgggggaacaaacagacaacaagaaggtttggaagaaatctggtttgagactctgaaccttagcactaaggagattgagtaaggacctccaaagttccccggactcatgaattctgggcccttggcccattctgtgcacagccaaggacttcagtagaccatctgggcagctttcccatggtgctgctccaaccatcagataaatgaccctcccaagcaccatgtcagtgtcgtacaatctaccaaccaaccagtgctgaagagattttagaaccttgtaacatacaatttttaagagcttatatggcagcttcctttttaccttgttttcctttggggcatgatgttttaacctttgctttagaagcacaagctgtaaatctaaaaggcacttttttttagaggtataaagaaaaactagatgtaataaataagatcatggaaggctttatgtgaaaaaagttgaatgttatagtaaaaaaaaaaagatatttatgtatgtacagtttgctaaagccaagttttgtttgtattgatttctttgcatttattatagatattataaaata

SEQ ID NO: 385 - protein, 3321 aa, Homo sapiens
MELDAAVQKFLEQNGQLGKPLAKKIGKLTELHQQTIRQAENRLSKLNQAASHLEEYNEMLELILKWIEKAKVLAHGTIAWNSASQLREQYILHQTLLEESKEIDSELEAMTEKLQYLTSVYCTEKMSQQVAELGRETEELRQMIKIRLQNLQDAAKDMKKFEAELKKLQAALEQAQATLTSPEVGRLSLKEQLSHRQHLLSEMESLKPKVQAVQLCQSALRIPEDVVASLPLCHAALRLQEEASRLQHTAIQQCNIMQAAVVQYEQYEQEMKHLQQLIEGAHREIEDKPVATSNIQELQAQISRHEELAQKIKGYQEQIASLNSKCKMLTMKAKHATMLLTVTEVEGLAEGTEDLDGELLPTPSAHPSVVMMTAGRCHTLLSPVTEESGEEGTNSEISSPPACRSPSPVANTDASVNQDIAYYQALSAERLQTDAAKIHPSTSASQEFYEPGLEPSATAKLGDLQRSWETLKNVISEKQRTLYEALERQQKYQDSLQSISTKMEAIELKLSESPEPGRSPESQMAEHQALMDEILMLQDEINELQSSLAEELVSESCEADPAEQLALQSTLTVLAERMSTIRMKASGKRQLLEEKLNDQLEEQRQEQALQRYRCEADELDSWLLSTKATLDTALSPPKEPMDMEAQLMDCQNMLVEIEQKVVALSELSVHNENLLLEGKAHTKDEAEQLAGKLRRLKGSLLELQRALHDKQLNMQGTAQEKEESDVDLTATQSPGVQEWLAQARTTWTQQRQSSLQQQKELEQELAEQKSLLRSVASRGEEILIQHSAAETSGDAGEKPDVLSQELGMEGEKSSAEDQMRMKWESLHQEFSTKQKLLQNVLEQEQEQVLYSRPNRLLSGVPLYKGDVPTQDKSAVTSLLDGLNQAFEEVSSQSGGAKRQSIHLEQKLYDGVSATSTWLDDVEERLFVATALLPEETETCLFNQEILAKDIKEMSEEMDKNKNLFSQAFPENGDNRDVIEDTLGCLLGRLSLLDSVVNQRCHQMKERLQQILNFQNDLKVLFTSLADNKYIILQKLANVFEQPVAEQIEAIQQAEDGLKEFDAGIIELKRRGDKLQVEQPSMQELSKLQDMYDELMMIIGSRRSGLNQNLTLKSQYERALQDLADLLETGQEKMAGDQKIIVSSKEEIQQLLDKHKEYFQGLESHMILTETLFRKIISFAVQKETQFHTELMAQASAVLKRAHKRGVELEYILETWSHLDEDQQELSRQLEVVESSIPSVGLVEENEDRLIDRITLYQHLKSSLNEYQPKLYQVLDDGKRLLISISCSDLESQLNQLGECWLSNTNKMSKELHRLETILKHWTRYQSESADLIHWLQSAKDRLEFWTQQSVTVPQELEMVRDHLNAFLEFSKEVDAQSSLKSSVLSTGNQLLRLKKVDTATLRSELSRIDSQWTDLLTNIPAVQEKLHQLQMDKLPSRHAISEVMSWISLMENVIQKDEDNIKNSIGYKAIHEYLQKYKGFKIDINCKQLTVDFVNQSVLQISSQDVESKRSDKTDFAEQLGAMNKSWQILQGLVTEKIQLLEGLLESWSEYENNVQCLKTWFETQEKRLKQQHRIGDQASVQNALKDCQDLEDLIKAKEKEVEKIEQNGLALIQNKKEDVSSIVMSTLRELGQTWANLDHMVGQLKILLKSVLDQWSSHKVAFDKINSYLMEARYSLSRFRLLTGSLEAVQVQVDNLQNLQDDLEKQERSLQKFGSITNQLLKECHPPVTETLTNTLKEVNMRWNNLLEEIAEQLQSSKALLQLWQRYKDYSKQCASTVQQQEDRTNELLKAATNKDIADDEVATWIQDCNDLLKGLGTVKDSLFFLHELGEQLKQQVDASAASAIQSDQLSLSQHLCALEQALCKQQTSLQAGVLDYETFAKSLEALEAWIVEAEEILQGQDPSHSSDLSTIQERMEELKGQMLKFSSMAPDLDRLNELGYRLPLNDKEIKRMQNLNRHWSLISSQTTERFSKLQSFLLQHQTFLEKCETWMEFLVQTEQKLAVEISGNYQHLLEQQRAHELFQAEMFSRQQILHSIIIDGQRLLEQGQVDDRDEFNLKLTLLSNQWQGVIRRAQQRRGIIDSQIRQWQRYREMAEKLRKWLVEVSYLPMSGLGSVPIPLQQARTLFDEVQFKEKVFLRQQGSYILTVEAGKQLLLSADSGAEAALQAELAEIQEKWKSASMRLEEQKKKLAFLLKDWEKCEKGIADSLEKLRTFKKKLSQSLPDHHEELHAEQMRCKELENAVGSWTDDLTQLSLLKDTLSAYISADDISILNERVELLQRQWEELCHQLSLRRQQIGERLNEWAVFSEKNKELCEWLTQMESKVSQNGDILIEEMIEKLKKDYQEEIAIAQENKIQLQQMGERLAKASHESKASEIEYKLGKVNDRWQHLLDLIAARVKKLKETLVAVQQLDKNMSSLRTWLAHIESELAKPIVYDSCNSEEIQRKLNEQQELQRDIEKHSTGVASVLNLCEVLLHDCDACATDAECDSIQQATRNLDRRWRNICAMSMERRLKIEETWRLWQKFLDDYSRFEDWLKSSERTAAFPSSSGVIYTVAKEELKKFEAFQRQVHECLTQLELINKQYRRLARENRTDSACSLKQMVHEGNQRWDNLQKRVTSILRRLKHFIGQREEFETARDSILVWLTEMDLQLTNIEHFSECDVQAKIKQLKAFQQEISLNHNKIEQIIAQGEQLIEKSEPLDAAIIEEELDELRRYCQEVFGRVERYHKKLIRLPLPDDEHDLSDRELELEDSAALSDLHWHDRSADSLLSPQPSSNLSLSLAQPLRSERSGRDTPASVDSIPLEWDHDYDLSRDLESAMSRALPSEDEEGQDDKDFYLRGAVGLSGDHSALESQIRQLGKALDDSRFQIQQTENIIRSKTPTGPELDTSYKGYMKLLGECSSSIDSVKRLEHKLKEEEESLPGFVNLHSTETQTAGVIDRWELLQAQALSKELRMKQNLQKWQQFNSDLNSIWAWLGDTEEELEQLQRLELSTDIQTIELQIKKLKELQKAVDHRKAIILSINLCSPEFTQADSKESRDLQDRLSQMNGRWDRVCSLLEEWRGLLQDALMQCQGFHEMSHGLLLMLENIDRRKNEIVPIDSNLDAEILQDHHKQLMQIKHELLESQLRVASLQDMSCQLLVNAEGTDCLEAKEKVHVIGNRLKLLLKEVSRHIKELEKLLDVSSSQQDLSSWSSADELDTSGSVSPTSGRSTPNRQKTPRGKCSLSQPGPSVSSPHSRSTKGGSDSSLSEPGPGRSGRGFLFRVLRAALPLQLLLLLLIGLACLVPMSEEDYSCALSNNFARSFHPMLRYTNGPPPL

SEQ ID NO: 386 - DNA, 27436 bp, Homo sapiens
cggccgccggccgcagcgggctgagattgttgtcctctgtcaccagggcggctgggctcccgcagtcctgcagaccgcgcccgatcccggcgacagggcgggcggacagccgcgcatccccggggtcccgccgagcctgggcgcagagagccgggaggaagcgttcgctcgcttcgccttgctgctgggaaactgaacgaggccgagagagaaggttcttgagttcatgtaagaggacagtcttaaaacggaagaagaaaaagaagcagttcagtctttgggagagctgcctccttgttgagtgctgcaaaggcctggaattcatttatgacagaatagatctagaaaagtccaagcatgttttctagagtggtgtagccctgtgctgcctccagtgaagagtctcttggtgttggcttcgtgcttccggagggaccatggcaacctccagaggggcctcccggtgtcctcgggatatcgccaatgtgatgcagaggctgcaagatgagcaagagatagtacaaaaacgaactttcacaaaatggatcaactctcatctggccaagcggaaacctccaatggtggtggacgatctttttgaagacatgaaagatggtgttaaactgcttgcccttctggaggtcctgtctgggcagaaactgccttgtgaacaaggacgccggatgaagcgaatccatgctgtggctaacattggcacggcactcaagttcctcgaaggaagaaagtccatgcacagaggatcaccgattaaattagtcaacattaactccaccgatatagctgatggccgaccctcaatagttcttggattgatgtggaccattattctatatttccagattgaagagttgaccagcaacctgccccagctccagtctttgtccagcagcgcatcctccgtggacagcatagttagctctgagactcccagcccaccaagtaaacggaaggtgaccaccaagatccaaggaaatgctaagaaggctttattaaagtgggttcagtacacagctggcaagcagactggaatagaagtaaaagattttgggaagagttggagaagcggggttgcctttcattcagttattcatgccattcgaccggaattggtggacttggagacagtgaaaggcagatccaaccgagaaaatttggaggatgctttcactatcgccgaaacagaactggggatcccaagactgctagatcctgaagacgttgatgtggataaaccagatgagaaatctattatgacctatgtagcccagtttctgaaacattatcctgacatccacaatgcaagcactgatgggcaagaggatgatgaaatacttccaggtttcccatcttttgcaaattctgtacaaaattttaagagagaagacagagtaatttttaaggaaatgaaagtttggatagaacaatttgagagagatttgacaagagcacagatggtggaatcaaatttacaggataaatatcagtcatttaagcacttcagagttcaatatgaaatgaagaggaaacagattgaacatttaatacaaccattacacagagacggtaaattgtcacttgaccaagcattggtaaaacaatcttgggatagagtgacctccaggctctttgactggcatatacagcttgataaatctcttcctgcacctctgggcaccataggtgcctggctgtacagagcggaggtggccctgagagaggaaataaccgttcaacaggtccacgaggaaacagcaaacacgatacaacggaaacttgagcaacataaggatctgcttcaaaacacggatgcccacaaaagagcattccatgaaatctaccggaccaggtctgttaacgggattccagtgccacctgatcaattagaggacatggccgagaggtttcattttgtttcctccacatcagagctacacctaatgaaaatggaatttttagaattaaagtaccgtctgctctcactgctggttcttgcagagtcaaagctgaagtcttggatcattaagtacgggaggagagagtcagtggagcagcttctacaaaactacgtgtcttttatagaaaatagcaagttctttgaacaatatgaggtgacataccagatcttgaaacagacagctgagatgtatgtcaaagcagatggttcagtggaagaagctgagaatgtgatgaaattcatgaatgaaaccaccgctcagtggaggaatctctcagtagaagtgaggagtgtgaggagcatgctggaagaagtgatctctaactgggatcgctatggcaatacagtggctagtctgcaagcctggctagaggatgctgaaaaaatgctcaatcaatcagaaaatgccaaaaaggatttttttcgaaatttacctcattggattcagcagcatactgccatgaacgatgctggcaattttctaattgaaacctgtgatgagatggtttcccgtgacctgaagcagcaattactgttgctaaatgggcggtggagggagttgtttatggaagtcaagcaatatgctcaagctgatgagatggacagaatgaagaaggaatacacagactgtgttgttaccctgtctgcttttgcaacggaagcccataagaaactttctgaacccttagaagtctcttttatgaatgtcaagctattaattcaagacttggaggatattgagcagagggtgcctgtgatggatgcccaatacaagataattacaaagacagcacacctcattaccaaagaaagcccccaagaagaaggaaaagaaatgtttgcgaccatgtcaaagctcaaagagcagctaaccaaggtcaaagaatgttactccccactcctttatgagtctcagcagctgttgattccgttggaggaattagaaaagcagatgacgtccttttatgactcacttgggaaaatcaatgaaattatcacagttcttgagcgtgaggcacaatcgagtgccctttttaaacaaaaacatcaggaactgttagcttgtcaagaaaactgtaagaaaaccttgacacttattgagaaaggcagtcaaagtgttcaaaagtttgtgaccttgagcaacgtgttaaagcattttgatcagacgaggctacaaagacagattgcagatattcatgttgcttttcagagtatggtaaagaaaactggagattggaagaagcatgtggaaaccaacagtcgcttgatgaagaagtttgaggagtctcgagcagagttggagaaggtactgcggattgctcaggagggcctggaggaaaagggggatccagaggagctcctgcggagacacactgagtttttcagtcagctggatcagagggtgctcaatgctttcctgaaagcttgtgatgaactcaccgacatccttccagagcaggagcagcaggggctgcaggaagctgttcgaaagctccacaaacaatggaaggatcttcaaggagaagccccttatcatttgcttcatctgaagattgatgtggagaagaataggttcttagcctctgtagaagaatgcagaactgagctggatcgagagaccaagctgatgccccaggaaggcagtgaaaagataattaaagagcacagggttttcttcagtgacaaaggtcctcatcatctctgtgagaaaaggttacagctcatcgaggaactctgtgtgaaactcccagtgcgggacccagtaagggacacacctggaacctgtcacgtgactctcaaagagctcagagctgccattgacagcacctacaggaagctcatggaagacccagacaagtggaaggactacactagcagattctctgagttctcatcttggatatctacaaatgagacacaattaaaggggatcaagggtgaggccatcgatactgccaaccacggagaggttaaacgtgccgttgaagagatcagaaatggtgttaccaaaaggggtgagaccctcagctggctgaaatccaggctgaaagttttgacagaagtttcttctgagaatgaagcccaaaagcagggagatgagctggcaaaattatccagctctttcaaggctcttgtgacgctgctgtcagaggttgaaaagatgctaagcaattttggggactgtgtccagtacaaagaaatagtcaaaaattctctcgaagaattaatttctggctctaaagaagtccaggaacaagctgagaagatcttggatactgaaaatctgtttgaagcacagcagttacttcttcatcaccagcaaaagacaaagcggatctcagcaaagaagagagatgtgcagcagcagatcgcgcaggcgcagcagggagaaggggggctgcctgaccgaggccacgaggagctgcggaagctggagagcacactggatggcctggagcgcagccgggagaggcaggaacgccgcatccaggtcacattaagaaaatgggagcgatttgaaacaaacaaagaaacagtagtaagatacctttttcaaacaggttccagtcatgaacgcttcttgagttttagcagtttggaaagtttatcttcagaactggaacaaacaaaggagttttctaaacggacagaaagtattgcagtccaggctgagaaccttgtaaaggaagcttcagagataccgcttgggccccaaaataagcagctgcttcaacagcaggccaagtcaatcaaagaacaagtcaaaaaattagaagacacgcttgaagaagatattaaaaccatggaaatggtgaaaaccaagtgggatcattttggcagtaattttgagactctgtccgtctggataactgagaaagaaaaagaactcaatgccttggaaacttcgtcatctgccatggacatgcaaatcagccaaattaaggtcacaattcaggaaatagaaagtaagctcagcagcattgtaggattagaagaagaagcccagtcttttgctcagtttgttaccactggagaatctgctcgaattaaagccaagttgacacaaataagaagatacggggaagagcttcgagagcatgcacagtgtctggaaggaacaatcctgggacatttatctcagcagcaaaagtttgaagagaaccttagaaagatccagcaatctgtgtctgaatttgaagataaacttgctgttccaattaaaatatgttcttcagctacagaaacatacaaagttcttcaagaacatatggatctctgccaggccctggagtcactgagcagcgcgatcactgccttctcagccagtgccaggaaggttgtgaacagagattcctgtgttcaggaggctgcggctctacagcagcaatacgaggacatcctaaggagggcgaaggagagacagacggcgctggagaatctgctggcccactggcagaggctagagaaagaactatcatcctttttgacctggttagagcggggtgaagctaaagccagttccccagaaatggacatttctgcagacagagtcaaagtggaaggtgaacttcagttaatacaggcactgcaaaatgaagttgtatcccaggcctcattctatagcaaacttttgcaattgaaggaatcattgttctcagtagcctccaaagatgatgtgaaaatgatgaaactacatttggagcagttggatgagagatggagagatttaccacagatcattaacaaaaggattaattttcttcagtctgtggttgctgaacaccagcaatttgatgagctgctgctttccttttctgtctggattaaactgtttctcagtgaattacaaactacctctgagattagcataatggaccatcaagtagcccttactcggcataaggaccacgcagcagaagtagagagcaaaaagggcgaattgcagagtctgcagggtcacttagcaaagttgggttctctgggccgtgctgaggacctccacctcctgcagggaaaggctgaggactgcttccagctgtttgaggaggccagccaggttgtggagaggcggcagcttgccctgtcccatttggcagaattcctccagagccatgcctctctgtccggcattctccgccagctgaggcaaacagtggaagcaaccaacagtatgaataagaacgagtctgatttgatagaaaaggacctcaatgatgctcttcaaaatgctaaagcattagaatctgctgccgtcagtctggatggcattctttccaaagcccaataccatctgaaaatcgggagctctgagcaaaggacttcctgcagagccacggctgatcagctctgtggagaggtagagaggatccagaaccttctgggaaccaagcagagtgaggcagatgctctggcagtgttgaaaaaagcattccaagaccagaaagaggagcttctgaaaagcattgaggacattgaagaaaggactgacaaagagcgattgaaagaacctacccgccaagctcttcagcagaggttaagagtgtttaatcagctagaagatgaattgaattctcacgagcatgaactatgttggttgaaagacaaagccaagcaaattgcccagaaagatgtagcttttgcacctgaagttgacagggagataaaccgcttagaggtcacctgggatgataccaaaagactaattcatgaaaatcagggtcagtgctgtggacttattgacttaatgagagaatatcagaacctgaaatcagctgtatctaaagtcttagaaaatgccagcagtgtgattgtaaccagaactaccataaaagatcaggaggatcttaaatgggctttttccaagcatgaaactgccaagaacaaaatgaattacaaacagaaagacttggataactttaccagcaaaggaaaacacttgttatctgagctgaagaaaattcacagtagtgatttcagcttggtgaaaacagacatggagagcaccgtggacaaatggctggatgtatcagagaaacttgaagaaaacatggataggctgagagtaagcctgtccatttgggatgatgtactgtcaactagagatgagattgagggatggtcaaacaactgcgttccacagatggcagaaaacatcagcaacctggataaccacctcagagctgaagaactgcttaaagaatttgagtctgaagttaaaaacaaagcattgagattggaagaactgcattccaaagttaatgatctgaaagaattaactaaaaatctagaaacaccgccagaccttcagtttatagaagcagacttaatgcagaaactggagcatgccaaagaaataactgaagtagcaaaaggaaccctgaaggatttcacggctcaaagtacacaagtggagaagtttattaatgacataacaacatggttcacaaaagtggaagaatcgttgatgaactgtgcccaaaatgagacttgtgaagcattgaaaaaagtcaaggatatacaaaaagaacttcaaagtcaacaaagcaacatcagctctacccaagaaaatctcaatagcttgtgccgcaagtaccactcagctgagttggagagcctgggccgtgcaatgactggtctgataaagaaacatgaagccgtgagccagttgtgctccaaaacccaggccagcctgcaggaatctctggaaaaacacttcagtgagtctatgcaggaattccaagaatggtttttgggagcaaaggcagcagcaaaagaatcatcagatcgcaccggtgacagcaaagttctagaagcaaagctccatgatcttcagaacattttggactcagtcagtgatgggcagagcaaacttgatgcagtgactcaagaaggacaaactttgtatgcacatttgtctaaacaaattgtcagtagcattcaagaacaaatcacaaaggccaatgaagagtttcaagcatttctgaaacaatgccttaaagataagcaggctcttcaagactgtgcttcagaacttggaagctttgaagatcagcacagaaaactgaacttatggatccatgaaatggaagaaaggttcaatacggaaaacttgggagagagtaaacagcacattcctgagaagaaaaatgaagttcataaagttgaaatgtttttgggagaactgctggctgcaagagagtctcttgataagctttcccagagagggcagcttctgagtgaagaaggccacggtgctgggcaggagggccgcctgtgttcccagctcctcacaagccaccagaacctacttagaatgaccaaagagaaactccggagctgccaggtggcccttcaggagcacgaagccctggaggaagcactgcaaagcatgtggttctgggtgaaggccattcaggacagactggcctgtgcagagagcactcttgggagcaaagacaccctggagaaacggctgtcacaaatacaggatattctcctgatgaaaggtgaaggggaagttaagttgaatatggccattggcaagggggaacaggccttgagaagtagcaacaaagaaggtcagagggtgattcagactcagttagagacccttaaagaagtgtgggctgacatcatgagctcctccgtccacgctcaaagcactttagagtctgtgattagccaatggaatgactatgtagagaggaaaaaccagttggagcagtggatggaatcagtggatcaaaaaatagaacatcccttacaaccacagccaggtctgaaagagaagttcgtcctgcttgaccacctccagtccatcctgtctgaggcagaagatcacacgagagcccttcaccgtctaattgcgaagtccagggagctctacgaaaagacagaggatgagtctttcaaggacacagctcaagaggagctgaaaacacagtttaatgatataatgactgttgccaaggaaaaaatgaggaaagtggaagagattgtgaaagatcatctaatgtatttagatgcggtccacgagttcacagattggctccattcagcaaaggaagaacttcaccggtggtcagatatgtctggagattcatcagccacccagaaaaagttatcaaaaattaaggagctgatagattccagagagattggtgcaagccgtctcagcagagtggagtcgctggctcccgaagtgaaacagaacacaactgccagtgggtgtgagctcatgcacacggagatgcaggccctgcgtgccgactggaagcagtgggaagacagtgtattccaaacgcagagctgtttggagaacctggtcagccagatggccctttcggagcaggaattctcaggccaagtggctcaactggagcaggccctggaacagttcagtgcccttctgaaaacctgggctcagcagttaaccctcctggaaggcaagaacacggatgaggagatagtggaatgctggcacaaaggacaagagatactggatgctttgcaaaaagcagagcctagaacagaggatctcaagtctcagctgaatgaactttgtcgattttccagagacctgagtacctacagtggaaaagtttctggcttgattaaagagtataattgtctttgtttgcaagcatccaagggctgccagaataaagaacagattttacagcaaagatttcgaaaggccttcagggatttccagcagtggttggttaatgcaaaaatcactaccgccaagtgttttgatatacctcaaaatataagtgaagtttcaactagtcttcagaaaatacaggagtttttgtcagaaagtgaaaatggacagcacaagctaaacatgatgctgtctaaaggggaacttctgagtaccctgctgaccaaagagaaagcgaaagggatccaggccaaagttacagctgcaaaagaagattggaaaaattttcattcaaatctccaccaaaaagaatctgctctagagaatctaaagatccaaatgaaggactttgaagtaagtgctgagcctatccaggactggctgagtaaaactgagaagatggtccatgaaagcagcaatcgcctctatgatctgccagcaaagaggagggagcagcagaagctccagtctgtccttgaggaaatacactgctacgagcctcagctcaacaggctgaaagagaaagctcagcagctgtgggaaggacaagctgccagcaagagctttaggcacagagtgtcgcagctgtcttctcagtatctagcgctaagcaatttaacaaaggagaaagtgtcaagactggatagaatcgttgcagaacacaatcagttctctcttgggattaaagaattacaagactggatgacggatgcgattcacatgctggattcatactgccacccgacatccgacaaaagtgtgctggacagcaggacgctcaagctcgaggctctattatcagtcaaacaggaaaaagagattcagatgaaaatgatagtgaccaggggagaatctgtccttcagaatacttctccagaaggcattcccactattcagcagcagctgcagagtgtgaaggatatgtgggcatcccttttgtctgcagggattcgttgtaaaagccaactcgaaggagctctctccaagtggacaagttatcaggatggcgttcgacagttctccggttggatggatagtatggaagccaacctgaatgaatcagaaaggcagcatgcggagctgcgggataaaacaacgatgctcggaaaagccaagttattaaatgaagaagtgctgagttacagcagcttgctggagaccatcgaagtcaaaggggctggcatgacagaacactatgtcacccagctagaactccaggatctacaggaacgatacagagccatccaagagagggccaaggaagccgtaaccaagtctgaaaaacttgtccgcctgcaccaagagtatcagagagacctaaaggcatttgaagtttggttggggcaagaacaagaaaagctcgaccagtattcagttcttgaaggtgatgcccacactcatgagacaacattgcgtgatcttcaggagctacaggtacactgtgcagaggggcaggccctgttgaactcagtgctgcacaccagagaggatgtgatcccatcaggtatcccacaggcagaggaccgggctttagagtctctccggcaagactggcaggcttaccagcacaggctgtccgagactcgaactcagttcaataacgtggtgaacaaattgaggctaatggagcaaaagtttcagcaagtagatgaatggctcaaaacagcagaggagaaaaagtggcacgaagaagtgactgcatacagagatgaagttgaggaagtgggagctagagctcaggagatactggacgagagccacgtgaacagcagaatgggttgccaggccacccagctgacttccagataccaggccctgcttctccaagtgctggaacaaataaaattcctggaggaggagattcagagtttggaggaatcagaatcatccctcagttcctattctgattggtatggctctactcataaaaacttcaagaatgtggctaccaagattgacaaagtagatacagtaatgatggggaagaaattgaagacgttggaggttttgctcaaagacatggagaaaggtcacagtttgctgaaatcagcccgggagaaaggagagagggctgttaaatacttggaggaaggcgaggcagagaggttaagaaaggagattcatgatcacatggagcagttgaaggaactgaccagcactgtccggaaagaacacatgacgctggaaaaaggtcttcatttagcaaaggaattctcagataaatgcaaagcactgacacagtggatagcagaataccaggaaattctacatgttcctgaagaacccaaaatggaattatatgagaaaaaagctcagttatctaaatacaagtcacttcaacaaacggtgctgtcccatgaaccatcagtaaagtcagtgagagagaagggtgaagctcttttggaactggtgcaggacgtcactttaaaggacaaaatagatcaacttcaaagtgattaccaggacctgtgcagcataggaaaggcaatgatggaagaaattgctggttttgaagaccgtttgaacaatcttcaaatgaaaggtgatactttgattggccaatgtgcagaccacctgcaagcgaaacttaaacaaaacgtgcatgctcatctgcagggcacaaaggacagctactcagcgatctgcagcacagctcagaggatgtaccagagtttggaacacgaacttcagaagcacgtcagccgacaagacaccctgcagcagtgccaggcctggctttctgcagtccagccggatttagagccaagtcctcaaccacctcttagtagggcagaagccattaagcaggtcaaacacttcagagctttgcaagagcaggcaaggacctacctagatctcctttgctccatgtgtgacctgtcaaatgcttcggtgaaaaccacagcaaaagacattcaacaaacagagcaaacgattgaacaaaagcttgtccaggcccagaacttaactcagggctgggaagagatcaagcacctgaagtctgagctctggatttacctgcaagatgctgatcagcaactgcagaacatgaagaggaggcactctgagctggagctgaacattgcacagaacatggtttcacaagttaaggattttgttaagaaactacagagcaaacaggcatccgtgaacaccataatagaaaaggtgaataagttaacaaagaaggaggaatcgcctgaacacaaggaaataaatcatttaaatgatcagtggctcgatttgtgccgtcagtctaacaacctgtgcttgcaaagggaagaggatcttcagagaacaagagattaccatgactgtatgaatgttgttgaagtgttcctagaaaaatttactacagaatgggataacttggccagatctgatgcagagagtacagctgtccacctggaagctttgaaaaagttagcattggcattgcaggagagaaagtatgctattgaagatctgaaagatcaaaagcagaaaatgatagagcatctgaatttagatgacaaggagttagtcaaagaacagacgagtcatttagagcaacgttggtttcagcttgaggacctcattaaaaggaaaatccaagtgtcagtcaccaacttggaggagttaaatgtggtgcagtccagatttcaggagctaatggagtgggcagaagagcaacaacccaacatcgccgaggcccttaagcagagccctcctccagatatggctcagaaccttctcatggatcacctggccatctgcagtgaactggaggccaagcagatgctcctgaaatcgcttataaaggacgcagacagggtcatggcagatcttggtctcaatgagcgacaggtcatccagaaggctctctctgatgcacaaagccacgtgaattgtctcagtgacttagtgggccagcgaagaaagtacttaaacaaagccttgtccgagaaaacccagtttctcatggcagtgttccaggccaccagccaaattcagcaacatgagcgaaagataatgttccgtgaacacatctgtctgttaccagatgatgtgagcaaacaagtcaaaacatgtaagagtgcacaagccagcctcaagacttaccaaaatgaagtcactggactttgggcccagggtcgcgaactaatgaaggaagtcacagagcaggaaaagagtgaagtgctggggaagcttcaggaattgcagagtgtctatgacagtgttttacaaaagtgcagtcaccggttacaagaactagagaagaatttggtttctaggaagcattttaaggaagattttgataaagcttgccactggctaaaacaagcagatattgttacatttcctgaaatcaacctaatgaatgagagttctgagcttcatacacaactggctaaataccaaaacattcttgaacaatctccagaatatgaaaatcttctacttacgctgcagagaactgggcagaccatattaccatcgctgaatgaagtcgatcattcctacctcagtgaaaagctaaatgctttgcctcgacaatttaatgtaattgttgccttggctaaagacaagttctataaagtccaggaagcaattcttgctcggaaggaatatgcttccttgattgagttgacaacccagtctctgagtgaacttgaagcccaattcttgaggatgagcaaagttcccaccgacctggccgttgaggaggctctttctctgcaagatggttgcagagccattctggacgaggtggcgggccttggggaggcggtggatgaactgaaccagaaaaaagaaggttttcgcagcacaggtcagccttggcagccagacaagatgctgcaccttgtcaccttatatcacaggctgaagcgacaaacagaacagagggttagcttattagaagacaccaccagtgcttaccaagaacacgagaagatgtgccaacagctggagagacaactgaagtctgtaaaagaggagcagtccaaagtgaatgaggaaacgctgcctgcagaggagaagctcaaaatgtatcactccctggcaggaagtctccaggactcagggattgtactgaaacgagtaaccatacatcttgaagatcttgccccacaccttgaccccttggcttatgagaaagccaggcatcagatccagtcctggcaaggggagttaaaactgttgacttctgccattggtgagacggtgacagaatgtgagagccgaatggtgcagagtatagacttccagactgagatgagtcgctccctggactggctgaggagagtgaaggcagagctcagtgggccggtgtacctagacctcaacctgcaggacatccaagaggaaatcagaaaaatccaaattcatcaggaagaggtccagtccagcttgagaatcatgaatgcgctgagtcacaaggaaaaggagaagttcacaaaggccaaggagctgatttctgcggatttagaacacagcctcgctgagctctcagagctggatggagacatccaggaagccttacgcaccagacaggctaccttgactgaaatatatagccagtgtcaaaggtattatcaggtatttcaagcagccaatgactggcttgaggatgcccaagaattgttacagctggcaggcaatggcctagacgtggagagcgcagaggaaaatctcaaaagccacatggaatttttcagtacagaggatcagttccatagtaacctggaggagctccacagcctggtagccaccctggacccactcatcaagccaaccggcaaagaagacctagaacagaaagtggcttctctggaactcaggagccagaggatgagccgggactctggtgcccaagtggatctcttgcagagatgcacagctcaatggcacgattaccagaaagcaagggaagaggttattgaattgatgaatgatacagaaaagaaattgtctgagttttctttgttgaagacttcgtctagtcatgaagcggaagaaaaattgtcagaacacaaggctttagtgtcagtggttaactctttccatgagaaaattgtggcccttgaggaaaaagcttcacaactggagaaaaccggaaatgatgccagcaaagccaccctgagcaggtcaatgaccaccgtctggcagcgctggacacgccttcgagctgtggcccaggaccaggagaagatcctggaagatgcagtggatgagtggacgggctttaacaacaaggttaaaaaggccactgaaatgattgatcagctgcaagataagttacctggaagttcagcagagaaagcatcgaaagcagagctcttaactcttcttgaataccacgacacgttcgttctggagctggagcagcagcagtcggccttgggcatgctgcggcagcaaaccctgagcatgctccaggatggagccgccccaacccctggggaagagcctccgctcatgcaggaaatcaccgccatgcaagatcggtgcctgaacatgcaggagaaagtgaagactaatggaaagttggtgaagcaagagctgaaggaccgagaaatggtggagactcagatcaattctgtgaaatgttgggttcaggaaacgaaagaatatttagggaatccaacaatagaaatagatgctcaacttgaagaacttcagattctcctaacagaagccacaaatcaccgacagaacattgaaaaaatggcagaagaacagaaggagaagtacttaggtctttataccatattaccttctgaactctcccttcagttggctgaagtggcgttagatctaaagatccgagatcagatccaagacaaaataaaagaagttgagcagagcaaggccacgagccaggaactcagccggcaaattcagaagttagctaaagacctcacaactattctaactaagctgaaagcgaagacagataatgtagttcaagctaaaactgaccaaaaggtgctgggagaggaattagatggctgtaattcaaagttaatggaattagatgcagcagtacagaaattcttggaacagaatggccaactgggtaagccactggccaagaagataggaaaactgactgaacttcaccagcagaccattagacaagctgagaatcggctctccaagctcaatcaggcagcatcacatttagaagaatacaatgaaatgcttgaattaattttgaagtggattgaaaaagctaaagtcttggctcatggaactattgcatggaattctgcaagccagcttcgggaacaatatattttgcatcagaccctgctagaagaatccaaagaaattgacagtgagctggaagcaatgactgagaaattacagtacctcactagcgtgtactgtacagaaaaaatgtctcagcaagtggcagaactgggacgggagactgaggagttgcgacagatgatcaaaattcgtttgcagaacctccaagatgcagctaaggatatgaaaaaatttgaagcagagttgaaaaagttacaagctgccttggagcaagcccaggcaacactgacttctccagaagttggacgtctcagtctcaaggagcagctctctcatcggcagcatttgttgtctgagatggagtcactgaagccgaaggtgcaagcagtgcagctctgccagagtgccctccggatccccgaggatgtggttgccagcttacctctctgtcatgctgctctgcggctgcaggaagaggccagccggctgcagcacaccgccatccagcagtgtaacatcatgcaggcagctgtggtacaatatgaacaatatgagcaagaaatgaaacatctccagcaactgatagaaggagctcacagagagattgaggataaacctgttgccaccagtaacatacaggagctgcaggctcagatttctcggcatgaggagctggcgcagaaaattaagggctaccaggagcagatcgcttctttgaattccaagtgcaagatgctgacgatgaaagccaagcacgccaccatgctgctgacggtgaccgaggtcgaggggctggcggaagggacagaggacctggatggggagctcctccccacgccttcggcccacccctctgtggtcatgatgactgcaggtcgctgtcacactttgctgtcaccggtcactgaggagtctggggaggagggaaccaacagtgagatttcctctccacctgcctgtcgctccccttcacctgtggctaatacagatgcttctgttaaccaggacattgcatattaccaagccttgtctgctgagaggttgcagacagatgctgcaaaaattcaccccagcacatccgcatcccaggagttctatgaaccgggattggagccatccgctactgccaaactgggtgatttgcagcgttcttgggaaaccttaaagaatgtgatcagtgagaagcagcgcacactctatgaagctttggaacgccagcagaagtaccaggactccctccagtccatctctacgaagatggaggccattgagctgaaactcagtgagagcccagagcctggcaggagtccagaaagccagatggctgaacatcaggcattgatggatgagattctcatgctccaggatgaaatcaatgagctccagtcctctctcgcagaggagctggtatccgagtcttgtgaggccgaccctgcggagcagctggccttgcagtccacgctcactgtcttagccgagcgaatgtccaccatcaggatgaaagcctcggggaaacggcagcttttggaggagaagttgaatgatcagctggaggaacaaaggcaggaacaggccctgcagaggtatcgctgtgaagccgatgagctggacagctggctcttgagtaccaaggccactctggacactgcgctgagtccacccaaggagcccatggacatggaggcccagcttatggactgccagaatatgctggtggaaatagagcagaaggtggtggctttatcagaactgtcagtccacaatgagaacctgctgctggagggcaaagctcacaccaaggacgaggccgagcagctggctggaaagctgagaaggctcaaggggagcctgctggagctgcagagagccctgcatgataagcagctcaacatgcagggaacagcacaggagaaggaggagagcgatgttgacctaacagccacgcagagccccggcgtccaggaatggctggcccaagctcgcaccacatggacccagcagcggcagagcagtctccagcaacaaaaagagttagaacaggaattagccgagcagaagagtctccttcgctcagtagccagtcgtggagaggagattctaattcaacattcggcggcagagacctctggtgatgctggcgaaaaacctgatgtgttatcccaggagttggggatggaaggggagaaatcatccgctgaagaccagatgagaatgaaatgggaaagcctacatcaagaatttagtaccaagcagaaactactacagaatgttctggaacaggaacaagagcaagtgctttatagcaggccaaatcgactcttgtctggtgtgccactgtacaaaggggacgtgccaacccaagataaatctgcagttacatctttgctggatggactgaaccaagccttcgaggaggtttcatcccagagtggaggggcaaagaggcagagtatacacttggagcagaagttgtatgatggagtctcagccacctctacttggttggatgacgttgaagaacgtttatttgttgccacagcacttttaccagaagaaacagagacttgtctcttcaaccaagagattcttgccaaagacattaaggaaatgtctgaagaaatggataagaacaaaaacttgttttcccaagcttttccagagaatggtgataatcgagatgttattgaagatactttgggttgtcttttgggcaggttatccttgctagactcagtagtgaatcaacgatgtcatcagatgaaagaaagacttcagcaaatactaaatttccagaatgatctgaaagtgctgtttacatcactggctgacaacaaatacatcattctgcaaaaactggcaaatgtgtttgaacagcccgtagcagaacaaatagaggcaatacaacaggctgaagatggactcaaagaatttgatgcaggaatcattgaattaaagaggcgtggtgacaagctacaggtcgagcagccgtccatgcaagaactctccaagctccaggacatgtatgatgagctgatgatgatcattggctcccggaggagtggtctgaatcagaaccttacactcaagagtcagtatgagagggccctacaagatctggctgacctgctagaaactggtcaggagaagatggcaggagaccagaaaatcatcgtgtcttccaaagaggaaatccagcaactacttgacaaacataaggaatactttcagggcctggaatctcatatgatcttgactgaaacactcttcagaaagataatcagctttgcagtccaaaaggaaacccagttccatacagagctgatggctcaggcttctgctgtactgaaacgggctcacaagaggggtgtggagctggagtacattctagagacgtggtcccatctggatgaggaccagcaggagctcagcagacagctggaggtggtggaaagcagcatcccaagcgtgggtctggtggaggagaacgaggacaggcttattgaccgcataacactctaccagcatttaaaatctagccttaatgaataccagcccaaattatatcaagtattagatgatgggaaacgacttctgatatccatcagctgctcagatctagaaagccaactaaatcaacttggagagtgctggctaagtaacaccaataaaatgtctaaggaacttcacagactggaaacaatattgaaacactggaccagatatcaaagtgaatctgcagatctaattcactggttacaatctgcaaaagaccggctagaattttggactcagcaatctgtgacagtcccacaagagctggaaatggtccgtgatcatctaaatgctttcctggagttttctaaagaagtggatgcccaatcttccctgaaatcatctgttctgagtactggaaatcagctccttcgactaaaaaaggtggacacagccacgctgcgctctgagctgtcgcgcattgatagccagtggactgacctgctaaccaatatcccagccgtccaggagaagctccaccagctccagatggataaactgccttcccgccatgccatttctgaagtcatgagttggatttctctaatggaaaatgttattcagaaggatgaagataatattaaaaattccataggttacaaggcaattcatgaataccttcagaaatataagggttttaagatagacattaactgtaaacagctgacagtggattttgtgaaccagtccgtgctacaaatcagcagtcaggatgtggaaagtaagcgtagtgataagactgattttgctgagcaacttggagcaatgaataaaagttggcaaattctgcaaggtctagtaactgagaagatccagctgttggaaggcttattggaatcttggtcagaatatgaaaataatgtacaatgtctgaaaacatggtttgaaacccaggaaaagagactaaaacaacagcatcgaattggagatcaggcttctgttcaaaatgcactgaaagactgtcaggatctggaagatttgattaaagcaaaagaaaaagaagtagagaaaattgagcagaatggacttgctttgattcagaacaagaaagaagacgtctctagcattgtcatgagcacactgcgagagctcggccaaacctgggcaaatttagatcacatggttggacaattaaagatactgctgaaatcagtgcttgaccaatggagtagtcacaaagtggcctttgacaagataaacagttacctcatggaggccagatactctctttcccgattccgtctgctgactggctccttagaagctgtgcaagttcaggtggacaatcttcagaatctccaagatgatctggaaaaacaggaaaggagcttacagaaatttggctctatcaccaaccaattattaaaagagtgtcacccacccgtgacagaaactcttaccaatacactgaaagaagtcaacatgagatggaataacttgctggaagagattgctgagcagctacagtccagcaaggccctacttcagctttggcaaagatacaaggactactccaaacagtgtgcttcgacagttcagcagcaggaggatcgaaccaatgagctgttgaaggcagccacaaacaaggacattgccgatgatgaggttgccacatggattcaagattgcaacgacctcctcaaaggactgggcacagttaaagattccctcttttttctccatgagctgggagagcaactgaagcaacaagtggatgcttccgcagcatcagctattcaatcggatcaactctctttgagtcaacacttgtgtgccctggagcaagctctctgcaaacagcagacttcattacaggctggagttcttgattatgaaacctttgccaagagtttagaagctttggaggcctggatagtggaagctgaagaaatactacaagggcaggaccctagccactcatctgacctctccacaatccaggaaaggatggaagaacttaagggacagatgttaaaattcagcagcatggctccagatttagaccgtctaaatgagcttggatataggttacccttgaatgataaggaaatcaaaagaatgcagaatctgaaccgccattggtctctgatctcctctcagactacagaaagattcagcaagttgcagtcatttttgctacaacatcagactttcttggaaaaatgtgaaacatggatggaattcctagttcagacagaacaaaagttagcagtagagatttcaggaaattatcagcaccttttggaacagcagagagcacacgagttgtttcaagccgagatgttcagtcgtcagcagattttgcactcaatcattattgatgggcaacgtcttctagaacaaggtcaagttgatgacagggatgaattcaacctgaaattgacactcctcagtaatcaatggcagggagtgattcgcagggcccagcagaggcgggggatcattgacagccagattcgccagtggcagcgctatagggagatggcagaaaagcttcgtaaatggttggttgaagtgtcctacctccccatgagtggtctcggaagtgttcctataccactgcaacaagcaaggaccctctttgatgaagtgcagttcaaagaaaaagtgtttctgcggcaacaaggcagctacatcctgactgtggaggctggcaagcaactccttctctcggcggacagtggcgctgaggccgccttgcaggccgaactcgctgaaatccaagagaaatggaaatcagccagcatgcggctggaagaacagaagaaaaaactagccttcttgttgaaagactgggaaaaatgtgagaaaggaatagcagattccctggagaaactacgaactttcaaaaagaagctttcgcagtctctcccggatcaccatgaagagctccatgcagaacaaatgcgttgcaaggaattagaaaatgcagttgggagctggacagatgacttgacccagttgagcctgctgaaggacaccctctctgcctatatcagtgctgatgatatctccattcttaatgaacgcgtagagcttctgcaaaggcagtgggaagaactatgccaccagctctccttaaggcggcagcaaataggtgaaagattgaatgaatgggcagtcttcagtgaaaagaacaaggaactctgtgagtggttgactcaaatggaaagcaaagtttctcagaatggagacattctcattgaagaaatgatagagaagctcaagaaggattatcaagaggaaattgctattgctcaagagaacaaaatacagctccaacaaatgggagaacgacttgctaaagccagccatgaaagcaaagcatctgagattgaatacaagctgggaaaggtcaacgaccggtggcagcatctcctggacctcattgcagccagggtgaagaagctgaaggagaccctggtagccgtgcagcagcttgataagaacatgagcagcctgaggacctggctcgctcacatcgagtcagagctggccaagccaatagtctacgattcctgtaactcggaagaaatacagagaaagcttaatgagcagcaggagcttcagagagacatagagaagcacagtacaggtgttgcatctgtcctcaacctgtgtgaagtcctgctgcacgactgtgacgcctgtgccactgatgccgagtgtgactctatacagcaggctacgagaaacctggaccggcggtggagaaacatttgtgctatgtccatggaaaggaggctgaaaatcgaagagacgtggcgattgtggcagaaatttctggatgactattcacgttttgaagattggctgaagtcttcagaaaggacagctgcttttcccagctcttctggggtgatctatacagttgccaaggaagaactaaagaaatttgaggctttccagcgacaggtccacgagtgcctgacgcagctggaactgatcaacaagcagtaccgccgcctggccagggagaaccgcactgattcagcatgtagcctcaaacagatggttcacgaaggcaaccagagatgggacaacctgcaaaagcgtgtcacctccatcttgcgcagactcaagcattttattggccagcgtgaggagtttgagactgcgcgggacagcattctggtctggctcacagagatggatctgcagctcactaatattgaacatttttctgagtgtgatgttcaagctaaaataaagcaactcaaggccttccagcaggaaatttcactgaaccacaataagattgagcagataattgcccaaggagaacagctgatagaaaagagtgagcccttggatgcagcgatcatcgaggaggaactagatgagctccgacggtactgccaggaggtcttcgggcgtgtggaaagataccataagaaactgatccgcctgcctctcccagacgatgagcacgacctctcagacagggagctggagctggaagactctgcagctctgtcggacctgcactggcacgaccgctctgcagacagcctgctttctccacagccttcctccaatctctccctctcgctcgctcagcccctccggagcgagcggtcaggacgagacaccccggctagtgtggactccatccccctggagtgggatcacgactatgacctcagtcgggacctggagtctgcaatgtccagagctctgccctctgaggatgaagaaggtcaggatgacaaagatttctacctccggggagctgttggcttatcagatgtaatgatccccgaaagccctgaggcctatgtaaaactcacagaaaatgcaatcaaaaatacctccggggaccacagtgccctagagtcacagatccgacaactgggcaaagccctggatgatagccgttttcagatacagcaaaccgaaaatatcattcgcagcaaaactcccacggggccggagctagacaccagctacaaaggctacatgaaactgctgggcgaatgcagtagcagtatagactccgtgaagagactggagcacaaactgaaggaggaagaggagagccttcctggctttgttaacctgcatagtaccgaaacccaaacggctggtgtgattgaccgatgggagcttctccaggcccaggcattgagcaaggagttgaggatgaagcagaacctccagaagtggcagcagtttaactcagacttgaacagcatctgggcctggctgggggacacggaggaggagttggaacagctccagcgtctggaactcagcactgacatccagaccatcgagctccagatcaaaaagctcaaggagctccagaaagctgtggaccaccgcaaagccatcatcctctccatcaatctctgcagccctgagttcacccaggctgacagcaaggagagccgggacctgcaggatcgcttgtcgcagatgaatgggcgctgggaccgagtgtgctctctgctggaggagtggcggggcctgctgcaggatgccctgatgcagtgccagggtttccatgaaatgagccatggtttgcttcttatgctggagaacattgacagaaggaaaaatgaaattgtccctattgattctaaccttgatgcagagatacttcaggaccatcacaaacagcttatgcaaataaagcatgagctgttggaatcccaactcagagtagcctctttgcaagacatgtcttgccaactactggtgaatgctgaaggaacagactgtttagaagccaaagaaaaagtccatgttattggaaatcggctcaaacttctcttgaaggaggtcagtcgtcatatcaaggaactggagaagttattagacgtgtcaagtagtcagcaggatttgtcttcctggtcttctgctgatgaactggacacctcagggtctgtgagtcccacatcaggaaggagcaccccaaacagacagaaaacgccacgaggcaagtgtagtctctcacagcctggaccctctgtcagcagtccacatagcaggtccacaaaaggtggctccgattcctccctttctgagccagggccaggtcggtccggccgcggcttcctgttcagagtcctccgagcagctcttccccttcagcttctcctgctcctcctcatcgggcttgcctgccttgtaccaatgtcagaggaagactacagctgtgccctctccaacaactttgcccggtcattccaccccatgctcagatacacgaatggccctcctccactctgaactaagcagatgccatctgcagaagtgctggtagcataaggaggatcgggtcataagcaatcccaaactaccaacaagaggaccttgatcttggcgaaagccctcggtgtggcagctttagccctcctccagatcacatgtgtgcaaattatggcttcagaggtggaagataaacagtgacgggggaacaaacagacaacaagaaggtttggaagaaatctggtttgagactctgaaccttagcactaaggagattgagtaaggacctccaaagttccccggactcatgaattctgggcccttggcccattctgtgcacagccaaggacttcagtagaccatctgggcagctttcccatggtgctgctccaaccatcagataaatgaccctcccaagcaccatgtcagtgtcgtacaatctaccaaccaaccagtgctgaagagattttagaaccttgtaacatacaatttttaagagcttatatggcagcttcctttttaccttgttttcctttggggcatgatgttttaacctttgctttagaagcacaagctgtaaatctaaaaggcacttttttttagaggtataaagaaaaactagatgtaataaataagatcatggaaggctttatgtgaaaaaagttgaatgttatagtaaaaaaaaaaagatatttatgtatgtacagtttgctaaagccaagttttgtttgtattgatttctttgcatttattatagatattataaaata

SEQ ID NO: 387 - protein, 8749 aa, Homo sapiens
MATSRGASRCPRDIANVMQRLQDEQEIVQKRTFTKWINSHLAKRKPPMVVDDLFEDMKDGVKLLALLEVLSGQKLPCEQGRRMKRIHAVANIGTALKFLEGRKSMHRGSPIKLVNINSTDIADGRPSIVLGLMWTIILYFQIEELTSNLPQLQSLSSSASSVDSIVSSETPSPPSKRKVTTKIQGNAKKALLKWVQYTAGKQTGIEVKDFGKSWRSGVAFHSVIHAIRPELVDLETVKGRSNRENLEDAFTIAETELGIPRLLDPEDVDVDKPDEKSIMTYVAQFLKHYPDIHNASTDGQEDDEILPGFPSFANSVQNFKREDRVIFKEMKVWIEQFERDLTRAQMVESNLQDKYQSFKHFRVQYEMKRKQIEHLIQPLHRDGKLSLDQALVKQSWDRVTSRLFDWHIQLDKSLPAPLGTIGAWLYRAEVALREEITVQQVHEETANTIQRKLEQHKDLLQNTDAHKRAFHEIYRTRSVNGIPVPPDQLEDMAERFHFVSSTSELHLMKMEFLELKYRLLSLLVLAESKLKSWIIKYGRRESVEQLLQNYVSFIENSKFFEQYEVTYQILKQTAEMYVKADGSVEEAENVMKFMNETTAQWRNLSVEVRSVRSMLEEVISNWDRYGNTVASLQAWLEDAEKMLNQSENAKKDFFRNLPHWIQQHTAMNDAGNFLIETCDEMVSRDLKQQLLLLNGRWRELFMEVKQYAQADEMDRMKKEYTDCVVTLSAFATEAHKKLSEPLEVSFMNVKLLIQDLEDIEQRVPVMDAQYKIITKTAHLITKESPQEEGKEMFATMSKLKEQLTKVKECYSPLLYESQQLLIPLEELEKQMTSFYDSLGKINEIITVLEREAQSSALFKQKHQELLACQENCKKTLTLIEKGSQSVQKFVTLSNVLKHFDQTRLQRQIADIHVAFQSMVKKTGDWKKHVETNSRLMKKFEESRAELEKVLRIAQEGLEEKGDPEELLRRHTEFFSQLDQRVLNAFLKACDELTDILPEQEQQGLQEAVRKLHKQWKDLQGEAPYHLLHLKIDVEKNRFLASVEECRTELDRETKLMPQEGSEKIIKEHRVFFSDKGPHHLCEKRLQLIEELCVKLPVRDPVRDTPGTCHVTLKELRAAIDSTYRKLMEDPDKWKDYTSRFSEFSSWISTNETQLKGIKGEAIDTANHGEVKRAVEEIRNGVTKRGETLSWLKSRLKVLTEVSSENEAQKQGDELAKLSSSFKALVTLLSEVEKMLSNFGDCVQYKEIVKNSLEELISGSKEVQEQAEKILDTENLFEAQQLLLHHQQKTKRISAKKRDVQQQIAQAQQGEGGLPDRGHEELRKLESTLDGLERSRERQERRIQVTLRKWERFETNKETVVRYLFQTGSSHERFLSFSSLESLSSELEQTKEFSKRTESIAVQAENLVKEASEIPLGPQNKQLLQQQAKSIKEQVKKLEDTLEEDIKTMEMVKTKWDHFGSNFETLSVWITEKEKELNALETSSSAMDMQISQIKVTIQEIESKLSSIVGLEEEAQSFAQFVTTGESARIKAKLTQIRRYGEELREHAQCLEGTILGHLSQQQKFEENLRKIQQSVSEFEDKLAVPIKICSSATETYKVLQEHMDLCQALESLSSAITAFSASARKVVNRDSCVQEAAALQQQYEDILRRAKERQTALENLLAHWQRLEKELSSFLTWLERGEAKASSPEMDISADRVKVEGELQLIQALQNEVVSQASFYSKLLQLKESLFSVASKDDVKMMKLHLEQLDERWRDLPQIINKRINFLQSVVAEHQQFDELLLSFSVWIKLFLSELQTTSEISIMDHQVALTRHKDHAAEVESKKGELQSLQGHLAKLGSLGRAEDLHLLQGKAEDCFQLFEEASQVVERRQLALSHLAEFLQSHASLSGILRQLRQTVEATNSMNKNESDLIEKDLNDALQNAKALESAAVSLDGILSKAQYHLKIGSSEQRTSCRATADQLCGEVERIQNLLGTKQSEADALAVLKKAFQDQKEELLKSIEDIEERTDKERLKEPTRQALQQRLRVFNQLEDELNSHEHELCWLKDKAKQIAQKDVAFAPEVDREINRLEVTWDDTKRLIHENQGQCCGLIDLMREYQNLKSAVSKVLENASSVIVTRTTIKDQEDLKWAFSKHETAKNKMNYKQKDLDNFTSKGKHLLSELKKIHSSDFSLVKTDMESTVDKWLDVSEKLEENMDRLRVSLSIWDDVLSTRDEIEGWSNNCVPQMAENISNLDNHLRAEELLKEFESEVKNKALRLEELHSKVNDLKELTKNLETPPDLQFIEADLMQKLEHAKEITEVAKGTLKDFTAQSTQVEKFINDITTWFTKVEESLMNCAQNETCEALKKVKDIQKELQSQQSNISSTQENLNSLCRKYHSAELESLGRAMTGLIKKHEAVSQLCSKTQASLQESLEKHFSESMQEFQEWFLGAKAAAKESSDRTGDSKVLEAKLHDLQNILDSVSDGQSKLDAVTQEGQTLYAHLSKQIVSSIQEQITKANEEFQAFLKQCLKDKQALQDCASELGSFEDQHRKLNLWIHEMEERFNTENLGESKQHIPEKKNEVHKVEMFLGELLAARESLDKLSQRGQLLSEEGHGAGQEGRLCSQLLTSHQNLLRMTKEKLRSCQVALQEHEALEEALQSMWFWVKAIQDRLACAESTLGSKDTLEKRLSQIQDILLMKGEGEVKLNMAIGKGEQALRSSNKEGQRVIQTQLETLKEVWADIMSSSVHAQSTLESVISQWNDYVERKNQLEQWMESVDQKIEHPLQPQPGLKEKFVLLDHLQSILSEAEDHTRALHRLIAKSRELYEKTEDESFKDTAQEELKTQFNDIMTVAKEKMRKVEEIVKDHLMYLDAVHEFTDWLHSAKEELHRWSDMSGDSSATQKKLSKIKELIDSREIGASRLSRVESLAPEVKQNTTASGCELMHTEMQALRADWKQWEDSVFQTQSCLENLVSQMALSEQEFSGQVAQLEQALEQFSALLKTWAQQLTLLEGKNTDEEIVECWHKGQEILDALQKAEPRTEDLKSQLNELCRFSRDLSTYSGKVSGLIKEYNCLCLQASKGCQNKEQILQQRFRKAFRDFQQWLVNAKITTAKCFDIPQNISEVSTSLQKIQEFLSESENGQHKLNMMLSKGELLSTLLTKEKAKGIQAKVTAAKEDWKNFHSNLHQKESALENLKIQMKDFEVSAEPIQDWLSKTEKMVHESSNRLYDLPAKRREQQKLQSVLEEIHCYEPQLNRLKEKAQQLWEGQAASKSFRHRVSQLSSQYLALSNLTKEKVSRLDRIVAEHNQFSLGIKELQDWMTDAIHMLDSYCHPTSDKSVLDSRTLKLEALLSVKQEKEIQMKMIVTRGESVLQNTSPEGIPTIQQQLQSVKDMWASLLSAGIRCKSQLEGALSKWTSYQDGVRQFSGWMDSMEANLNESERQHAELRDKTTMLGKAKLLNEEVLSYSSLLETIEVKGAGMTEHYVTQLELQDLQERYRAIQERAKEAVTKSEKLVRLHQEYQRDLKAFEVWLGQEQEKLDQYSVLEGDAHTHETTLRDLQELQVHCAEGQALLNSVLHTREDVIPSGIPQAEDRALESLRQDWQAYQHRLSETRTQFNNVVNKLRLMEQKFQQVDEWLKTAEEKKWHEEVTAYRDEVEEVGARAQEILDESHVNSRMGCQATQLTSRYQALLLQVLEQIKFLEEEIQSLEESESSLSSYSDWYGSTHKNFKNVATKIDKVDTVMMGKKLKTLEVLLKDMEKGHSLLKSAREKGERAVKYLEEGEAERLRKEIHDHMEQLKELTSTVRKEHMTLEKGLHLAKEFSDKCKALTQWIAEYQEILHVPEEPKMELYEKKAQLSKYKSLQQTVLSHEPSVKSVREKGEALLELVQDVTLKDKIDQLQSDYQDLCSIGKAMMEEIAGFEDRLNNLQMKGDTLIGQCADHLQAKLKQNVHAHLQGTKDSYSAICSTAQRMYQSLEHELQKHVSRQDTLQQCQAWLSAVQPDLEPSPQPPLSRAEAIKQVKHFRALQEQARTYLDLLCSMCDLSNASVKTTAKDIQQTEQTIEQKLVQAQNLTQGWEEIKHLKSELWIYLQDADQQLQNMKRRHSELELNIAQNMVSQVKDFVKKLQSKQASVNTIIEKVNKLTKKEESPEHKEINHLNDQWLDLCRQSNNLCLQREEDLQRTRDYHDCMNVVEVFLEKFTTEWDNLARSDAESTAVHLEALKKLALALQERKYAIEDLKDQKQKMIEHLNLDDKELVKEQTSHLEQRWFQLEDLIKRKIQVSVTNLEELNVVQSRFQELMEWAEEQQPNIAEALKQSPPPDMAQNLLMDHLAICSELEAKQMLLKSLIKDADRVMADLGLNERQVIQKALSDAQSHVNCLSDLVGQRRKYLNKALSEKTQFLMAVFQATSQIQQHERKIMFREHICLLPDDVSKQVKTCKSAQASLKTYQNEVTGLWAQGRELMKEVTEQEKSEVLGKLQELQSVYDSVLQKCSHRLQELEKNLVSRKHFKEDFDKACHWLKQADIVTFPEINLMNESSELHTQLAKYQNILEQSPEYENLLLTLQRTGQTILPSLNEVDHSYLSEKLNALPRQFNVIVALAKDKFYKVQEAILARKEYASLIELTTQSLSELEAQFLRMSKVPTDLAVEEALSLQDGCRAILDEVAGLGEAVDELNQKKEGFRSTGQPWQPDKMLHLVTLYHRLKRQTEQRVSLLEDTTSAYQEHEKMCQQLERQLKSVKEEQSKVNEETLPAEEKLKMYHSLAGSLQDSGIVLKRVTIHLEDLAPHLDPLAYEKARHQIQSWQGELKLLTSAIGETVTECESRMVQSIDFQTEMSRSLDWLRRVKAELSGPVYLDLNLQDIQEEIRKIQIHQEEVQSSLRIMNALSHKEKEKFTKAKELISADLEHSLAELSELDGDIQEALRTRQATLTEIYSQCQRYYQVFQAANDWLEDAQELLQLAGNGLDVESAEENLKSHMEFFSTEDQFHSNLEELHSLVATLDPLIKPTGKEDLEQKVASLELRSQRMSRDSGAQVDLLQRCTAQWHDYQKAREEVIELMNDTEKKLSEFSLLKTSSSHEAEEKLSEHKALVSVVNSFHEKIVALEEKASQLEKTGNDASKATLSRSMTTVWQRWTRLRAVAQDQEKILEDAVDEWTGFNNKVKKATEMIDQLQDKLPGSSAEKASKAELLTLLEYHDTFVLELEQQQSALGMLRQQTLSMLQDGAAPTPGEEPPLMQEITAMQDRCLNMQEKVKTNGKLVKQELKDREMVETQINSVKCWVQETKEYLGNPTIEIDAQLEELQILLTEATNHRQNIEKMAEEQKEKYLGLYTILPSELSLQLAEVALDLKIRDQIQDKIKEVEQSKATSQELSRQIQKLAKDLTTILTKLKAKTDNVVQAKTDQKVLGEELDGCNSKLMELDAAVQKFLEQNGQLGKPLAKKIGKLTELHQQTIRQAENRLSKLNQAASHLEEYNEMLELILKWIEKAKVLAHGTIAWNSASQLREQYILHQTLLEESKEIDSELEAMTEKLQYLTSVYCTEKMSQQVAELGRETEELRQMIKIRLQNLQDAAKDMKKFEAELKKLQAALEQAQATLTSPEVGRLSLKEQLSHRQHLLSEMESLKPKVQAVQLCQSALRIPEDVVASLPLCHAALRLQEEASRLQHTAIQQCNIMQAAVVQYEQYEQEMKHLQQLIEGAHREIEDKPVATSNIQELQAQISRHEELAQKIKGYQEQIASLNSKCKMLTMKAKHATMLLTVTEVEGLAEGTEDLDGELLPTPSAHPSVVMMTAGRCHTLLSPVTEESGEEGTNSEISSPPACRSPSPVANTDASVNQDIAYYQALSAERLQTDAAKIHPSTSASQEFYEPGLEPSATAKLGDLQRSWETLKNVISEKQRTLYEALERQQKYQDSLQSISTKMEAIELKLSESPEPGRSPESQMAEHQALMDEILMLQDEINELQSSLAEELVSESCEADPAEQLALQSTLTVLAERMSTIRMKASGKRQLLEEKLNDQLEEQRQEQALQRYRCEADELDSWLLSTKATLDTALSPPKEPMDMEAQLMDCQNMLVEIEQKVVALSELSVHNENLLLEGKAHTKDEAEQLAGKLRRLKGSLLELQRALHDKQLNMQGTAQEKEESDVDLTATQSPGVQEWLAQARTTWTQQRQSSLQQQKELEQELAEQKSLLRSVASRGEEILIQHSAAETSGDAGEKPDVLSQELGMEGEKSSAEDQMRMKWESLHQEFSTKQKLLQNVLEQEQEQVLYSRPNRLLSGVPLYKGDVPTQDKSAVTSLLDGLNQAFEEVSSQSGGAKRQSIHLEQKLYDGVSATSTWLDDVEERLFVATALLPEETETCLFNQEILAKDIKEMSEEMDKNKNLFSQAFPENGDNRDVIEDTLGCLLGRLSLLDSVVNQRCHQMKERLQQILNFQNDLKVLFTSLADNKYIILQKLANVFEQPVAEQIEAIQQAEDGLKEFDAGIIELKRRGDKLQVEQPSMQELSKLQDMYDELMMIIGSRRSGLNQNLTLKSQYERALQDLADLLETGQEKMAGDQKIIVSSKEEIQQLLDKHKEYFQGLESHMILTETLFRKIISFAVQKETQFHTELMAQASAVLKRAHKRGVELEYILETWSHLDEDQQELSRQLEVVESSIPSVGLVEENEDRLIDRITLYQHLKSSLNEYQPKLYQVLDDGKRLLISISCSDLESQLNQLGECWLSNTNKMSKELHRLETILKHWTRYQSESADLIHWLQSAKDRLEFWTQQSVTVPQELEMVRDHLNAFLEFSKEVDAQSSLKSSVLSTGNQLLRLKKVDTATLRSELSRIDSQWTDLLTNIPAVQEKLHQLQMDKLPSRHAISEVMSWISLMENVIQKDEDNIKNSIGYKAIHEYLQKYKGFKIDINCKQLTVDFVNQSVLQISSQDVESKRSDKTDFAEQLGAMNKSWQILQGLVTEKIQLLEGLLESWSEYENNVQCLKTWFETQEKRLKQQHRIGDQASVQNALKDCQDLEDLIKAKEKEVEKIEQNGLALIQNKKEDVSSIVMSTLRELGQTWANLDHMVGQLKILLKSVLDQWSSHKVAFDKINSYLMEARYSLSRFRLLTGSLEAVQVQVDNLQNLQDDLEKQERSLQKFGSITNQLLKECHPPVTETLTNTLKEVNMRWNNLLEEIAEQLQSSKALLQLWQRYKDYSKQCASTVQQQEDRTNELLKAATNKDIADDEVATWIQDCNDLLKGLGTVKDSLFFLHELGEQLKQQVDASAASAIQSDQLSLSQHLCALEQALCKQQTSLQAGVLDYETFAKSLEALEAWIVEAEEILQGQDPSHSSDLSTIQERMEELKGQMLKFSSMAPDLDRLNELGYRLPLNDKEIKRMQNLNRHWSLISSQTTERFSKLQSFLLQHQTFLEKCETWMEFLVQTEQKLAVEISGNYQHLLEQQRAHELFQAEMFSRQQILHSIIIDGQRLLEQGQVDDRDEFNLKLTLLSNQWQGVIRRAQQRRGIIDSQIRQWQRYREMAEKLRKWLVEVSYLPMSGLGSVPIPLQQARTLFDEVQFKEKVFLRQQGSYILTVEAGKQLLLSADSGAEAALQAELAEIQEKWKSASMRLEEQKKKLAFLLKDWEKCEKGIADSLEKLRTFKKKLSQSLPDHHEELHAEQMRCKELENAVGSWTDDLTQLSLLKDTLSAYISADDISILNERVELLQRQWEELCHQLSLRRQQIGERLNEWAVFSEKNKELCEWLTQMESKVSQNGDILIEEMIEKLKKDYQEEIAIAQENKIQLQQMGERLAKASHESKASEIEYKLGKVNDRWQHLLDLIAARVKKLKETLVAVQQLDKNMSSLRTWLAHIESELAKPIVYDSCNSEEIQRKLNEQQELQRDIEKHSTGVASVLNLCEVLLHDCDACATDAECDSIQQATRNLDRRWRNICAMSMERRLKIEETWRLWQKFLDDYSRFEDWLKSSERTAAFPSSSGVIYTVAKEELKKFEAFQRQVHECLTQLELINKQYRRLARENRTDSACSLKQMVHEGNQRWDNLQKRVTSILRRLKHFIGQREEFETARDSILVWLTEMDLQLTNIEHFSECDVQAKIKQLKAFQQEISLNHNKIEQIIAQGEQLIEKSEPLDAAIIEEELDELRRYCQEVFGRVERYHKKLIRLPLPDDEHDLSDRELELEDSAALSDLHWHDRSADSLLSPQPSSNLSLSLAQPLRSERSGRDTPASVDSIPLEWDHDYDLSRDLESAMSRALPSEDEEGQDDKDFYLRGAVGLSDVMIPESPEAYVKLTENAIKNTSGDHSALESQIRQLGKALDDSRFQIQQTENIIRSKTPTGPELDTSYKGYMKLLGECSSSIDSVKRLEHKLKEEEESLPGFVNLHSTETQTAGVIDRWELLQAQALSKELRMKQNLQKWQQFNSDLNSIWAWLGDTEEELEQLQRLELSTDIQTIELQIKKLKELQKAVDHRKAIILSINLCSPEFTQADSKESRDLQDRLSQMNGRWDRVCSLLEEWRGLLQDALMQCQGFHEMSHGLLLMLENIDRRKNEIVPIDSNLDAEILQDHHKQLMQIKHELLESQLRVASLQDMSCQLLVNAEGTDCLEAKEKVHVIGNRLKLLLKEVSRHIKELEKLLDVSSSQQDLSSWSSADELDTSGSVSPTSGRSTPNRQKTPRGKCSLSQPGPSVSSPHSRSTKGGSDSSLSEPGPGRSGRGFLFRVLRAALPLQLLLLLLIGLACLVPMSEEDYSCALSNNFARSFHPMLRYTNGPPPL

SEQ ID NO: 388 - DNA, 3894 bp, Homo sapiens
aaggtaaagccactagagagaaactgaaagaaaacattcttaagataaattgaattgacattttctctctaaaatatgatttatagaccacagataggaattaagagtttcctgataattttggcttcatattattttaaaggattatcaagaggaaattgctattgctcaagagaacaaaatacagctccaacaaatgggagaacgacttgctaaagccagccatgaaagcaaagcatctgagattgaatacaagctgggaaaggtcaacgaccggtggcagcatctcctggacctcattgcagccagggtgaagaagctgaaggagaccctggtagccgtgcagcagcttgataagaacatgagcagcctgaggacctggctcgctcacatcgagtcagagctggccaagccaatagtctacgattcctgtaactcggaagaaatacagagaaagcttaatgagcagcaggagcttcagagagacatagagaagcacagtacaggtgttgcatctgtcctcaacctgtgtgaagtcctgctgcacgactgtgacgcctgtgccactgatgccgagtgtgactctatacagcaggctacgagaaacctggaccggcggtggagaaacatttgtgctatgtccatggaaaggaggctgaaaatcgaagagacgtggcgattgtggcagaaatttctggatgactattcacgttttgaagattggctgaagtcttcagaaaggacagctgcttttcccagctcttctggggtgatctatacagttgccaaggaagaactaaagaaatttgaggctttccagcgacaggtccacgagtgcctgacgcagctggaactgatcaacaagcagtaccgccgcctggccagggagaaccgcactgattcagcatgtagcctcaaacagatggttcacgaaggcaaccagagatgggacaacctgcaaaagcgtgtcacctccatcttgcgcagactcaagcattttattggccagcgtgaggagtttgagactgcgcgggacagcattctggtctggctcacagagatggatctgcagctcactaatattgaacatttttctgagtgtgatgttcaagctaaaataaagcaactcaaggccttccagcaggaaatttcactgaaccacaataagattgagcagataattgcccaaggagaacagctgatagaaaagagtgagcccttggatgcagcgatcatcgaggaggaactagatgagctccgacggtactgccaggaggtcttcgggcgtgtggaaagataccataagaaactgatccgcctgcctctcccagacgatgagcacgacctctcagacagggagctggagctggaagactctgcagctctgtcggacctgcactggcacgaccgctctgcagacagcctgctttctccacagccttcctccaatctctccctctcgctcgctcagcccctccggagcgagcggtcaggacgagacaccccggctagtgtggactccatccccctggagtgggatcacgactatgacctcagtcgggacctggagtctgcaatgtccagagctctgccctctgaggatgaagaaggtcaggatgacaaagatttctacctccggggagctgttggcttatcagatgtaatgatccccgaaagccctgaggcctatgtaaaactcacagaaaatgcaatcaaaaatacctccggggaccacagtgccctagagtcacagatccgacaactgggcaaagccctggatgatagccgttttcagatacagcaaaccgaaaatatcattcgcagcaaaactcccacggggccggagctagacaccagctacaaaggctacatgaaactgctgggcgaatgcagtagcagtatagactccgtgaagagactggagcacaaactgaaggaggaagaggagagccttcctggctttgttaacctgcatagtaccgaaacccaaacggctggtgtgattgaccgatgggagcttctccaggcccaggcattgagcaaggagttgaggatgaagcagaacctccagaagtggcagcagtttaactcagacttgaacagcatctgggcctggctgggggacacggaggaggagttggaacagctccagcgtctggaactcagcactgacatccagaccatcgagctccagatcaaaaagctcaaggagctccagaaagctgtggaccaccgcaaagccatcatcctctccatcaatctctgcagccctgagttcacccaggctgacagcaaggagagccgggacctgcaggatcgcttgtcgcagatgaatgggcgctgggaccgagtgtgctctctgctggaggagtggcggggcctgctgcaggatgccctgatgcagtgccagggtttccatgaaatgagccatggtttgcttcttatgctggagaacattgacagaaggaaaaatgaaattgtccctattgattctaaccttgatgcagagatacttcaggaccatcacaaacagcttatgcaaataaagcatgagctgttggaatcccaactcagagtagcctctttgcaagacatgtcttgccaactactggtgaatgctgaaggaacagactgtttagaagccaaagaaaaagtccatgttattggaaatcggctcaaacttctcttgaaggaggtcagtcgtcatatcaaggaactggagaagttattagacgtgtcaagtagtcagcaggatttgtcttcctggtcttctgctgatgaactggacacctcagggtctgtgagtcccacatcaggaaggagcaccccaaacagacagaaaacgccacgaggcaagtgtagtctctcacagcctggaccctctgtcagcagtccacatagcaggtccacaaaaggtggctccgattcctccctttctgagccagggccaggtcggtccggccgcggcttcctgttcagagtcctccgagcagctcttccccttcagcttctcctgctcctcctcatcgggcttgcctgccttgtaccaatgtcagaggaagactacagctgtgccctctccaacaactttgcccggtcattccaccccatgctcagatacacgaatggccctcctccactctgaactaagcagatgccatctgcagaagtgctggtagcataaggaggatcgggtcataagcaatcccaaactaccaacaagaggaccttgatcttggcgaaagccctcggtgtggcagctttagccctcctccagatcacatgtgtgcaaattatggcttcagaggtggaagataaacagtgacgggggaacaaacagacaacaagaaggtttggaagaaatctggtttgagactctgaaccttagcactaaggagattgagtaaggacctccaaagttccccggactcatgaattctgggcccttggcccattctgtgcacagccaaggacttcagtagaccatctgggcagctttcccatggtgctgctccaaccatcagataaatgaccctcccaagcaccatgtcagtgtcgtacaatctaccaaccaaccagtgctgaagagattttagaaccttgtaacatacaatttttaagagcttatatggcagcttcctttttaccttgttttcctttggggcatgatgttttaacctttgctttagaagcacaagctgtaaatctaaaaggcacttttttttagaggtataaagaaaaactagatgtaataaataagatcatggaaggctttatgtgaaaaaagttgaatgttatagtaaaaaaaaaaagatatttatgtatgtacagtttgctaaagccaagttttgtttgtattgatttctttgcatttattatagatattataaaata

SEQ ID NO: 389 - protein, 982 aa, Homo sapiens
MGERLAKASHESKASEIEYKLGKVNDRWQHLLDLIAARVKKLKETLVAVQQLDKNMSSLRTWLAHIESELAKPIVYDSCNSEEIQRKLNEQQELQRDIEKHSTGVASVLNLCEVLLHDCDACATDAECDSIQQATRNLDRRWRNICAMSMERRLKIEETWRLWQKFLDDYSRFEDWLKSSERTAAFPSSSGVIYTVAKEELKKFEAFQRQVHECLTQLELINKQYRRLARENRTDSACSLKQMVHEGNQRWDNLQKRVTSILRRLKHFIGQREEFETARDSILVWLTEMDLQLTNIEHFSECDVQAKIKQLKAFQQEISLNHNKIEQIIAQGEQLIEKSEPLDAAIIEEELDELRRYCQEVFGRVERYHKKLIRLPLPDDEHDLSDRELELEDSAALSDLHWHDRSADSLLSPQPSSNLSLSLAQPLRSERSGRDTPASVDSIPLEWDHDYDLSRDLESAMSRALPSEDEEGQDDKDFYLRGAVGLSDVMIPESPEAYVKLTENAIKNTSGDHSALESQIRQLGKALDDSRFQIQQTENIIRSKTPTGPELDTSYKGYMKLLGECSSSIDSVKRLEHKLKEEEESLPGFVNLHSTETQTAGVIDRWELLQAQALSKELRMKQNLQKWQQFNSDLNSIWAWLGDTEEELEQLQRLELSTDIQTIELQIKKLKELQKAVDHRKAIILSINLCSPEFTQADSKESRDLQDRLSQMNGRWDRVCSLLEEWRGLLQDALMQCQGFHEMSHGLLLMLENIDRRKNEIVPIDSNLDAEILQDHHKQLMQIKHELLESQLRVASLQDMSCQLLVNAEGTDCLEAKEKVHVIGNRLKLLLKEVSRHIKELEKLLDVSSSQQDLSSWSSADELDTSGSVSPTSGRSTPNRQKTPRGKCSLSQPGPSVSSPHSRSTKGGSDSSLSEPGPGRSGRGFLFRVLRAALPLQLLLLLLIGLACLVPMSEEDYSCALSNNFARSFHPMLRYTNGPPPL

SEQ ID NO: 390 - DNA, 27745 bp, Homo sapiens
cccgggcagtggaaaccgtgggcaaaagttagctggcaggacagcgcagctcctccaggcagcggaggcagcgcgtcccggctctcagggacatttccttcccacctcgacccccgggaggtggtcccggtataaaggctcgctgagcgggtgggtcacagcacagctttgcagctgcggagaaacgcccaaggccgtgcatctccaggagggcggctgggctcccgcagtcctgcagaccgcgcccgatcccggcgacagggcgggcggacagccgcgcatccccggggtcccgccgagcctgggcgcagagagccgggaggaagcgttcgctcgcttcgccttgctgctgggaaactgaacgaggccgagagagaaggttcttgagttcatgtaagaggacagtcttaaaacggaagaagaaaaagaagcagttcagtctttgggagagctgcctccttgttgagtgctgcaaaggcctggaattcatttatgacagaatagatctagaaaagtccaagcatgttttctagagtggtgtagccctgtgctgcctccagtgaagagtctcttggtgttggcttcgtgcttccggagggaccatggcaacctccagaggggcctcccggtgtcctcgggatatcgccaatgtgatgcagaggctgcaagatgagcaagagatagtacaaaaacgaactttcacaaaatggatcaactctcatctggccaagcggaaacctccaatggtggtggacgatctttttgaagacatgaaagatggtgttaaactgcttgcccttctggaggtcctgtctgggcagaaactgccttgtgaacaaggacgccggatgaagcgaatccatgctgtggctaacattggcacggcactcaagttcctcgaaggaagaaagattaaattagtcaacattaactccaccgatatagctgatggccgaccctcaatagttcttggattgatgtggaccattattctatatttccagattgaagagttgaccagcaacctgccccagctccagtctttgtccagcagcgcatcctccgtggacagcatagttagctctgagactcccagcccaccaagtaaacggaaggtgaccaccaagatccaaggaaatgctaagaaggctttattaaagtgggttcagtacacagctggcaagcagactggaatagaagtaaaagattttgggaagagttggagaagcggggttgcctttcattcagttattcatgccattcgaccggaattggtggacttggagacagtgaaaggcagatccaaccgagaaaatttggaggatgctttcactatcgccgaaacagaactggggatcccaagactgctagatcctgaagacgttgatgtggataaaccagatgagaaatctattatgacctatgtagcccagtttctgaaacattatcctgacatccacaatgcaagcactgatgggcaagaggatgatgaaatacttccaggtttcccatcttttgcaaattctgtacaaaattttaagagagaagacagagtaatttttaaggaaatgaaagtttggatagaacaatttgagagagatttgacaagagcacagatggtggaatcaaatttacaggataaatatcagtcatttaagcacttcagagttcaatatgaaatgaagaggaaacagattgaacatttaatacaaccattacacagagacggtaaattgtcacttgaccaagcattggtaaaacaatcttgggatagagtgacctccaggctctttgactggcatatacagcttgataaatctcttcctgcacctctgggcaccataggtgcctggctgtacagagcggaggtggccctgagagaggaaataaccgttcaacaggtccacgaggaaacagcaaacacgatacaacggaaacttgagcaacataaggatctgcttcaaaacacggatgcccacaaaagagcattccatgaaatctaccggaccaggtctgttaacgggattccagtgccacctgatcaattagaggacatggccgagaggtttcattttgtttcctccacatcagagctacacctaatgaaaatggaatttttagaattaaagtaccgtctgctctcactgctggttcttgcagagtcaaagctgaagtcttggatcattaagtacgggaggagagagtcagtggagcagcttctacaaaactacgtgtcttttatagaaaatagcaagttctttgaacaatatgaggtgacataccagatcttgaaacagacagctgagatgtatgtcaaagcagatggttcagtggaagaagctgagaatgtgatgaaattcatgaatgaaaccaccgctcagtggaggaatctctcagtagaagtgaggagtgtgaggagcatgctggaagaagtgatctctaactgggatcgctatggcaatacagtggctagtctgcaagcctggctagaggatgctgaaaaaatgctcaatcaatcagaaaatgccaaaaaggatttttttcgaaatttacctcattggattcagcagcatactgccatgaacgatgctggcaattttctaattgaaacctgtgatgagatggtttcccgtgacctgaagcagcaattactgttgctaaatgggcggtggagggagttgtttatggaagtcaagcaatatgctcaagctgatgagatggacagaatgaagaaggaatacacagactgtgttgttaccctgtctgcttttgcaacggaagcccataagaaactttctgaacccttagaagtctcttttatgaatgtcaagctattaattcaagacttggaggatattgagcagagggtgcctgtgatggatgcccaatacaagataattacaaagacagcacacctcattaccaaagaaagcccccaagaagaaggaaaagaaatgtttgcgaccatgtcaaagctcaaagagcagctaaccaaggtcaaagaatgttactccccactcctttatgagtctcagcagctgttgattccgttggaggaattagaaaagcagatgacgtccttttatgactcacttgggaaaatcaatgaaattatcacagttcttgagcgtgaggcacaatcgagtgccctttttaaacaaaaacatcaggaactgttagcttgtcaagaaaactgtaagaaaaccttgacacttattgagaaaggcagtcaaagtgttcaaaagtttgtgaccttgagcaacgtgttaaagcattttgatcagacgaggctacaaagacagattgcagatattcatgttgcttttcagagtatggtaaagaaaactggagattggaagaagcatgtggaaaccaacagtcgcttgatgaagaagtttgaggagtctcgagcagagttggagaaggtactgcggattgctcaggagggcctggaggaaaagggggatccagaggagctcctgcggagacacactgagtttttcagtcagctggatcagagggtgctcaatgctttcctgaaagcttgtgatgaactcaccgacatccttccagagcaggagcagcaggggctgcaggaagctgttcgaaagctccacaaacaatggaaggatcttcaaggagaagccccttatcatttgcttcatctgaagattgatgtggagaagaataggttcttagcctctgtagaagaatgcagaactgagctggatcgagagaccaagctgatgccccaggaaggcagtgaaaagataattaaagagcacagggttttcttcagtgacaaaggtcctcatcatctctgtgagaaaaggttacagctcatcgaggaactctgtgtgaaactcccagtgcgggacccagtaagggacacacctggaacctgtcacgtgactctcaaagagctcagagctgccattgacagcacctacaggaagctcatggaagacccagacaagtggaaggactacactagcagattctctgagttctcatcttggatatctacaaatgagacacaattaaaggggatcaagggtgaggccatcgatactgccaaccacggagaggttaaacgtgccgttgaagagatcagaaatggtgttaccaaaaggggtgagaccctcagctggctgaaatccaggctgaaagttttgacagaagtttcttctgagaatgaagcccaaaagcagggagatgagctggcaaaattatccagctctttcaaggctcttgtgacgctgctgtcagaggttgaaaagatgctaagcaattttggggactgtgtccagtacaaagaaatagtcaaaaattctctcgaagaattaatttctggctctaaagaagtccaggaacaagctgagaagatcttggatactgaaaatctgtttgaagcacagcagttacttcttcatcaccagcaaaagacaaagcggatctcagcaaagaagagagatgtgcagcagcagatcgcgcaggcgcagcagggagaaggggggctgcctgaccgaggccacgaggagctgcggaagctggagagcacactggatggcctggagcgcagccgggagaggcaggaacgccgcatccaggtcacattaagaaaatgggagcgatttgaaacaaacaaagaaacagtagtaagatacctttttcaaacaggttccagtcatgaacgcttcttgagttttagcagtttggaaagtttatcttcagaactggaacaaacaaaggagttttctaaacggacagaaagtattgcagtccaggctgagaaccttgtaaaggaagcttcagagataccgcttgggccccaaaataagcagctgcttcaacagcaggccaagtcaatcaaagaacaagtcaaaaaattagaagacacgcttgaagaagatattaaaaccatggaaatggtgaaaaccaagtgggatcattttggcagtaattttgagactctgtccgtctggataactgagaaagaaaaagaactcaatgccttggaaacttcgtcatctgccatggacatgcaaatcagccaaattaaggtcacaattcaggaaatagaaagtaagctcagcagcattgtaggattagaagaagaagcccagtcttttgctcagtttgttaccactggagaatctgctcgaattaaagccaagttgacacaaataagaagatacggggaagagcttcgagagcatgcacagtgtctggaaggaacaatcctgggacatttatctcagcagcaaaagtttgaagagaaccttagaaagatccagcaatctgtgtctgaatttgaagataaacttgctgttccaattaaaatatgttcttcagctacagaaacatacaaagttcttcaagaacatatggatctctgccaggccctggagtcactgagcagcgcgatcactgccttctcagccagtgccaggaaggttgtgaacagagattcctgtgttcaggaggctgcggctctacagcagcaatacgaggacatcctaaggagggcgaaggagagacagacggcgctggagaatctgctggcccactggcagaggctagagaaagaactatcatcctttttgacctggttagagcggggtgaagctaaagccagttccccagaaatggacatttctgcagacagagtcaaagtggaaggtgaacttcagttaatacaggcactgcaaaatgaagttgtatcccaggcctcattctatagcaaacttttgcaattgaaggaatcattgttctcagtagcctccaaagatgatgtgaaaatgatgaaactacatttggagcagttggatgagagatggagagatttaccacagatcattaacaaaaggattaattttcttcagtctgtggttgctgaacaccagcaatttgatgagctgctgctttccttttctgtctggattaaactgtttctcagtgaattacaaactacctctgagattagcataatggaccatcaagtagcccttactcggcataaggaccacgcagcagaagtagagagcaaaaagggcgaattgcagagtctgcagggtcacttagcaaagttgggttctctgggccgtgctgaggacctccacctcctgcagggaaaggctgaggactgcttccagctgtttgaggaggccagccaggttgtggagaggcggcagcttgccctgtcccatttggcagaattcctccagagccatgcctctctgtccggcattctccgccagctgaggcaaacagtggaagcaaccaacagtatgaataagaacgagtctgatttgatagaaaaggacctcaatgatgctcttcaaaatgctaaagcattagaatctgctgccgtcagtctggatggcattctttccaaagcccaataccatctgaaaatcgggagctctgagcaaaggacttcctgcagagccacggctgatcagctctgtggagaggtagagaggatccagaaccttctgggaaccaagcagagtgaggcagatgctctggcagtgttgaaaaaagcattccaagaccagaaagaggagcttctgaaaagcattgaggacattgaagaaaggactgacaaagagcgattgaaagaacctacccgccaagctcttcagcagaggttaagagtgtttaatcagctagaagatgaattgaattctcacgagcatgaactatgttggttgaaagacaaagccaagcaaattgcccagaaagatgtagcttttgcacctgaagttgacagggagataaaccgcttagaggtcacctgggatgataccaaaagactaattcatgaaaatcagggtcagtgctgtggacttattgacttaatgagagaatatcagaacctgaaatcagctgtatctaaagtcttagaaaatgccagcagtgtgattgtaaccagaactaccataaaagatcaggaggatcttaaatgggctttttccaagcatgaaactgccaagaacaaaatgaattacaaacagaaagacttggataactttaccagcaaaggaaaacacttgttatctgagctgaagaaaattcacagtagtgatttcagcttggtgaaaacagacatggagagcaccgtggacaaatggctggatgtatcagagaaacttgaagaaaacatggataggctgagagtaagcctgtccatttgggatgatgtactgtcaactagagatgagattgagggatggtcaaacaactgcgttccacagatggcagaaaacatcagcaacctggataaccacctcagagctgaagaactgcttaaagaatttgagtctgaagttaaaaacaaagcattgagattggaagaactgcattccaaagttaatgatctgaaagaattaactaaaaatctagaaacaccgccagaccttcagtttatagaagcagacttaatgcagaaactggagcatgccaaagaaataactgaagtagcaaaaggaaccctgaaggatttcacggctcaaagtacacaagtggagaagtttattaatgacataacaacatggttcacaaaagtggaagaatcgttgatgaactgtgcccaaaatgagacttgtgaagcattgaaaaaagtcaaggatatacaaaaagaacttcaaagtcaacaaagcaacatcagctctacccaagaaaatctcaatagcttgtgccgcaagtaccactcagctgagttggagagcctgggccgtgcaatgactggtctgataaagaaacatgaagccgtgagccagttgtgctccaaaacccaggccagcctgcaggaatctctggaaaaacacttcagtgagtctatgcaggaattccaagaatggtttttgggagcaaaggcagcagcaaaagaatcatcagatcgcaccggtgacagcaaagttctagaagcaaagctccatgatcttcagaacattttggactcagtcagtgatgggcagagcaaacttgatgcagtgactcaagaaggacaaactttgtatgcacatttgtctaaacaaattgtcagtagcattcaagaacaaatcacaaaggccaatgaagagtttcaagcatttctgaaacaatgccttaaagataagcaggctcttcaagactgtgcttcagaacttggaagctttgaagatcagcacagaaaactgaacttatggatccatgaaatggaagaaaggttcaatacggaaaacttgggagagagtaaacagcacattcctgagaagaaaaatgaagttcataaagttgaaatgtttttgggagaactgctggctgcaagagagtctcttgataagctttcccagagagggcagcttctgagtgaagaaggccacggtgctgggcaggagggccgcctgtgttcccagctcctcacaagccaccagaacctacttagaatgaccaaagagaaactccggagctgccaggtggcccttcaggagcacgaagccctggaggaagcactgcaaagcatgtggttctgggtgaaggccattcaggacagactggcctgtgcagagagcactcttgggagcaaagacaccctggagaaacggctgtcacaaatacaggatattctcctgatgaaaggtgaaggggaagttaagttgaatatggccattggcaagggggaacaggccttgagaagtagcaacaaagaaggtcagagggtgattcagactcagttagagacccttaaagaagtgtgggctgacatcatgagctcctccgtccacgctcaaagcactttagagtctgtgattagccaatggaatgactatgtagagaggaaaaaccagttggagcagtggatggaatcagtggatcaaaaaatagaacatcccttacaaccacagccaggtctgaaagagaagttcgtcctgcttgaccacctccagtccatcctgtctgaggcagaagatcacacgagagcccttcaccgtctaattgcgaagtccagggagctctacgaaaagacagaggatgagtctttcaaggacacagctcaagaggagctgaaaacacagtttaatgatataatgactgttgccaaggaaaaaatgaggaaagtggaagagattgtgaaagatcatctaatgtatttagatgcggtccacgagttcacagattggctccattcagcaaaggaagaacttcaccggtggtcagatatgtctggagattcatcagccacccagaaaaagttatcaaaaattaaggagctgatagattccagagagattggtgcaagccgtctcagcagagtggagtcgctggctcccgaagtgaaacagaacacaactgccagtgggtgtgagctcatgcacacggagatgcaggccctgcgtgccgactggaagcagtgggaagacagtgtattccaaacgcagagctgtttggagaacctggtcagccagatggccctttcggagcaggaattctcaggccaagtggctcaactggagcaggccctggaacagttcagtgcccttctgaaaacctgggctcagcagttaaccctcctggaaggcaagaacacggatgaggagatagtggaatgctggcacaaaggacaagagatactggatgctttgcaaaaagcagagcctagaacagaggatctcaagtctcagctgaatgaactttgtcgattttccagagacctgagtacctacagtggaaaagtttctggcttgattaaagagtataattgtctttgtttgcaagcatccaagggctgccagaataaagaacagattttacagcaaagatttcgaaaggccttcagggatttccagcagtggttggttaatgcaaaaatcactaccgccaagtgttttgatatacctcaaaatataagtgaagtttcaactagtcttcagaaaatacaggagtttttgtcagaaagtgaaaatggacagcacaagctaaacatgatgctgtctaaaggggaacttctgagtaccctgctgaccaaagagaaagcgaaagggatccaggccaaagttacagctgcaaaagaagattggaaaaattttcattcaaatctccaccaaaaagaatctgctctagagaatctaaagatccaaatgaaggactttgaagtaagtgctgagcctatccaggactggctgagtaaaactgagaagatggtccatgaaagcagcaatcgcctctatgatctgccagcaaagaggagggagcagcagaagctccagtctgtccttgaggaaatacactgctacgagcctcagctcaacaggctgaaagagaaagctcagcagctgtgggaaggacaagctgccagcaagagctttaggcacagagtgtcgcagctgtcttctcagtatctagcgctaagcaatttaacaaaggagaaagtgtcaagactggatagaatcgttgcagaacacaatcagttctctcttgggattaaagaattacaagactggatgacggatgcgattcacatgctggattcatactgccacccgacatccgacaaaagtgtgctggacagcaggacgctcaagctcgaggctctattatcagtcaaacaggaaaaagagattcagatgaaaatgatagtgaccaggggagaatctgtccttcagaatacttctccagaaggcattcccactattcagcagcagctgcagagtgtgaaggatatgtgggcatcccttttgtctgcagggattcgttgtaaaagccaactcgaaggagctctctccaagtggacaagttatcaggatggcgttcgacagttctccggttggatggatagtatggaagccaacctgaatgaatcagaaaggcagcatgcggagctgcgggataaaacaacgatgctcggaaaagccaagttattaaatgaagaagtgctgagttacagcagcttgctggagaccatcgaagtcaaaggggctggcatgacagaacactatgtcacccagctagaactccaggatctacaggaacgatacagagccatccaagagagggccaaggaagccgtaaccaagtctgaaaaacttgtccgcctgcaccaagagtatcagagagacctaaaggcatttgaagtttggttggggcaagaacaagaaaagctcgaccagtattcagttcttgaaggtgatgcccacactcatgagacaacattgcgtgatcttcaggagctacaggtacactgtgcagaggggcaggccctgttgaactcagtgctgcacaccagagaggatgtgatcccatcaggtatcccacaggcagaggaccgggctttagagtctctccggcaagactggcaggcttaccagcacaggctgtccgagactcgaactcagttcaataacgtggtgaacaaattgaggctaatggagcaaaagtttcagcaagtagatgaatggctcaaaacagcagaggagaaagttagtcccaggaccagacgtcagtctaacagggcaaccaaggagatacaattacatcagatgaagaagtggcacgaagaagtgactgcatacagagatgaagttgaggaagtgggagctagagctcaggagatactggacgagagccacgtgaacagcagaatgggttgccaggccacccagctgacttccagataccaggccctgcttctccaagtgctggaacaaataaaattcctggaggaggagattcagagtttggaggaatcagaatcatccctcagttcctattctgattggtatggctctactcataaaaacttcaagaatgtggctaccaagattgacaaagtagatacagtaatgatggggaagaaattgaagacgttggaggttttgctcaaagacatggagaaaggtcacagtttgctgaaatcagcccgggagaaaggagagagggctgttaaatacttggaggaaggcgaggcagagaggttaagaaaggagattcatgatcacatggagcagttgaaggaactgaccagcactgtccggaaagaacacatgacgctggaaaaaggtcttcatttagcaaaggaattctcagataaatgcaaagcactgacacagtggatagcagaataccaggaaattctacatgttcctgaagaacccaaaatggaattatatgagaaaaaagctcagttatctaaatacaagtcacttcaacaaacggtgctgtcccatgaaccatcagtaaagtcagtgagagagaagggtgaagctcttttggaactggtgcaggacgtcactttaaaggacaaaatagatcaacttcaaagtgattaccaggacctgtgcagcataggaaaggagcatgtcttcagtctggaggcgaaagtcaaagaccatgaagactacaacagtgagctccaagaggtcgaaaagtggctgctgcagatgtctggcagactggtggcacctgacctcctggagacaagcagcctggagacaatcacccagcaattggcccaccacaaggcaatgatggaagaaattgctggttttgaagaccgtttgaacaatcttcaaatgaaaggtgatactttgattggccaatgtgcagaccacctgcaagcgaaacttaaacaaaacgtgcatgctcatctgcagggcacaaaggacagctactcagcgatctgcagcacagctcagaggatgtaccagagtttggaacacgaacttcagaagcacgtcagccgacaagacaccctgcagcagtgccaggcctggctttctgcagtccagccggatttagagccaagtcctcaaccacctcttagtagggcagaagccattaagcaggtcaaacacttcagagctttgcaagagcaggcaaggacctacctagatctcctttgctccatgtgtgacctgtcaaatgcttcggtgaaaaccacagcaaaagacattcaacaaacagagcaaacgattgaacaaaagcttgtccaggcccagaacttaactcagggctgggaagagatcaagcacctgaagtctgagctctggatttacctgcaagatgctgatcagcaactgcagaacatgaagaggaggcactctgagctggagctgaacattgcacagaacatggtttcacaagttaaggattttgttaagaaactacagagcaaacaggcatccgtgaacaccataatagaaaaggtgaataagttaacaaagaaggaggaatcgcctgaacacaaggaaataaatcatttaaatgatcagtggctcgatttgtgccgtcagtctaacaacctgtgcttgcaaagggaagaggatcttcagagaacaagagattaccatgactgtatgaatgttgttgaagtgttcctagaaaaatttactacagaatgggataacttggccagatctgatgcagagagtacagctgtccacctggaagctttgaaaaagttagcattggcattgcaggagagaaagtatgctattgaagatctgaaagatcaaaagcagaaaatgatagagcatctgaatttagatgacaaggagttagtcaaagaacagacgagtcatttagagcaacgttggtttcagcttgaggacctcattaaaaggaaaatccaagtgtcagtcaccaacttggaggagttaaatgtggtgcagtccagatttcaggagctaatggagtgggcagaagagcaacaacccaacatcgccgaggcccttaagcagagccctcctccagatatggctcagaaccttctcatggatcacctggccatctgcagtgaactggaggccaagcagatgctcctgaaatcgcttataaaggacgcagacagggtcatggcagatcttggtctcaatgagcgacaggtcatccagaaggctctctctgatgcacaaagccacgtgaattgtctcagtgacttagtgggccagcgaagaaagtacttaaacaaagccttgtccgagaaaacccagtttctcatggcagtgttccaggccaccagccaaattcagcaacatgagcgaaagataatgttccgtgaacacatctgtctgttaccagatgatgtgagcaaacaagtcaaaacatgtaagagtgcacaagccagcctcaagacttaccaaaatgaagtcactggactttgggcccagggtcgcgaactaatgaaggaagtcacagagcaggaaaagagtgaagtgctggggaagcttcaggaattgcagagtgtctatgacagtgttttacaaaagtgcagtcaccggttacaagaactagagaagaatttggtttctaggaagcattttaaggaagattttgataaagcttgccactggctaaaacaagcagatattgttacatttcctgaaatcaacctaatgaatgagagttctgagcttcatacacaactggctaaataccaaaacattcttgaacaatctccagaatatgaaaatcttctacttacgctgcagagaactgggcagaccatattaccatcgctgaatgaagtcgatcattcctacctcagtgaaaagctaaatgctttgcctcgacaatttaatgtaattgttgccttggctaaagacaagttctataaagtccaggaagcaattcttgctcggaaggaatatgcttccttgattgagttgacaacccagtctctgagtgaacttgaagcccaattcttgaggatgagcaaagttcccaccgacctggccgttgaggaggctctttctctgcaagatggttgcagagccattctggacgaggtggcgggccttggggaggcggtggatgaactgaaccagaaaaaagaaggttttcgcagcacaggtcagccttggcagccagacaagatgctgcaccttgtcaccttatatcacaggctgaagcgacaaacagaacagagggttagcttattagaagacaccaccagtgcttaccaagaacacgagaagatgtgccaacagctggagagacaactgaagtctgtaaaagaggagcagtccaaagtgaatgaggaaacgctgcctgcagaggagaagctcaaaatgtatcactccctggcaggaagtctccaggactcagggattgtactgaaacgagtaaccatacatcttgaagatcttgccccacaccttgaccccttggcttatgagaaagccaggcatcagatccagtcctggcaaggggagttaaaactgttgacttctgccattggtgagacggtgacagaatgtgagagccgaatggtgcagagtatagacttccagactgagatgagtcgctccctggactggctgaggagagtgaaggcagagctcagtgggccggtgtacctagacctcaacctgcaggacatccaagaggaaatcagaaaaatccaaattcatcaggaagaggtccagtccagcttgagaatcatgaatgcgctgagtcacaaggaaaaggagaagttcacaaaggccaaggagctgatttctgcggatttagaacacagcctcgctgagctctcagagctggatggagacatccaggaagccttacgcaccagacaggctaccttgactgaaatatatagccagtgtcaaaggtattatcaggtatttcaagcagccaatgactggcttgaggatgcccaagaattgttacagctggcaggcaatggcctagacgtggagagcgcagaggaaaatctcaaaagccacatggaatttttcagtacagaggatcagttccatagtaacctggaggagctccacagcctggtagccaccctggacccactcatcaagccaaccggcaaagaagacctagaacagaaagtggcttctctggaactcaggagccagaggatgagccgggactctggtgcccaagtggatctcttgcagagatgcacagctcaatggcacgattaccagaaagcaagggaagaggttattgaattgatgaatgatacagaaaagaaattgtctgagttttctttgttgaagacttcgtctagtcatgaagcggaagaaaaattgtcagaacacaaggctttagtgtcagtggttaactctttccatgagaaaattgtggcccttgaggaaaaagcttcacaactggagaaaaccggaaatgatgccagcaaagccaccctgagcaggtcaatgaccaccgtctggcagcgctggacacgccttcgagctgtggcccaggaccaggagaagatcctggaagatgcagtggatgagtggacgggctttaacaacaaggttaaaaaggccactgaaatgattgatcagctgcaagataagttacctggaagttcagcagagaaagcatcgaaagcagagctcttaactcttcttgaataccacgacacgttcgttctggagctggagcagcagcagtcggccttgggcatgctgcggcagcaaaccctgagcatgctccaggatggagccgccccaacccctggggaagagcctccgctcatgcaggaaatcaccgccatgcaagatcggtgcctgaacatgcaggagaaagtgaagactaatggaaagttggtgaagcaagagctgaaggaccgagaaatggtggagactcagatcaattctgtgaaatgttgggttcaggaaacgaaagaatatttagggaatccaacaatagaaatagatgctcaacttgaagaacttcagattctcctaacagaagccacaaatcaccgacagaacattgaaaaaatggcagaagaacagaaggagaagtacttaggtctttataccatattaccttctgaactctcccttcagttggctgaagtggcgttagatctaaagatccgagatcagatccaagacaaaataaaagaagttgagcagagcaaggccacgagccaggaactcagccggcaaattcagaagttagctaaagacctcacaactattctaactaagctgaaagcgaagacagataatgtagttcaagctaaaactgaccaaaaggtgctgggagaggaattagatggctgtaattcaaagttaatggaattagatgcagcagtacagaaattcttggaacagaatggccaactgggtaagccactggccaagaagataggaaaactgactgaacttcaccagcagaccattagacaagctgagaatcggctctccaagctcaatcaggcagcatcacatttagaagaatacaatgaaatgcttgaattaattttgaagtggattgaaaaagctaaagtcttggctcatggaactattgcatggaattctgcaagccagcttcgggaacaatatattttgcatcagaccctgctagaagaatccaaagaaattgacagtgagctggaagcaatgactgagaaattacagtacctcactagcgtgtactgtacagaaaaaatgtctcagcaagtggcagaactgggacgggagactgaggagttgcgacagatgatcaaaattcgtttgcagaacctccaagatgcagctaaggatatgaaaaaatttgaagcagagttgaaaaagttacaagctgccttggagcaagcccaggcaacactgacttctccagaagttggacgtctcagtctcaaggagcagctctctcatcggcagcatttgttgtctgagatggagtcactgaagccgaaggtgcaagcagtgcagctctgccagagtgccctccggatccccgaggatgtggttgccagcttacctctctgtcatgctgctctgcggctgcaggaagaggccagccggctgcagcacaccgccatccagcagtgtaacatcatgcaggcagctgtggtacaatatgaacaatatgagcaagaaatgaaacatctccagcaactgatagaaggagctcacagagagattgaggataaacctgttgccaccagtaacatacaggagctgcaggctcagatttctcggcatgaggagctggcgcagaaaattaagggctaccaggagcagatcgcttctttgaattccaagtgcaagatgctgacgatgaaagccaagcacgccaccatgctgctgacggtgaccgaggtcgaggggctggcggaagggacagaggacctggatggggagctcctccccacgccttcggcccacccctctgtggtcatgatgactgcaggtcgctgtcacactttgctgtcaccggtcactgaggagtctggggaggagggaaccaacagtgagatttcctctccacctgcctgtcgctccccttcacctgtggctaatacagatgcttctgttaaccaggacattgcatattaccaagccttgtctgctgagaggttgcagacagatgctgcaaaaattcaccccagcacatccgcatcccaggagttctatgaaccgggattggagccatccgctactgccaaactgggtgatttgcagcgttcttgggaaaccttaaagaatgtgatcagtgagaagcagcgcacactctatgaagctttggaacgccagcagaagtaccaggactccctccagtccatctctacgaagatggaggccattgagctgaaactcagtgagagcccagagcctggcaggagtccagaaagccagatggctgaacatcaggcattgatggatgagattctcatgctccaggatgaaatcaatgagctccagtcctctctcgcagaggagctggtatccgagtcttgtgaggccgaccctgcggagcagctggccttgcagtccacgctcactgtcttagccgagcgaatgtccaccatcaggatgaaagcctcggggaaacggcagcttttggaggagaagttgaatgatcagctggaggaacaaaggcaggaacaggccctgcagaggtatcgctgtgaagccgatgagctggacagctggctcttgagtaccaaggccactctggacactgcgctgagtccacccaaggagcccatggacatggaggcccagcttatggactgccagaatatgctggtggaaatagagcagaaggtggtggctttatcagaactgtcagtccacaatgagaacctgctgctggagggcaaagctcacaccaaggacgaggccgagcagctggctggaaagctgagaaggctcaaggggagcctgctggagctgcagagagccctgcatgataagcagctcaacatgcagggaacagcacaggagaaggaggagagcgatgttgacctaacagccacgcagagccccggcgtccaggaatggctggcccaagctcgcaccacatggacccagcagcggcagagcagtctccagcaacaaaaagagttagaacaggaattagccgagcagaagagtctccttcgctcagtagccagtcgtggagaggagattctaattcaacattcggcggcagagacctctggtgatgctggcgaaaaacctgatgtgttatcccaggagttggggatggaaggggagaaatcatccgctgaagaccagatgagaatgaaatgggaaagcctacatcaagaatttagtaccaagcagaaactactacagaatgttctggaacaggaacaagagcaagtgctttatagcaggccaaatcgactcttgtctggtgtgccactgtacaaaggggacgtgccaacccaagataaatctgcagttacatctttgctggatggactgaaccaagccttcgaggaggtttcatcccagagtggaggggcaaagaggcagagtatacacttggagcagaagttgtatgatggagtctcagccacctctacttggttggatgacgttgaagaacgtttatttgttgccacagcacttttaccagaagaaacagagacttgtctcttcaaccaagagattcttgccaaagacattaaggaaatgtctgaagaaatggataagaacaaaaacttgttttcccaagcttttccagagaatggtgataatcgagatgttattgaagatactttgggttgtcttttgggcaggttatccttgctagactcagtagtgaatcaacgatgtcatcagatgaaagaaagacttcagcaaatactaaatttccagaatgatctgaaagtgctgtttacatcactggctgacaacaaatacatcattctgcaaaaactggcaaatgtgtttgaacagcccgtagcagaacaaatagaggcaatacaacaggctgaagatggactcaaagaatttgatgcaggaatcattgaattaaagaggcgtggtgacaagctacaggtcgagcagccgtccatgcaagaactctccaagctccaggacatgtatgatgagctgatgatgatcattggctcccggaggagtggtctgaatcagaaccttacactcaagagtcagtatgagagggccctacaagatctggctgacctgctagaaactggtcaggagaagatggcaggagaccagaaaatcatcgtgtcttccaaagaggaaatccagcaactacttgacaaacataaggaatactttcagggcctggaatctcatatgatcttgactgaaacactcttcagaaagataatcagctttgcagtccaaaaggaaacccagttccatacagagctgatggctcaggcttctgctgtactgaaacgggctcacaagaggggtgtggagctggagtacattctagagacgtggtcccatctggatgaggaccagcaggagctcagcagacagctggaggtggtggaaagcagcatcccaagcgtgggtctggtggaggagaacgaggacaggcttattgaccgcataacactctaccagcatttaaaatctagccttaatgaataccagcccaaattatatcaagtattagatgatgggaaacgacttctgatatccatcagctgctcagatctagaaagccaactaaatcaacttggagagtgctggctaagtaacaccaataaaatgtctaaggaacttcacagactggaaacaatattgaaacactggaccagatatcaaagtgaatctgcagatctaattcactggttacaatctgcaaaagaccggctagaattttggactcagcaatctgtgacagtcccacaagagctggaaatggtccgtgatcatctaaatgctttcctggagttttctaaagaagtggatgcccaatcttccctgaaatcatctgttctgagtactggaaatcagctccttcgactaaaaaaggtggacacagccacgctgcgctctgagctgtcgcgcattgatagccagtggactgacctgctaaccaatatcccagccgtccaggagaagctccaccagctccagatggataaactgccttcccgccatgccatttctgaagtcatgagttggatttctctaatggaaaatgttattcagaaggatgaagataatattaaaaattccataggttacaaggcaattcatgaataccttcagaaatataagggttttaagatagacattaactgtaaacagctgacagtggattttgtgaaccagtccgtgctacaaatcagcagtcaggatgtggaaagtaagcgtagtgataagactgattttgctgagcaacttggagcaatgaataaaagttggcaaattctgcaaggtctagtaactgagaagatccagctgttggaaggcttattggaatcttggtcagaatatgaaaataatgtacaatgtctgaaaacatggtttgaaacccaggaaaagagactaaaacaacagcatcgaattggagatcaggcttctgttcaaaatgcactgaaagactgtcaggatctggaagatttgattaaagcaaaagaaaaagaagtagagaaaattgagcagaatggacttgctttgattcagaacaagaaagaagacgtctctagcattgtcatgagcacactgcgagagctcggccaaacctgggcaaatttagatcacatggttggacaattaaagatactgctgaaatcagtgcttgaccaatggagtagtcacaaagtggcctttgacaagataaacagttacctcatggaggccagatactctctttcccgattccgtctgctgactggctccttagaagctgtgcaagttcaggtggacaatcttcagaatctccaagatgatctggaaaaacaggaaaggagcttacagaaatttggctctatcaccaaccaattattaaaagagtgtcacccacccgtgacagaaactcttaccaatacactgaaagaagtcaacatgagatggaataacttgctggaagagattgctgagcagctacagtccagcaaggccctacttcagctttggcaaagatacaaggactactccaaacagtgtgcttcgacagttcagcagcaggaggatcgaaccaatgagctgttgaaggcagccacaaacaaggacattgccgatgatgaggttgccacatggattcaagattgcaacgacctcctcaaaggactgggcacagttaaagattccctcttttttctccatgagctgggagagcaactgaagcaacaagtggatgcttccgcagcatcagctattcaatcggatcaactctctttgagtcaacacttgtgtgccctggagcaagctctctgcaaacagcagacttcattacaggctggagttcttgattatgaaacctttgccaagagtttagaagctttggaggcctggatagtggaagctgaagaaatactacaagggcaggaccctagccactcatctgacctctccacaatccaggaaaggatggaagaacttaagggacagatgttaaaattcagcagcatggctccagatttagaccgtctaaatgagcttggatataggttacccttgaatgataaggaaatcaaaagaatgcagaatctgaaccgccattggtctctgatctcctctcagactacagaaagattcagcaagttgcagtcatttttgctacaacatcagactttcttggaaaaatgtgaaacatggatggaattcctagttcagacagaacaaaagttagcagtagagatttcaggaaattatcagcaccttttggaacagcagagagcacacgagttgtttcaagccgagatgttcagtcgtcagcagattttgcactcaatcattattgatgggcaacgtcttctagaacaaggtcaagttgatgacagggatgaattcaacctgaaattgacactcctcagtaatcaatggcagggagtgattcgcagggcccagcagaggcgggggatcattgacagccagattcgccagtggcagcgctatagggagatggcagaaaagcttcgtaaatggttggttgaagtgtcctacctccccatgagtggtctcggaagtgttcctataccactgcaacaagcaaggaccctctttgatgaagtgcagttcaaagaaaaagtgtttctgcggcaacaaggcagctacatcctgactgtggaggctggcaagcaactccttctctcggcggacagtggcgctgaggccgccttgcaggccgaactcgctgaaatccaagagaaatggaaatcagccagcatgcggctggaagaacagaagaaaaaactagccttcttgttgaaagactgggaaaaatgtgagaaaggaatagcagattccctggagaaactacgaactttcaaaaagaagctttcgcagtctctcccggatcaccatgaagagctccatgcagaacaaatgcgttgcaaggaattagaaaatgcagttgggagctggacagatgacttgacccagttgagcctgctgaaggacaccctctctgcctatatcagtgctgatgatatctccattcttaatgaacgcgtagagcttctgcaaaggcagtgggaagaactatgccaccagctctccttaaggcggcagcaaataggtgaaagattgaatgaatgggcagtcttcagtgaaaagaacaaggaactctgtgagtggttgactcaaatggaaagcaaagtttctcagaatggagacattctcattgaagaaatgatagagaagctcaagaaggattatcaagaggaaattgctattgctcaagagaacaaaatacagctccaacaaatgggagaacgacttgctaaagccagccatgaaagcaaagcatctgagattgaatacaagctgggaaaggtcaacgaccggtggcagcatctcctggacctcattgcagccagggtgaagaagctgaaggagaccctggtagccgtgcagcagcttgataagaacatgagcagcctgaggacctggctcgctcacatcgagtcagagctggccaagccaatagtctacgattcctgtaactcggaagaaatacagagaaagcttaatgagcagcaggagcttcagagagacatagagaagcacagtacaggtgttgcatctgtcctcaacctgtgtgaagtcctgctgcacgactgtgacgcctgtgccactgatgccgagtgtgactctatacagcaggctacgagaaacctggaccggcggtggagaaacatttgtgctatgtccatggaaaggaggctgaaaatcgaagagacgtggcgattgtggcagaaatttctggatgactattcacgttttgaagattggctgaagtcttcagaaaggacagctgcttttcccagctcttctggggtgatctatacagttgccaaggaagaactaaagaaatttgaggctttccagcgacaggtccacgagtgcctgacgcagctggaactgatcaacaagcagtaccgccgcctggccagggagaaccgcactgattcagcatgtagcctcaaacagatggttcacgaaggcaaccagagatgggacaacctgcaaaagcgtgtcacctccatcttgcgcagactcaagcattttattggccagcgtgaggagtttgagactgcgcgggacagcattctggtctggctcacagagatggatctgcagctcactaatattgaacatttttctgagtgtgatgttcaagctaaaataaagcaactcaaggccttccagcaggaaatttcactgaaccacaataagattgagcagataattgcccaaggagaacagctgatagaaaagagtgagcccttggatgcagcgatcatcgaggaggaactagatgagctccgacggtactgccaggaggtcttcgggcgtgtggaaagataccataagaaactgatccgcctgcctctcccagacgatgagcacgacctctcagacagggagctggagctggaagactctgcagctctgtcggacctgcactggcacgaccgctctgcagacagcctgctttctccacagccttcctccaatctctccctctcgctcgctcagcccctccggagcgagcggtcaggacgagacaccccggctagtgtggactccatccccctggagtgggatcacgactatgacctcagtcgggacctggagtctgcaatgtccagagctctgccctctgaggatgaagaaggtcaggatgacaaagatttctacctccggggagctgttggcttatcaggggaccacagtgccctagagtcacagatccgacaactgggcaaagccctggatgatagccgttttcagatacagcaaaccgaaaatatcattcgcagcaaaactcccacggggccggagctagacaccagctacaaaggctacatgaaactgctgggcgaatgcagtagcagtatagactccgtgaagagactggagcacaaactgaaggaggaagaggagagccttcctggctttgttaacctgcatagtaccgaaacccaaacggctggtgtgattgaccgatgggagcttctccaggcccaggcattgagcaaggagttgaggatgaagcagaacctccagaagtggcagcagtttaactcagacttgaacagcatctgggcctggctgggggacacggaggaggagttggaacagctccagcgtctggaactcagcactgacatccagaccatcgagctccagatcaaaaagctcaaggagctccagaaagctgtggaccaccgcaaagccatcatcctctccatcaatctctgcagccctgagttcacccaggctgacagcaaggagagccgggacctgcaggatcgcttgtcgcagatgaatgggcgctgggaccgagtgtgctctctgctggaggagtggcggggcctgctgcaggatgccctgatgcagtgccagggtttccatgaaatgagccatggtttgcttcttatgctggagaacattgacagaaggaaaaatgaaattgtccctattgattctaaccttgatgcagagatacttcaggaccatcacaaacagcttatgcaaataaagcatgagctgttggaatcccaactcagagtagcctctttgcaagacatgtcttgccaactactggtgaatgctgaaggaacagactgtttagaagccaaagaaaaagtccatgttattggaaatcggctcaaacttctcttgaaggaggtcagtcgtcatatcaaggaactggagaagttattagacgtgtcaagtagtcagcaggatttgtcttcctggtcttctgctgatgaactggacacctcagggtctgtgagtcccacatcaggaaggagcaccccaaacagacagaaaacgccacgaggcaagtgtagtctctcacagcctggaccctctgtcagcagtccacatagcaggtccacaaaaggtggctccgattcctccctttctgagccagggccaggtcggtccggccgcggcttcctgttcagagtcctccgagcagctcttccccttcagcttctcctgctcctcctcatcgggcttgcctgccttgtaccaatgtcagaggaagactacagctgtgccctctccaacaactttgcccggtcattccaccccatgctcagatacacgaatggccctcctccactctgaactaagcagatgccatctgcagaagtgctggtagcataaggaggatcgggtcataagcaatcccaaactaccaacaagaggaccttgatcttggcgaaagccctcggtgtggcagctttagccctcctccagatcacatgtgtgcaaattatggcttcagaggtggaagataaacagtgacgggggaacaaacagacaacaagaaggtttggaagaaatctggtttgagactctgaaccttagcactaaggagattgagtaaggacctccaaagttccccggactcatgaattctgggcccttggcccattctgtgcacagccaaggacttcagtagaccatctgggcagctttcccatggtgctgctccaaccatcagataaatgaccctcccaagcaccatgtcagtgtcgtacaatctaccaaccaaccagtgctgaagagattttagaaccttgtaacatacaatttttaagagcttatatggcagcttcctttttaccttgttttcctttggggcatgatgttttaacctttgctttagaagcacaagctgtaaatctaaaaggcacttttttttagaggtataaagaaaaactagatgtaataaataagatcatggaaggctttatgtgaaaaaagttgaatgttatagtaaaaaaaaaaagatatttatgtatgtacagtttgctaaagccaagttttgtttgtattgatttctttgcatttattatagatattataaaata

SEQ ID NO: 391 - protein, 8797 aa, Homo sapiens
MATSRGASRCPRDIANVMQRLQDEQEIVQKRTFTKWINSHLAKRKPPMVVDDLFEDMKDGVKLLALLEVLSGQKLPCEQGRRMKRIHAVANIGTALKFLEGRKIKLVNINSTDIADGRPSIVLGLMWTIILYFQIEELTSNLPQLQSLSSSASSVDSIVSSETPSPPSKRKVTTKIQGNAKKALLKWVQYTAGKQTGIEVKDFGKSWRSGVAFHSVIHAIRPELVDLETVKGRSNRENLEDAFTIAETELGIPRLLDPEDVDVDKPDEKSIMTYVAQFLKHYPDIHNASTDGQEDDEILPGFPSFANSVQNFKREDRVIFKEMKVWIEQFERDLTRAQMVESNLQDKYQSFKHFRVQYEMKRKQIEHLIQPLHRDGKLSLDQALVKQSWDRVTSRLFDWHIQLDKSLPAPLGTIGAWLYRAEVALREEITVQQVHEETANTIQRKLEQHKDLLQNTDAHKRAFHEIYRTRSVNGIPVPPDQLEDMAERFHFVSSTSELHLMKMEFLELKYRLLSLLVLAESKLKSWIIKYGRRESVEQLLQNYVSFIENSKFFEQYEVTYQILKQTAEMYVKADGSVEEAENVMKFMNETTAQWRNLSVEVRSVRSMLEEVISNWDRYGNTVASLQAWLEDAEKMLNQSENAKKDFFRNLPHWIQQHTAMNDAGNFLIETCDEMVSRDLKQQLLLLNGRWRELFMEVKQYAQADEMDRMKKEYTDCVVTLSAFATEAHKKLSEPLEVSFMNVKLLIQDLEDIEQRVPVMDAQYKIITKTAHLITKESPQEEGKEMFATMSKLKEQLTKVKECYSPLLYESQQLLIPLEELEKQMTSFYDSLGKINEIITVLEREAQSSALFKQKHQELLACQENCKKTLTLIEKGSQSVQKFVTLSNVLKHFDQTRLQRQIADIHVAFQSMVKKTGDWKKHVETNSRLMKKFEESRAELEKVLRIAQEGLEEKGDPEELLRRHTEFFSQLDQRVLNAFLKACDELTDILPEQEQQGLQEAVRKLHKQWKDLQGEAPYHLLHLKIDVEKNRFLASVEECRTELDRETKLMPQEGSEKIIKEHRVFFSDKGPHHLCEKRLQLIEELCVKLPVRDPVRDTPGTCHVTLKELRAAIDSTYRKLMEDPDKWKDYTSRFSEFSSWISTNETQLKGIKGEAIDTANHGEVKRAVEEIRNGVTKRGETLSWLKSRLKVLTEVSSENEAQKQGDELAKLSSSFKALVTLLSEVEKMLSNFGDCVQYKEIVKNSLEELISGSKEVQEQAEKILDTENLFEAQQLLLHHQQKTKRISAKKRDVQQQIAQAQQGEGGLPDRGHEELRKLESTLDGLERSRERQERRIQVTLRKWERFETNKETVVRYLFQTGSSHERFLSFSSLESLSSELEQTKEFSKRTESIAVQAENLVKEASEIPLGPQNKQLLQQQAKSIKEQVKKLEDTLEEDIKTMEMVKTKWDHFGSNFETLSVWITEKEKELNALETSSSAMDMQISQIKVTIQEIESKLSSIVGLEEEAQSFAQFVTTGESARIKAKLTQIRRYGEELREHAQCLEGTILGHLSQQQKFEENLRKIQQSVSEFEDKLAVPIKICSSATETYKVLQEHMDLCQALESLSSAITAFSASARKVVNRDSCVQEAAALQQQYEDILRRAKERQTALENLLAHWQRLEKELSSFLTWLERGEAKASSPEMDISADRVKVEGELQLIQALQNEVVSQASFYSKLLQLKESLFSVASKDDVKMMKLHLEQLDERWRDLPQIINKRINFLQSVVAEHQQFDELLLSFSVWIKLFLSELQTTSEISIMDHQVALTRHKDHAAEVESKKGELQSLQGHLAKLGSLGRAEDLHLLQGKAEDCFQLFEEASQVVERRQLALSHLAEFLQSHASLSGILRQLRQTVEATNSMNKNESDLIEKDLNDALQNAKALESAAVSLDGILSKAQYHLKIGSSEQRTSCRATADQLCGEVERIQNLLGTKQSEADALAVLKKAFQDQKEELLKSIEDIEERTDKERLKEPTRQALQQRLRVFNQLEDELNSHEHELCWLKDKAKQIAQKDVAFAPEVDREINRLEVTWDDTKRLIHENQGQCCGLIDLMREYQNLKSAVSKVLENASSVIVTRTTIKDQEDLKWAFSKHETAKNKMNYKQKDLDNFTSKGKHLLSELKKIHSSDFSLVKTDMESTVDKWLDVSEKLEENMDRLRVSLSIWDDVLSTRDEIEGWSNNCVPQMAENISNLDNHLRAEELLKEFESEVKNKALRLEELHSKVNDLKELTKNLETPPDLQFIEADLMQKLEHAKEITEVAKGTLKDFTAQSTQVEKFINDITTWFTKVEESLMNCAQNETCEALKKVKDIQKELQSQQSNISSTQENLNSLCRKYHSAELESLGRAMTGLIKKHEAVSQLCSKTQASLQESLEKHFSESMQEFQEWFLGAKAAAKESSDRTGDSKVLEAKLHDLQNILDSVSDGQSKLDAVTQEGQTLYAHLSKQIVSSIQEQITKANEEFQAFLKQCLKDKQALQDCASELGSFEDQHRKLNLWIHEMEERFNTENLGESKQHIPEKKNEVHKVEMFLGELLAARESLDKLSQRGQLLSEEGHGAGQEGRLCSQLLTSHQNLLRMTKEKLRSCQVALQEHEALEEALQSMWFWVKAIQDRLACAESTLGSKDTLEKRLSQIQDILLMKGEGEVKLNMAIGKGEQALRSSNKEGQRVIQTQLETLKEVWADIMSSSVHAQSTLESVISQWNDYVERKNQLEQWMESVDQKIEHPLQPQPGLKEKFVLLDHLQSILSEAEDHTRALHRLIAKSRELYEKTEDESFKDTAQEELKTQFNDIMTVAKEKMRKVEEIVKDHLMYLDAVHEFTDWLHSAKEELHRWSDMSGDSSATQKKLSKIKELIDSREIGASRLSRVESLAPEVKQNTTASGCELMHTEMQALRADWKQWEDSVFQTQSCLENLVSQMALSEQEFSGQVAQLEQALEQFSALLKTWAQQLTLLEGKNTDEEIVECWHKGQEILDALQKAEPRTEDLKSQLNELCRFSRDLSTYSGKVSGLIKEYNCLCLQASKGCQNKEQILQQRFRKAFRDFQQWLVNAKITTAKCFDIPQNISEVSTSLQKIQEFLSESENGQHKLNMMLSKGELLSTLLTKEKAKGIQAKVTAAKEDWKNFHSNLHQKESALENLKIQMKDFEVSAEPIQDWLSKTEKMVHESSNRLYDLPAKRREQQKLQSVLEEIHCYEPQLNRLKEKAQQLWEGQAASKSFRHRVSQLSSQYLALSNLTKEKVSRLDRIVAEHNQFSLGIKELQDWMTDAIHMLDSYCHPTSDKSVLDSRTLKLEALLSVKQEKEIQMKMIVTRGESVLQNTSPEGIPTIQQQLQSVKDMWASLLSAGIRCKSQLEGALSKWTSYQDGVRQFSGWMDSMEANLNESERQHAELRDKTTMLGKAKLLNEEVLSYSSLLETIEVKGAGMTEHYVTQLELQDLQERYRAIQERAKEAVTKSEKLVRLHQEYQRDLKAFEVWLGQEQEKLDQYSVLEGDAHTHETTLRDLQELQVHCAEGQALLNSVLHTREDVIPSGIPQAEDRALESLRQDWQAYQHRLSETRTQFNNVVNKLRLMEQKFQQVDEWLKTAEEKVSPRTRRQSNRATKEIQLHQMKKWHEEVTAYRDEVEEVGARAQEILDESHVNSRMGCQATQLTSRYQALLLQVLEQIKFLEEEIQSLEESESSLSSYSDWYGSTHKNFKNVATKIDKVDTVMMGKKLKTLEVLLKDMEKGHSLLKSAREKGERAVKYLEEGEAERLRKEIHDHMEQLKELTSTVRKEHMTLEKGLHLAKEFSDKCKALTQWIAEYQEILHVPEEPKMELYEKKAQLSKYKSLQQTVLSHEPSVKSVREKGEALLELVQDVTLKDKIDQLQSDYQDLCSIGKEHVFSLEAKVKDHEDYNSELQEVEKWLLQMSGRLVAPDLLETSSLETITQQLAHHKAMMEEIAGFEDRLNNLQMKGDTLIGQCADHLQAKLKQNVHAHLQGTKDSYSAICSTAQRMYQSLEHELQKHVSRQDTLQQCQAWLSAVQPDLEPSPQPPLSRAEAIKQVKHFRALQEQARTYLDLLCSMCDLSNASVKTTAKDIQQTEQTIEQKLVQAQNLTQGWEEIKHLKSELWIYLQDADQQLQNMKRRHSELELNIAQNMVSQVKDFVKKLQSKQASVNTIIEKVNKLTKKEESPEHKEINHLNDQWLDLCRQSNNLCLQREEDLQRTRDYHDCMNVVEVFLEKFTTEWDNLARSDAESTAVHLEALKKLALALQERKYAIEDLKDQKQKMIEHLNLDDKELVKEQTSHLEQRWFQLEDLIKRKIQVSVTNLEELNVVQSRFQELMEWAEEQQPNIAEALKQSPPPDMAQNLLMDHLAICSELEAKQMLLKSLIKDADRVMADLGLNERQVIQKALSDAQSHVNCLSDLVGQRRKYLNKALSEKTQFLMAVFQATSQIQQHERKIMFREHICLLPDDVSKQVKTCKSAQASLKTYQNEVTGLWAQGRELMKEVTEQEKSEVLGKLQELQSVYDSVLQKCSHRLQELEKNLVSRKHFKEDFDKACHWLKQADIVTFPEINLMNESSELHTQLAKYQNILEQSPEYENLLLTLQRTGQTILPSLNEVDHSYLSEKLNALPRQFNVIVALAKDKFYKVQEAILARKEYASLIELTTQSLSELEAQFLRMSKVPTDLAVEEALSLQDGCRAILDEVAGLGEAVDELNQKKEGFRSTGQPWQPDKMLHLVTLYHRLKRQTEQRVSLLEDTTSAYQEHEKMCQQLERQLKSVKEEQSKVNEETLPAEEKLKMYHSLAGSLQDSGIVLKRVTIHLEDLAPHLDPLAYEKARHQIQSWQGELKLLTSAIGETVTECESRMVQSIDFQTEMSRSLDWLRRVKAELSGPVYLDLNLQDIQEEIRKIQIHQEEVQSSLRIMNALSHKEKEKFTKAKELISADLEHSLAELSELDGDIQEALRTRQATLTEIYSQCQRYYQVFQAANDWLEDAQELLQLAGNGLDVESAEENLKSHMEFFSTEDQFHSNLEELHSLVATLDPLIKPTGKEDLEQKVASLELRSQRMSRDSGAQVDLLQRCTAQWHDYQKAREEVIELMNDTEKKLSEFSLLKTSSSHEAEEKLSEHKALVSVVNSFHEKIVALEEKASQLEKTGNDASKATLSRSMTTVWQRWTRLRAVAQDQEKILEDAVDEWTGFNNKVKKATEMIDQLQDKLPGSSAEKASKAELLTLLEYHDTFVLELEQQQSALGMLRQQTLSMLQDGAAPTPGEEPPLMQEITAMQDRCLNMQEKVKTNGKLVKQELKDREMVETQINSVKCWVQETKEYLGNPTIEIDAQLEELQILLTEATNHRQNIEKMAEEQKEKYLGLYTILPSELSLQLAEVALDLKIRDQIQDKIKEVEQSKATSQELSRQIQKLAKDLTTILTKLKAKTDNVVQAKTDQKVLGEELDGCNSKLMELDAAVQKFLEQNGQLGKPLAKKIGKLTELHQQTIRQAENRLSKLNQAASHLEEYNEMLELILKWIEKAKVLAHGTIAWNSASQLREQYILHQTLLEESKEIDSELEAMTEKLQYLTSVYCTEKMSQQVAELGRETEELRQMIKIRLQNLQDAAKDMKKFEAELKKLQAALEQAQATLTSPEVGRLSLKEQLSHRQHLLSEMESLKPKVQAVQLCQSALRIPEDVVASLPLCHAALRLQEEASRLQHTAIQQCNIMQAAVVQYEQYEQEMKHLQQLIEGAHREIEDKPVATSNIQELQAQISRHEELAQKIKGYQEQIASLNSKCKMLTMKAKHATMLLTVTEVEGLAEGTEDLDGELLPTPSAHPSVVMMTAGRCHTLLSPVTEESGEEGTNSEISSPPACRSPSPVANTDASVNQDIAYYQALSAERLQTDAAKIHPSTSASQEFYEPGLEPSATAKLGDLQRSWETLKNVISEKQRTLYEALERQQKYQDSLQSISTKMEAIELKLSESPEPGRSPESQMAEHQALMDEILMLQDEINELQSSLAEELVSESCEADPAEQLALQSTLTVLAERMSTIRMKASGKRQLLEEKLNDQLEEQRQEQALQRYRCEADELDSWLLSTKATLDTALSPPKEPMDMEAQLMDCQNMLVEIEQKVVALSELSVHNENLLLEGKAHTKDEAEQLAGKLRRLKGSLLELQRALHDKQLNMQGTAQEKEESDVDLTATQSPGVQEWLAQARTTWTQQRQSSLQQQKELEQELAEQKSLLRSVASRGEEILIQHSAAETSGDAGEKPDVLSQELGMEGEKSSAEDQMRMKWESLHQEFSTKQKLLQNVLEQEQEQVLYSRPNRLLSGVPLYKGDVPTQDKSAVTSLLDGLNQAFEEVSSQSGGAKRQSIHLEQKLYDGVSATSTWLDDVEERLFVATALLPEETETCLFNQEILAKDIKEMSEEMDKNKNLFSQAFPENGDNRDVIEDTLGCLLGRLSLLDSVVNQRCHQMKERLQQILNFQNDLKVLFTSLADNKYIILQKLANVFEQPVAEQIEAIQQAEDGLKEFDAGIIELKRRGDKLQVEQPSMQELSKLQDMYDELMMIIGSRRSGLNQNLTLKSQYERALQDLADLLETGQEKMAGDQKIIVSSKEEIQQLLDKHKEYFQGLESHMILTETLFRKIISFAVQKETQFHTELMAQASAVLKRAHKRGVELEYILETWSHLDEDQQELSRQLEVVESSIPSVGLVEENEDRLIDRITLYQHLKSSLNEYQPKLYQVLDDGKRLLISISCSDLESQLNQLGECWLSNTNKMSKELHRLETILKHWTRYQSESADLIHWLQSAKDRLEFWTQQSVTVPQELEMVRDHLNAFLEFSKEVDAQSSLKSSVLSTGNQLLRLKKVDTATLRSELSRIDSQWTDLLTNIPAVQEKLHQLQMDKLPSRHAISEVMSWISLMENVIQKDEDNIKNSIGYKAIHEYLQKYKGFKIDINCKQLTVDFVNQSVLQISSQDVESKRSDKTDFAEQLGAMNKSWQILQGLVTEKIQLLEGLLESWSEYENNVQCLKTWFETQEKRLKQQHRIGDQASVQNALKDCQDLEDLIKAKEKEVEKIEQNGLALIQNKKEDVSSIVMSTLRELGQTWANLDHMVGQLKILLKSVLDQWSSHKVAFDKINSYLMEARYSLSRFRLLTGSLEAVQVQVDNLQNLQDDLEKQERSLQKFGSITNQLLKECHPPVTETLTNTLKEVNMRWNNLLEEIAEQLQSSKALLQLWQRYKDYSKQCASTVQQQEDRTNELLKAATNKDIADDEVATWIQDCNDLLKGLGTVKDSLFFLHELGEQLKQQVDASAASAIQSDQLSLSQHLCALEQALCKQQTSLQAGVLDYETFAKSLEALEAWIVEAEEILQGQDPSHSSDLSTIQERMEELKGQMLKFSSMAPDLDRLNELGYRLPLNDKEIKRMQNLNRHWSLISSQTTERFSKLQSFLLQHQTFLEKCETWMEFLVQTEQKLAVEISGNYQHLLEQQRAHELFQAEMFSRQQILHSIIIDGQRLLEQGQVDDRDEFNLKLTLLSNQWQGVIRRAQQRRGIIDSQIRQWQRYREMAEKLRKWLVEVSYLPMSGLGSVPIPLQQARTLFDEVQFKEKVFLRQQGSYILTVEAGKQLLLSADSGAEAALQAELAEIQEKWKSASMRLEEQKKKLAFLLKDWEKCEKGIADSLEKLRTFKKKLSQSLPDHHEELHAEQMRCKELENAVGSWTDDLTQLSLLKDTLSAYISADDISILNERVELLQRQWEELCHQLSLRRQQIGERLNEWAVFSEKNKELCEWLTQMESKVSQNGDILIEEMIEKLKKDYQEEIAIAQENKIQLQQMGERLAKASHESKASEIEYKLGKVNDRWQHLLDLIAARVKKLKETLVAVQQLDKNMSSLRTWLAHIESELAKPIVYDSCNSEEIQRKLNEQQELQRDIEKHSTGVASVLNLCEVLLHDCDACATDAECDSIQQATRNLDRRWRNICAMSMERRLKIEETWRLWQKFLDDYSRFEDWLKSSERTAAFPSSSGVIYTVAKEELKKFEAFQRQVHECLTQLELINKQYRRLARENRTDSACSLKQMVHEGNQRWDNLQKRVTSILRRLKHFIGQREEFETARDSILVWLTEMDLQLTNIEHFSECDVQAKIKQLKAFQQEISLNHNKIEQIIAQGEQLIEKSEPLDAAIIEEELDELRRYCQEVFGRVERYHKKLIRLPLPDDEHDLSDRELELEDSAALSDLHWHDRSADSLLSPQPSSNLSLSLAQPLRSERSGRDTPASVDSIPLEWDHDYDLSRDLESAMSRALPSEDEEGQDDKDFYLRGAVGLSGDHSALESQIRQLGKALDDSRFQIQQTENIIRSKTPTGPELDTSYKGYMKLLGECSSSIDSVKRLEHKLKEEEESLPGFVNLHSTETQTAGVIDRWELLQAQALSKELRMKQNLQKWQQFNSDLNSIWAWLGDTEEELEQLQRLELSTDIQTIELQIKKLKELQKAVDHRKAIILSINLCSPEFTQADSKESRDLQDRLSQMNGRWDRVCSLLEEWRGLLQDALMQCQGFHEMSHGLLLMLENIDRRKNEIVPIDSNLDAEILQDHHKQLMQIKHELLESQLRVASLQDMSCQLLVNAEGTDCLEAKEKVHVIGNRLKLLLKEVSRHIKELEKLLDVSSSQQDLSSWSSADELDTSGSVSPTSGRSTPNRQKTPRGKCSLSQPGPSVSSPHSRSTKGGSDSSLSEPGPGRSGRGFLFRVLRAALPLQLLLLLLIGLACLVPMSEEDYSCALSNNFARSFHPMLRYTNGPPPL

SEQ ID NO: 392 - DNA, 5826 bp, Homo sapiens
gaggaggagacggcatccagtacagaggggctggacttggacccctgcagcagccctgcacaggagaagcggcatataaagccgcgctgcccgggagccgctcggccacgtccaccggagcatcctgcactgcagggccggtctctcgctccagcagagcctgcgcctttctgactcggtccggaacactgaaaccagtcatcactgcatctttttggcaaaccaggagctcagctgcaggaggcaggatggtctggaggctggtcctgctggctctgtgggtgtggcccagcacgcaagctggtcaccaggacaaagacacgaccttcgaccttttcagtatcagcaacatcaaccgcaagaccattggcgccaagcagttccgcgggcccgaccccggcgtgccggcttaccgcttcgtgcgctttgactacatcccaccggtgaacgcagatgacctcagcaagatcaccaagatcatgcggcagaaggagggcttcttcctcacggcccagctcaagcaggacggcaagtccaggggcacgctgttggctctggagggccccggtctctcccagaggcagttcgagatcgtctccaacggccccgcggacacgctggatctcacctactggattgacggcacccggcatgtggtctccctggaggacgtcggcctggctgactcgcagtggaagaacgtcaccgtgcaggtggctggcgagacctacagcttgcacgtgggctgcgacctcatagacagcttcgctctggacgagcccttctacgagcacctgcaggcggaaaagagccggatgtacgtggccaaaggctctgccagagagagtcacttcaggggtttgcttcagaacgtccacctagtgtttgaaaactctgtggaagatattctaagcaagaagggttgccagcaaggccagggagctgagatcaacgccatcagtgagaacacagagacgctgcgcctgggtccgcatgtcaccaccgagtacgtgggccccagctcggagaggaggcccgaggtgtgcgaacgctcgtgcgaggagctgggaaacatggtccaggagctctcggggctccacgtcctcgtgaaccagctcagcgagaacctcaagagagtgtcgaatgataaccagtttctctgggagctcattggtggccctcctaagacaaggaacatgtcagcttgctggcaggatggccggttctttgcggaaaatgaaacgtgggtggtggacagctgcaccacgtgtacctgcaagaaatttaaaaccatttgccaccaaatcacctgcccgcctgcaacctgcgccagtccatcctttgtggaaggcgaatgctgcccttcctgcctccactcggtggacggtgaggagggctggtctccgtgggcagagtggacccagtgctccgtgacgtgtggctctgggacccagcagagaggccggtcctgtgacgtcaccagcaacacctgcttggggccctccatccagacacgggcttgcagtctgagcaagtgtgacacccgcatccggcaggacggcggctggagccactggtcaccttggtcttcatgctctgtgacctgtggagttggcaatatcacacgcatccgtctctgcaactccccagtgccccagatggggggcaagaattgcaaagggagtggccgggagaccaaagcctgccagggcgccccatgcccaatcgatggccgctggagcccctggtccccgtggtcggcctgcactgtcacctgtgccggtgggatccgggagcgcacccgggtctgcaacagccctgagcctcagtacggagggaaggcctgcgtgggggatgtgcaggagcgtcagatgtgcaacaagaggagctgccccgtggatggctgtttatccaacccctgcttcccgggagcccagtgcagcagcttccccgatgggtcctggtcatgcggctcctgccctgtgggcttcttgggcaatggcacccactgtgaggacctggacgagtgtgccctggtccccgacatctgcttctccaccagcaaggtgcctcgctgtgtcaacactcagcctggcttccactgcctgccctgcccgccccgatacagagggaaccagcccgtcggggtcggcctggaagcagccaagacggaaaagcaagtgtgtgagcccgaaaacccatgcaaggacaagacacacaactgccacaagcacgcggagtgcatctacctgggccacttcagcgaccccatgtacaagtgcgagtgccagacaggctacgcgggcgacgggctcatctgcggggaggactcggacctggacggctggcccaacctcaatctggtctgcgccaccaacgccacctaccactgcatcaaggataactgcccccatctgccaaattctgggcaggaagactttgacaaggacgggattggcgatgcctgtgatgatgacgatgacaatgacggtgtgaccgatgagaaggacaactgccagctcctcttcaatccccgccaggctgactatgacaaggatgaggttggggaccgctgtgacaactgcccttacgtgcacaaccctgcccagatcgacacagacaacaatggagagggtgacgcctgctccgtggacattgatggggacgatgtcttcaatgaacgagacaattgtccctacgtctacaacactgaccagagggacacggatggtgacggtgtgggggatcactgtgacaactgccccctggtgcacaaccctgaccagaccgacgtggacaatgaccttgttggggaccagtgtgacaacaacgaggacatagatgacgacggccaccagaacaaccaggacaactgcccctacatctccaacgccaaccaggctgaccatgacagagacggccagggcgacgcctgtgaccctgatgatgacaacgatggcgtccccgatgacagggacaactgccggcttgtgttcaacccagaccaggaggacttggacggtgatggacggggtgatatttgtaaagatgattttgacaatgacaacatcccagatattgatgatgtgtgtcctgaaaacaatgccatcagtgagacagacttcaggaacttccagatggtccccttggatcccaaagggaccacccaaattgatcccaactgggtcattcgccatcaaggcaaggagctggttcagacagccaactcggaccccggcatcgctgtaggttttgacgagtttgggtctgtggacttcagtggcacattctacgtaaacactgaccgggacgacgactatgccggcttcgtctttggttaccagtcaagcagccgcttctatgtggtgatgtggaagcaggtgacgcagacctactgggaggaccagcccacgcgggcctatggctactccggcgtgtccctcaaggtggtgaactccaccacggggacgggcgagcacctgaggaacgcgctgtggcacacggggaacacgccggggcaggtgcgaaccttatggcacgaccccaggaacattggctggaaggactacacggcctataggtggcacctgactcacaggcccaagactggctacatcagagtcttagtgcatgaaggaaaacaggtcatggcagactcaggacctatctatgaccaaacctacgctggcgggcggctgggtctatttgtcttctctcaagaaatggtctatttctcagacctcaagtacgaatgcagagatatttaaacaagatttgctgcatttccggcaatgccctgtgcatgccatggtccctagacacctcagttcattgtggtccttgtggcttctctctctagcagcacctcctgtcccttgaccttaactctgatggttcttcacctcctgccagcaaccccaaacccaagtgccttcagaggataaatatcaatggaactcagagatgaacatctaacccactagaggaaaccagtttggtgatatatgagactttatgtggagtgaaaattgggcatgccattacattgctttttcttgtttgtttaaaaagaatgacgtttacatataaaatgtaattacttattgtatttatgtgtatatggagttgaagggaatactgtgcataagccattatgataaattaagcatgaaaaatattgctgaactacttttggtgcttaaagttgtcactattcttgaattagagttgctctacaatgacacacaaatcccattaaataaattataaacaagggtcaattcaaatttgaagtaatgttttagtaaggagagattagaagacaacaggcatagcaaatgacataagctaccgattaactaatcggaacatgtaaaacagttacaaaaataaacgaactctcctcttgtcctacaatgaaagccctcatgtgcagtagagatgcagtttcatcaaagaacaaacatccttgcaaatgggtgtgacgcggttccagatgtggatttggcaaaacctcatttaagtaaaaggttagcagagcaaagtgcggtgctttagctgctgcttgtgccgctgtggcgtcggggaggctcctgcctgagcttccttccccagctttgctgcctgagaggaaccagagcagacgcacaggccggaaaaggcgcatctaacgcgtatctaggctttggtaactgcggacaagttgcttttacctgatttgatgatacatttcattaaggttccagttataaatattttgttaatatttattaagtgactatagaatgcaactccatttaccagtaacttattttaaatatgcctagtaacacatatgtagtataatttctagaaacaaacatctaataagtatataatcctgtgaaaatatgaggcttgataatattaggttgtcacgatgaagcatgctagaagctgtaacagaatacatagagaataatgaggagtttatgatggaaccttaaatatataatgttgccagcgattttagttcaatatttgttactgttatctatctgctgtatatggaattcttttaattcaaacgctgaaaagaatcagcatttagtcttgccaggcacacccaataatcagtcatgtgtaatatgcacaagtttgtttttgtttttgttttttttgttggttggtttgtttttttgctttaagttgcatgatctttctgcaggaaatagtcactcatcccactccacataaggggtttagtaagagaagtctgtctgtctgatgatggatagggggcaaatctttttcccctttctgttaatagtcatcacatttctatgccaaacaggaacaatccataactttagtcttaatgtacacattgcattttgataaaattaattttgttgtttcctttgaggttgatcgttgtgttgttgttttgctgcactttttacttttttgcgtgtggagctgtattcccgagaccaacgaagcgttgggatacttcattaaatgtagcgactgtcaacagcgtgcaggttttctgtttctgtgttgtggggtcaaccgtacaatggtgtgggagtgacgatgatgtgaatatttagaatgtaccatattttttgtaaattatttatgtttttctaaacaaatttatcgtataggttgatgaaacgtcatgtgttttgccaaagactgtaaatatttatttatgtgttcacatggtcaaaatttcaccactgaaaccctgcacttagctagaacctcatttttaaagattaacaacaggaaataaattgtaaaaaaggttttctatacatgaaaaaaaaaaaaaaaaaa

SEQ ID NO: 393 - protein, 1172 aa, Homo sapiens
MVWRLVLLALWVWPSTQAGHQDKDTTFDLFSISNINRKTIGAKQFRGPDPGVPAYRFVRFDYIPPVNADDLSKITKIMRQKEGFFLTAQLKQDGKSRGTLLALEGPGLSQRQFEIVSNGPADTLDLTYWIDGTRHVVSLEDVGLADSQWKNVTVQVAGETYSLHVGCDLIDSFALDEPFYEHLQAEKSRMYVAKGSARESHFRGLLQNVHLVFENSVEDILSKKGCQQGQGAEINAISENTETLRLGPHVTTEYVGPSSERRPEVCERSCEELGNMVQELSGLHVLVNQLSENLKRVSNDNQFLWELIGGPPKTRNMSACWQDGRFFAENETWVVDSCTTCTCKKFKTICHQITCPPATCASPSFVEGECCPSCLHSVDGEEGWSPWAEWTQCSVTCGSGTQQRGRSCDVTSNTCLGPSIQTRACSLSKCDTRIRQDGGWSHWSPWSSCSVTCGVGNITRIRLCNSPVPQMGGKNCKGSGRETKACQGAPCPIDGRWSPWSPWSACTVTCAGGIRERTRVCNSPEPQYGGKACVGDVQERQMCNKRSCPVDGCLSNPCFPGAQCSSFPDGSWSCGSCPVGFLGNGTHCEDLDECALVPDICFSTSKVPRCVNTQPGFHCLPCPPRYRGNQPVGVGLEAAKTEKQVCEPENPCKDKTHNCHKHAECIYLGHFSDPMYKCECQTGYAGDGLICGEDSDLDGWPNLNLVCATNATYHCIKDNCPHLPNSGQEDFDKDGIGDACDDDDDNDGVTDEKDNCQLLFNPRQADYDKDEVGDRCDNCPYVHNPAQIDTDNNGEGDACSVDIDGDDVFNERDNCPYVYNTDQRDTDGDGVGDHCDNCPLVHNPDQTDVDNDLVGDQCDNNEDIDDDGHQNNQDNCPYISNANQADHDRDGQGDACDPDDDNDGVPDDRDNCRLVFNPDQEDLDGDGRGDICKDDFDNDNIPDIDDVCPENNAISETDFRNFQMVPLDPKGTTQIDPNWVIRHQGKELVQTANSDPGIAVGFDEFGSVDFSGTFYVNTDRDDDYAGFVFGYQSSSRFYVVMWKQVTQTYWEDQPTRAYGYSGVSLKVVNSTTGTGEHLRNALWHTGNTPGQVRTLWHDPRNIGWKDYTAYRWHLTHRPKTGYIRVLVHEGKQVMADSGPIYDQTYAGGRLGLFVFSQEMVYFSDLKYECRDI

SEQ ID NO: 394 - DNA, 11191 bp, Homo sapiens
ccgcgcgaacatggccgaagtcggcgaggacagcggcgcccgcgccctgctcgcgctgcgctcggcgccctgcagcccagtgctgtgcgccgcagccgccgccgccgccttccccgcggccgcacccccgccggcccccgcgcagccccagcctccgcccgggccgccgccgccgccgccaccgccgctgcctccgggcgcgatcgcgggcgcgggctcctccgggggctcctccggggtatccggggactccgcggtcgcgggcgcggcgccggccctggtggccgcggcggccgcctcggtacggcagagcccggggccggcgctggcgcggctggagggccgcgagttcgagttcctcatgcgccagcccagcgtcaccatcggccgcaactcgtcgcagggctcggtggacttgagcatgggcctgtccagcttcatctcgcggcgccacctgcagctcagcttccaggagccgcacttctacctgcgctgcctcggcaagaacggcgtcttcgtggacggggccttccagagacgcggcgcgcccgccctgcagctgcccaagcagtgtaccttccggtttcccagcacggccatcaagatccagttcacgtcgctctatcacaaagaagaggccccagcctccccgctgcggccactgtacccccagatctcccctctgaagatccacatcccggagccggacctccggagcatggtcagccccgtcccctccccgacgggcaccatcagtgtccccaactcctgcccagccagtccacgcggtgccggctcctccagttaccgctttgtgcagaacgtgacctcggacctgcagctggcagcagagtttgcagcaaaggccgcgtcggagcagcaggcagacacgtctggaggagacagccccaaggatgagtcaaagccgccgttctcctacgcgcagctgatcgtgcaggccatctcctccgcccaggaccggcagctgaccctgagcgggatctacgcccacatcaccaagcattacccctactaccggacggccgacaaaggctggcagaattctatccggcacaacctctctttgaaccgttactttatcaaagtcccacgttcccaggaggagcctgggaaggggtccttttggcgaatagaccctgcctctgaagccaagctcgtggaacaggcattccggaaacggaggcagaggggtgtctcctgcttccgcacccccttcgggcctctgtcctcaaggagcgctccagcttcgcccacacaccccgggctgatgtcccctcgctccggcggcctgcagaccccagagtgcctgtctcgggagggctcccccattccacacgaccctgagtttgggtccaagttagcttctgtcccagagtaccggtattcccaaagcgcacccggctcccccgtcagcgcccagccagtgatcatggccgtgcctccccgaccgtccagcctcgtggccaagcccgtggcctacatgcccgcctccatcgtaacctcacagcagcccgcgggccacgccatccacgtcgtgcagcaggcccccaccgtcaccatggtcagggtggtcaccacatctgccaactcggccaacggatacatcctcaccagccagggcgcggcggggggctcccatgatgcggcgggcgcagccgtgctggacctgggcagcgaggccagaggcctggaggagaaacccaccattgcgtttgccacaatccccgcggctggtggagtcatccagacggtggccagccagatggcccccggggtccccggacacacggtcaccatcctgcagcccgccacacccgtgaccctcgggcagcaccaccttccagtccgggccgtgacccagaacggaaagcatgcggttcccacgaacagtttagccggcaacgcttacgccctcaccagccctttgcagctccttgcgacccaagcgagttcatccgcgccggtggtggtcacccgggtgtgcgaggtggggcccaaggagccagcagcagccgtcgcggccacggccaccaccaccccagccactgccaccaccgcctctgcctccgcctcttccactggagagcccgaggtcaaaaggtcccgggtggaggagcccagtggggctgtaaccacaccggctggagtgatcgcagctgccggcccccaggggccaggcaccggggagtgaggtcacctgcaacgcgggggagtgggactcacccagcggcgaccccgaagctggacccggcagctcaggcggccgcacccacagacggaggagaacagcccgcggcggcctgtgggcatcggcggcacctggacacacccagccctttccatttgatcgcctgccttcccgtggtttaagacaaaaacacataaacaagttcagacaactgattgtatgattctgggaattctttgctttcctttccttctccctcggcaccacctcctctccccaggcctccctgtcgggcatggggaggaggttggagctcagcatcttgaggaatgtgtcaagacagcccctccgctccgcgctgcacggccagccgcctttgtccgggaggacagacagaaacgcagcaaggcacacaccaaggctgccggggaggcccgggcaccggacagatgcctgttgggaagccaggagctgccgagccacggaccacctaacagcctctccgcccggaacgtgacatagagagtgttggcattaactcggggggtgtccgatttcacttcagaccccaagtttttctttgtttgtttaaacatggaattcagacttcattgtacacctgagacagacacaaaagggatcatgtatttttgaggattttacctgttgacgtctgatgaccggccgtaggtccagggttcccgctgggtttaatcccctcgaagagtaaacctgccgctctgtctgataacttcaagtaagagcagcggcttcctgggttggcgttcgcggtggaaggttcctaggatgaaaggtgagcctggatccgccggccgcagacatcgcgctgctggggacgattggggccgctgctctgcagaccagaccttcccgaattatccgtggctccgatgtcccggtgctgacggccacatggggacctaacagtgccaaacgccatctgctccagctgctttttcacccagttgcagagtcctcaccactcccacattgatctgctgttttcaattggaaccatttctcctgcctgaaactccagggcccctccctgggctgtccgtgagcaggagaccccaccccagcagcagtggtgagcaggcctgtgcctccacgcccagcccccgccaacgcgactggttttgtttgccacacggtgagaaccggaggacgggatgctccagccagttgggtggttctggggtccctgaggaagccccctcctgcacttccattaagacagccagtggttcctggatctttgtcaccaagcagcgttgagccagagctgtctaatgctgagcccagctcaggaaggagagaggagtccttcagtgtgtcttggagatgcgaagtgcgtcctcgtaaaggtcagctgtcagttttgctggccgctccggcgctggctctcctgtccgggaccacaacgagaaacagcgacagattcgacgcagagctccggaagtgcctgaggagcagtggttcttggaaatcgcccgtcctccgcatcacagcctctcaccagcaaagcagcctctgcccaggccctggcgggagagctgcagagggacccaggtgcctggagggcatttgagggaggtggctggacaggtgtctccctgaagaagaagggagaacacttttcaaagtgattccgaggcagtgcgggaggacacacgtgctgtgcagtggagtggggtcgcccgtggcccccatcagagtccccgtcccccaggacaagtgcagaacctctgtgggccccctccttccacctagatagagaaaaccccttgttcggtttccttcccgtgtcccgttgtttttctaagccccccgaattgagtcgtttctatggcactaacctttccatgggaaataagctctttgtggaagtccgtacctgttgccctgggtgaggtttcagagaaacgggggcaggatgaacacagccggctgtcctgggtgcagttacgtccgtggagggtgagagattgcgccccgttccacacttgtgtcgcctgctgttgtctgtgggccttttctttccgtggtgcctggtgtgtgcgtgcatggcgtgagagaacggggggtgggggttggaggtggctccccgacaccggtgcctgtgtggcctgagccggcgccctcccgggagcgcccgtcacggggggcctctgtgattacctgctgctgctctctcccgcgtggtgactatatgtcctcagggctgcctgtggccaccctgatgggagacctctgtttgcttctgggccactgcaggttggcctcctcaatacaagctgatgtctgcagggagcgccgcgtgctgggattgcaccacgtgttggtcacaaatcgaggtcgccttttggcctggtctgctcaggctggccctgacccacgtggtttcctggcttctgagacgcagcgcattcttcctgttagcggtagcgttctctgatttcactgcttcattgccaagggcgtggaaagggggtggtggatggagccgggaggtggcgagcacaggaccccggggctgcattctgccgtgtggggttctgcactgtctagcttctgcggggactgcaaagagggatgaagggacgtggtcctaggggtcggctcagactcggagcagggcagggagaggagggcaaggagaggaggcctgggtcctggatccactgctctgggctcataaccatgagattttgaaagagtttttggtcatctgagcaggtaccatgcctggctcatgccggaacttgtcttggaaccggtagccagaggcccaggaagggacagggcccaaaagggttgcatgtcccggccacaaagccctccctgtgtgccctgagccagcccagcaagcgcctcccagccaggcgctttcgcagaagcaagagcacaggccagggggaccgggagagcctcagcccccagcctgggcggcctgtgaccctgagccgtgtggagccaggacccaagaaccttctctaggttctcaagggtgagctgacccgggcaatgtgcaggaatgtggggagcaaaagtagctgattccagccccgttctggggtcactggggaggcagaggctgagggcctgttctctggtcaccagggactgggggcacggtccacagcggatgagaacagcaggtcacagtagtggctttgggaagggcccctcctgctttgccctgttcggaaaggggctccctcagagcccctgggcccagtaacccgcttctgtctcctgactcctgctggataaattgccaggtttatcaaatacaagaaaacacctgctttggctaggaggtaagtcccaaaaagaacgtcttaagtagagcaaaggcatccaccgaggccatttggtggcccctgggaagtggggaagcagggcctgagcgtccccaggctgctagggcagcagctggctcagggcacactctctcgtgccagcttctgccaccagcccagtgtccacggagccgcggggccagaggagctcagggagacctggctgtctagggcatggtacccagtatcccggtgtgtgcccatcctcagccacttgtgtctttctttccatgtgggagttctcccggtgacacctgccctccgttgagggtggaatctgtcactcatgcctttgagggacccagatggaccatccctcttctgcttgctttctacattcctaaaaacctcaacgttaatccctcaccagtcgggccgagtgtggcctcatggttctgccgcggcccagtcttctcccactggcttcacgctagagggcgccatgcgctctgggtgaaatgagacgctggtgtggggtccccatgtagagaccctcaggtccctatccagagaccctccaggcagtgctgggaagacactggtggcggggaccatgaccaggcgggtggagccatgtgtgtctcacacctgccgcccctcactttccttcccgaggtctggtaggtcctctttgggatttgctgtttatttgtatctcccttttctttgatttaagaacaatgccaagtgaaaaagctgggaatgaatttctgagttgctgagtgttccctgctcctaggtaccacgctctgtgcttctcaggcagggaggagatggattcggtggagttgggccaggacgggggcttcaccctgccccctccagactgccgaagcccccaagaagttttgagcccagctgggcctcgcctccccggctcctgggtccattttctgtactggtttgagatcacaggcatcattcagcgaatgctcttgtgtcctctgcataaagagggccctccctggagcacccccggggagctgggactctccagaaagccccgggtgagggctccgtcttgagagagagagaaatcccttctttgggcgattcagtgagttcaggaggaggaggaagcttttccttggctttgaaatcagtgtttttatggagacaaagaacagacctcagtgggaaaaatgaaaacgtaatggaacacggggaggtgtcggagaagaaaggattttccccttcgctttcagagccggcgggagtgcaggtctgttttgcttcagaagcctcacattctgctttgcccttgagtgacttcatgcgggatgaggaactgttgacccctctagagaggacaccccaagtccatcctgggctcctcctcacccctctgagaaagcccccctaaaaaaaggcttcagagtcaccggcatgccgcctcacgttgcaggacggaatcgcgcgctcctcacgctggagtaagttacgaaacatgatcgtcaggctctttgcaaacgcagagccccagaacgctggatggaggcctcctcggccctgcgggcggcctggctgcggtaggtctgctgcaaggagccaccacggggactgcgccacactcctgatgaaaacgtgtttacccacagcctcgcctcgagcctccttgacaataccgctgcttcaaagcaatattatttaatgagaatactttacattgctcacatgtgctgctatgaagacaggattagtctgtagacgggactcagctccagaggttcctgggtaatgtattgtggctcttggaaatgagggtagaatttgaaatataacaaatggtctctcgcccggttctgtcccttatttttagattgttttcctgcatcttacaatttccttttcttttcaaagttcctttctccaggcctgtttttcagtgctcaggacacggttttcatcacatacttactgtttttttggttgggttttgatacgaaaagctgctacgtttggtgaccagagggagggtttggaatctgtgctttgcaggggatctcggtgggtaccgcggcccctcgcagggtggcgagtggggtccgtgcctcgagaagggggcccttacccacaccgtgcggcttgaattctgtcggagttgaatctgtggaaaggattgtcccattagagctgctgcgtcctttcctctgtcctccctgtcacccaaaccccgaagtcacagctgcttagaagaatgggattttggggatacaaccacacacatttccctctggactgaaattttaaaaacagacccatttcactgacttctttttttttttttttttttttttttttttgagacggagtctcgctctgtcgcccaggctggagtgcagtggcgtgatctcggctcactgcaagctccgcctcccgggttcacgccattctcctgcctcagcctcccgagtagctgggactacaggcgcccgctaccacgcccggctaattttttgtatttttagtagagacggggtttcaccgtgttagccaggatggtctcgatctcctgacctcgtgatccgcccgcctcggcctcccaaagtgctgggattacaggcgtgagccaccgcgcccggcccactgacttctttagggaaaatagtttcagtcttgggttgtcttgtgagcccacgggcatgggaccctgtctctgctgggcttttccggccccgtcccagctcctcctcaggcagaggctgcagccctcagctctgctgctggatggaacatttcaaccccctccgggaaggtgggcagggtggagggcccagggctaggcctgccatgcaccatgagcaggggtgctacctgggtgtgtgaagttgggctggcttttcctggaggtgggtgagaaggctctccgggcaaatcagaaggccacgagagagagaggagcggggagagtggtgaggaggattcgtctctgactgatgaacctcgccgtgcctgtctgtcacatccaagtctgtgccagctgctgggaggtcagactcctgccctgagaaacagcccagtccttggagaatgaaaccctgagggtcagtgagtggaggccttccctcggggccagccattcccgggaggcctgagtgtgacctggaagctctgtgggtcaccaagactggcattttccttgtatttttgtgcagggctgaagtgagcgttcctcctctgaattggtgaggctttggaaattttttgtttcttctactcatcctaatggctggttttggctgcccggagtatcagagaatatcactaagagggcagtcagtttatttttaggcatctttctttctgtccagggagaaacccctcggaagaatcttagtcactctttgcacctgccctgtcattctcgccatggggaaaatgcgttgaaaagaaaaataccggggccagggagaagccgtgaatgtatttatttgctttggtgaagctgctgaacactggctgcggagggccccccgcccccatcccgcttcaggccccagtgacccagttgcgtcttaagttccatcgtccagatttcaggccaccagaggctgccaaaggtgactgaagcggtctccaagtcactctgtcaccactttttttttttttgagatggagtctcgctctatcgcccaggctggagtgcagtggcccaatctcggctcactgcaacctccgcctcccaggttcgagcgaattctcctgcctcaacctcccaagtagctgggattacaggcacctgccaccacacccggctaatttttgtatttctaatagagatgagagtgttaccatgttggtcaggctggtcttgaactcctgacctcaggtgatctgcccacctcaacctcccaaagtgctgggattataggcatgagccaccgcgcctggcctctgtcactttttttgctccttacccagtttttgttttttgttgttttgttttgttttagcgtgatactacaatggaaagactcctagttggttattctttatctcggattcttttttctggaattgtttgctcatttgagtggttggtggtttgccctgtgtcagacacggtgaaaagagtgcaggaaagctggggccaggggaagcgaagtggcttcaatccgggctgacagccaagaagagttttcctcccttcggtgacagggcctgcccctccgagtctagaggtaaaagcagcttctagaactggcccctaagtctccaaatgtgttggctaagctgaaatgagagactctgaattagagtttttgtttgtttgtttgttctctgcatgaagttcacaggcctgtatggatgttaaattgtgtctatagcctctaaatctccaggttaactggtccagattttttttttttaatcagtaacaatgggaatttaaaatcaaatatttggccaggtgcggtggctcatgcccgtaatcccagcactttgggaggccgaggcaggcgcatcacctgaggagtttgagaccagcctgaccaacatggtgaaatcctgtctctactaaaaatacaaaaaattagccaggcgtggtggcgtgtgcctgtaatcccagctaccagggaggctgaggcatgagaatcgcttgaacctgggagatggaggttgcagtgagccgagatcatgccactgcactccagcctgggcaacagagggagactctgtctcaaaaataataatcaaatcaagtattttaagtttggctcttctttttttcaagaaaggctttttggatacctagaataccttcatgtatgtggcttgatttctgtttcaggaaaaggggggcgggaggagagacaacagccgtgttccagagtctgtcctgagatgtcgctgagtccagacacttgggctgcacgtgccctgcagatgacaaaggccggcagctcagcacacgtgcaggaggggttaaagccaatattgagtttttgttcttgttgttttaatctgaacgattattctcctgtaaaaataatttgggaggggcgggtgttgttcggtgtgtgtgtgtgtgtgtgtgtgtgtgtgtgtgtgtgtatttttttttttacagtggcgcctgtctaaagtatttttcacaacatgtttgataatcagtgctttaaaaagcagcagtgtcctatgaagtggaaatgtcagttctagagcattggatgtgaagttctggtcatgtcaccttgcgtgtctcaccctggaggagtgaaggtgggcgcccggcgggggggtgtggctgcaccccagcaccgggagggggcacgcacgacaccagaggaagggacagccccacccatgtcaacagcaggcaacctgtgttttcatttcaagtgggatacagtatttttttaataaggagccatacttttttttaagagtttgagatctgaatgtgatttctaattgtatcagacgttaatgttttaaagctataacaaagtttaaaatttctactttttgtttttcatttattttaactgttcttttatctattaaattgttgtatgtggatggggaagttttgtttctcctcttagcatttgtttctataaccagaaataaaattctatattaaagaaatgac

SEQ ID NO: 395 - protein, 733 aa, Homo sapiens
MAEVGEDSGARALLALRSAPCSPVLCAAAAAAAFPAAAPPPAPAQPQPPPGPPPPPPPPLPPGAIAGAGSSGGSSGVSGDSAVAGAAPALVAAAAASVRQSPGPALARLEGREFEFLMRQPSVTIGRNSSQGSVDLSMGLSSFISRRHLQLSFQEPHFYLRCLGKNGVFVDGAFQRRGAPALQLPKQCTFRFPSTAIKIQFTSLYHKEEAPASPLRPLYPQISPLKIHIPEPDLRSMVSPVPSPTGTISVPNSCPASPRGAGSSSYRFVQNVTSDLQLAAEFAAKAASEQQADTSGGDSPKDESKPPFSYAQLIVQAISSAQDRQLTLSGIYAHITKHYPYYRTADKGWQNSIRHNLSLNRYFIKVPRSQEEPGKGSFWRIDPASEAKLVEQAFRKRRQRGVSCFRTPFGPLSSRSAPASPTHPGLMSPRSGGLQTPECLSREGSPIPHDPEFGSKLASVPEYRYSQSAPGSPVSAQPVIMAVPPRPSSLVAKPVAYMPASIVTSQQPAGHAIHVVQQAPTVTMVRVVTTSANSANGYILTSQGAAGGSHDAAGAAVLDLGSEARGLEEKPTIAFATIPAAGGVIQTVASQMAPGVPGHTVTILQPATPVTLGQHHLPVRAVTQNGKHAVPTNSLAGNAYALTSPLQLLATQASSSAPVVVTRVCEVGPKEPAAAVAATATTTPATATTASASASSTGEPEVKRSRVEEPSGAVTTPAGVIAAAGPQGPGTGE

SEQ ID NO: 396 - DNA, 2890 bp, Homo sapiens
cggaagttgaccggggtgcggagctcctgggctgcagctcctggagtttccgaggttcgtgcgcgtctggtggcggcggcgtgatgttctcggcaggagcggagagtttgctccaccaggccagggagatccaggacgaggagctgaagaagttctgttcccggatctgtaaactgctgcaggcggaggacttggggccggacaccctcgactccctgcagaggctcttcctcatcatctcagccacgaagtacagccggaggctggagaagacatgcgtagacctgctgcaggccaccctcggcctgcctgcatgccccgagcagctccaggtgctttgcgccgccatcctgcgagagatgtccccctctgacagcctcagcctggcctgggaccacacgcagaacagccggcagctgagcctggtggcctccgttctcttggcccagggtgacagaaacgaggaggtcagagccgtgggccagggcgtgctacgagcgctggagagccggcagcctgagggacccagcctcagacacctcctccccgtcatggccaaggtcgtggtcctcagcccgggcaccctccaggaggaccaggccaccctgctcagcaagcggctggtcgactggctgcgctacgccagcctccagcaagggctcccacactccggcggcttcttctccacgcccagggcccggcagccgggccccgtcaccgaggtggacggggcggtagccacagacttcttcacggtgctctccagcggccaccgcttcacagacgaccagtggctgaacgtgcaggccttctctatgctgcgggcgtggctgctgcacagcggccccgagggcccgggcaccctggacacagatgacaggtcagagcaggagggctccactctgtcggtgatctccgccacctcctctgccggccgcctgctgccgccccgggagcggcttcgggaggtggccttcgagtactgccagcgcctcattgagcaaagtaaccgacgagccctgaggaagggggactccgacctgcagaaagcttgcctggtggaggccgtgctggtgctggacgtgctgtgccggcaggacccgtccttcctgtaccgaagtctctcctgcctgaaggccctgcacgggcgggtgcgcggggacccggcctctgtgcgggtgctgctgcccctcgcccacttcttcctgagccacggggaagcggctgcagtggactcggaagccgtctaccagcacctgttcaccaggatcccggtggagcagttccacagccccatgctggcctttgaattcatccagttctgcagggacaacctccacctgttcagcgggcacctcagcaccctcagattgagcttccccaacctctttaagttcctggcctggaacagcccacccctcacctccgagtttgtggcgctcctcccggccctggtggacgctggcacagccctggagatgctgcacgcgctgctggacctgccctgcttgacggcggtgctggacctgcagctcaggtcagcaccggctgcatccgagaggccactctgggacacctctctcagggcccccagctgcctggaggccttccgggacccgcagttccagggtcttttccaatacctgctgcgccccaaggccagtggcgccactgagaggttggcgccactccaccagctgctgcagcccatggccggctgtgcccgcgtggcccagtgtgcccaggccgtgcccacgctgctgcaggcattcttctcagcagtgacccaggtggctgacgggtccctgatcaaccagctggcgctgctgctcctgggcaggagcgactcgctctacccggccccagggtacgctgccggtgtgcacagtgtgctgagttctcagttcctggccctgtgtacgctgaaaccctccctggtggtggagctggcaagagacctgctggagttcctgggcagcgtgaatggtctctgcagcagggcgagcctcgtcaccagcgtggtgtgggccatcggcgagtacctgtcggtgacctacgatcggaggtgcaccgtggagcagatcaacaagttcttcgaagccctggaggctctgctattcgaggtcacccagtgccgcccctctgctgccctgcccaggtgtcccccccaggtggtcaccgtgctgatgaccacgctgacgaagctggcctcccggagccaagatctgatccccagggcctctttattgctgtcaaagatgaggaccctggctcacagtccagccaccagctccacgcacagcgaggagggcgcggaagccatccgtacccgggccacagagctgctgaccctgctgaagatgcctagcgtggcccagtttgtgctcacacccagcacggaggtgtgcagcccccgctatcaccgcgatgccaacacggccctgcccctggccctgcgcacggtcagccggctggtggagagggaggccggcctcatgccagggtgaagggacagtggccagggacttcggtgcagattaagagcctgggcagccagcttgctactgaggccaggctgataggagctcaggagggcgcgggagtcctgggagaggaggcaaggcccacggtgggcttggcaccctcacagacacgcggggctggcccccctgctcaccctctgggctttgtctccgagccttttgctcccaggcaacactgagctgagctgaggggtgccatggagcggctctgattggaggcttgaggccctgtggctgggtcgggtggaggctgctgggtctgtttcctagtcttttgtttttggacagttgatgggcaagaagagctgcagtaaaagtaaatctcctttaataagcgtctgtatgaa

SEQ ID NO: 397 - protein, 807 aa, Homo sapiens
MFSAGAESLLHQAREIQDEELKKFCSRICKLLQAEDLGPDTLDSLQRLFLIISATKYSRRLEKTCVDLLQATLGLPACPEQLQVLCAAILREMSPSDSLSLAWDHTQNSRQLSLVASVLLAQGDRNEEVRAVGQGVLRALESRQPEGPSLRHLLPVMAKVVVLSPGTLQEDQATLLSKRLVDWLRYASLQQGLPHSGGFFSTPRARQPGPVTEVDGAVATDFFTVLSSGHRFTDDQWLNVQAFSMLRAWLLHSGPEGPGTLDTDDRSEQEGSTLSVISATSSAGRLLPPRERLREVAFEYCQRLIEQSNRRALRKGDSDLQKACLVEAVLVLDVLCRQDPSFLYRSLSCLKALHGRVRGDPASVRVLLPLAHFFLSHGEAAAVDSEAVYQHLFTRIPVEQFHSPMLAFEFIQFCRDNLHLFSGHLSTLRLSFPNLFKFLAWNSPPLTSEFVALLPALVDAGTALEMLHALLDLPCLTAVLDLQLRSAPAASERPLWDTSLRAPSCLEAFRDPQFQGLFQYLLRPKASGATERLAPLHQLLQPMAGCARVAQCAQAVPTLLQAFFSAVTQVADGSLINQLALLLLGRSDSLYPAPGYAAGVHSVLSSQFLALCTLKPSLVVELARDLLEFLGSVNGLCSRASLVTSVVWAIGEYLSVTYDRRCTVEQINKFFEALEALLFEVTQCRPSAALPRCPPQVVTVLMTTLTKLASRSQDLIPRASLLLSKMRTLAHSPATSSTHSEEGAEAIRTRATELLTLLKMPSVAQFVLTPSTEVCSPRYHRDANTALPLALRTVSRLVEREAGLMPG

SEQ ID NO: 398 - DNA, 823 bp, Homo sapiens
gggtccttcaggtaggaggtcctgggtgactttggaagtccgtagtgtctcattgcagataatttttagcttagggcctggtggctaggtcggttctctcctttccagtcggagacctctgccgcaaacatgctccgccagatcatcggtcaggccaagaagcatccgagcttgatccccctctttgtatttattggaactggagctactggagcaacactgtatctcttgcgtctggcattgttcaatccagatgtttgttgggacagaaataacccagagccctggaacaaactgggtcccaatgatcaatacaagttctactcagtgaatgtggattacagcaagctgaagaaggaacgtccagatttctaaatgaaatgtttcactataacgctgctttagaatgaaggtcttccagaagccacatccgcacaattttccacttaaccaggaaatatttctcctctaaatgcatgaaatcatgttggagatctctattgtaatctctattggagattacaatgattaaatcaataaataactgaaacttgatatgtgtcacttttttatgctgaaagtatgctctgaactttagagtataggaaattaactattagaatttaaagaatttcttgaatttctgtagtttgaaaatacgactttaagctgctttagtaaaacacttccattttgtgtatagactgttggtaacttcactagagcatacataacaactggaactggaaattatacaaaagtaaattgggaaggatactccagcatctgacactggcaaaatggaaacctttgagtttctctt

SEQ ID NO: 399 - protein, 81 aa, Homo sapiens
MLRQIIGQAKKHPSLIPLFVFIGTGATGATLYLLRLALFNPDVCWDRNNPEPWNKLGPNDQYKFYSVNVDYSKLKKERPDF

SEQ ID NO: 400 - DNA, 3421 bp, Homo sapiens
gtatccgggtcgctgctttccctattgtctgaggcagccgccctcgcgctgtgcaatttctggtctttcgttgcttctggtccaggctaataaagtttttctttctttaattttttttcttctagttttaacgggagaaattaactccccggggccgccgggttgactgcgctgcctgggccggaggtcttctccggccagggagcgctgtgggaaggggctcgagcggccagggccaggcgaggccgggggggcggggggttaggggaccgcggggctactcttgggagcgcccctgtccggctggctgcgcgccggttttaaatagcatctttcggacttgtcttcgcggccccagtccccgacctcggcgctgcctgggctcctgcagcctctccctaagtcttctccaaacgaccacctcacggattccttatggatcgcagctccaagaggaggcaggtgaagcctttggcagcttctctgctggaagctcttgattatgatagttcagatgacagtgattttaaagttggagatgcctcagattctgaagggagtggtaatggaagtgaagatgcttcaaaggacagtggagaaggttcctgtagtgattctgaagaaaatattttagaagaagaactgaatgaagatattaaagtaaaagaagaacaacttaaaaattctgcagaggaagaagtactatcatcagaaaaacaattaattaaaatggaaaagaaggaagaagaagaaaatggagaaagacctagaaagaaaaaggagaaagagaaggaaaaagaaaaggaaaaggagaaagagaaggaaagagagaaggaaaaagaaaaagcaacagtatctgagaatgtggctgcttctgctgctgccaccacaccagccacaagtcctcctgctgttaacacatccccttctgttcccactacgacaaccgctacagaggaacaagtcagcgagccaaaaaaatggaaccttcgacgaaaccgaccacttctggattttgtgtccatggaagagctgaatgacatggatgactatgacagtgaggatgacaatgattggcgacctactgtagtaaagagaaaagggagatctgcgtctcagaaagagggaagtgatggagacaatgaggatgatgaagatgagggaagcgggagtgatgaagacgagaatgatgaaggcaatgatgaagatcatagtagccctgccagtgaagggggttgcaagaagaagaagagtaaagttcttagcagaaacagtgctgatgatgaggaactgaccaatgatagcctgaccctatctcaaagcaagagtaatgaggactcgctgattcttgagaagagtcaaaactggagctctcaaaaaatggaccatattctgatttgctgtgtttgtctgggagataatagtgaggacgctgatgaaataattcagtgtgacaattgtggcattacagtccatgaaggttgttatggagttgatggagagagtgactctattatgagttcagcttctgaaaactccactgaaccttggttttgtgatgcctgtaaatgtggtgtttctcctagctgtgaactgtgtcctaatcaggatggaattttcaaggagacagatgctggaagatgggttcatattgtttgtgccctgtatgttcctggagtagcctttggagatattgacaaattacgaccagtaacactaacggaaatgaactattccaaatatggtgccaaggagtgtagcttttgtgaagaccctcgctttgctagaactggggtttgcattagctgtgatgcagggatgtgcagagcctatttccatgtgacctgtgctcaaaaggaaggtctgctttcagaggcagcggcggaagaggatatagcagatccattctttgcttattgtaagcaacatgcagataggttagacagaaagtggaagagaaaaaactacttggctctacagtcctattgtaaaatgtctttgcaagagagagagaagcaactatcaccagaagcacaggcaaggatcaatgcccggcttcagcagtatcgtgccaaagcagaactagctcgatctaccagaccccaggcctgggttccaagggaaaaattgcccagaccactcaccagcagtgcttcagctattcgtaaacttatgcggaaagcagaactcatggggatcagtacagatatctttccagtggacaattcagatactagttctagtgtggatggaaggagaaaacataagcaaccagctctcactgcagattttgtgaattattattttgagagaaatatgcgcatgattcaaattcaggaaaatatggctgaacaaaagaatataaaagataaattagagaatgaacaagaaaagcttcatgtagaatataataagctatgtgaatctttagaagaactacaaaacctgaatggaaaacttcgaagtgaaggacaaggaatatgggctttactaggcagaatcacagggcagaagttgaatataccggcaattttgcgagcacccaaggagagaaaaccaagtaaaaaagaaggaggcacacaaaagacatctactcttcctgcagtactttatagttgtgggatttgtaagaagaaccatgatcagcatcttcttttattgtgtgatacctgtaaactacattaccatcttggatgtctggatcctcctcttacaaggatgccaagaaagaccaaaaacagttattggcagtgctcggaatgtgaccaggcagggagcagtgacatggaagcagatatggccatggaaaccctaccagatggaaccaaacgatcaaggaggcagattaaggaaccagtgaaatttgttccacaggatgtgccaccagaacccaagaagattccgataagaaacacgagaaccagaggacgaaaacgaagcttcgttcctgaggaagaaaaacatgaggaaagagttcctagagagagaagacaaagacagtctgtgttgcaaaagaagcccaaggctgaagatttaagaactgaatgtgcaacttgcaagggaactggagacaatgaaaatcttgtcaggtgtgatgaatgcagactctgctaccattttggctgtttggatcctcctttgaaaaagtctcctaaacagacaggctacggatggatatgtcaggaatgtgattcttcatcttccaaggaagatgaaaatgaagctgaaagaaaaaatatatctcaggagctcaacatggaacagaaaaatccaaagaaataaaagattttctgtagtgtttttgaaaagtttgcagcttatgtaatagcagataaaatttctaattgtaaaatgttaaattgtaaaatctaatttgcaaaatgttctcaataaagtcattcaaaatgaaaaaaaaaaaaaa

SEQ ID NO: 401 - protein, 948 aa, Homo sapiens
MDRSSKRRQVKPLAASLLEALDYDSSDDSDFKVGDASDSEGSGNGSEDASKDSGEGSCSDSEENILEEELNEDIKVKEEQLKNSAEEEVLSSEKQLIKMEKKEEEENGERPRKKKEKEKEKEKEKEKEKEREKEKEKATVSENVAASAAATTPATSPPAVNTSPSVPTTTTATEEQVSEPKKWNLRRNRPLLDFVSMEELNDMDDYDSEDDNDWRPTVVKRKGRSASQKEGSDGDNEDDEDEGSGSDEDENDEGNDEDHSSPASEGGCKKKKSKVLSRNSADDEELTNDSLTLSQSKSNEDSLILEKSQNWSSQKMDHILICCVCLGDNSEDADEIIQCDNCGITVHEGCYGVDGESDSIMSSASENSTEPWFCDACKCGVSPSCELCPNQDGIFKETDAGRWVHIVCALYVPGVAFGDIDKLRPVTLTEMNYSKYGAKECSFCEDPRFARTGVCISCDAGMCRAYFHVTCAQKEGLLSEAAAEEDIADPFFAYCKQHADRLDRKWKRKNYLALQSYCKMSLQEREKQLSPEAQARINARLQQYRAKAELARSTRPQAWVPREKLPRPLTSSASAIRKLMRKAELMGISTDIFPVDNSDTSSSVDGRRKHKQPALTADFVNYYFERNMRMIQIQENMAEQKNIKDKLENEQEKLHVEYNKLCESLEELQNLNGKLRSEGQGIWALLGRITGQKLNIPAILRAPKERKPSKKEGGTQKTSTLPAVLYSCGICKKNHDQHLLLLCDTCKLHYHLGCLDPPLTRMPRKTKNSYWQCSECDQAGSSDMEADMAMETLPDGTKRSRRQIKEPVKFVPQDVPPEPKKIPIRNTRTRGRKRSFVPEEEKHEERVPRERRQRQSVLQKKPKAEDLRTECATCKGTGDNENLVRCDECRLCYHFGCLDPPLKKSPKQTGYGWICQECDSSSSKEDENEAERKNISQELNMEQKNPKK

SEQ ID NO: 402 - DNA, 4259 bp, Homo sapiens
gtatccgggtcgctgctttccctattgtctgaggcagccgccctcgcgctgtgcaatttctggtctttcgttgcttctggtccaggctaataaagtttttctttctttaattttttttcttctagttttaacgggagaaattaactccccggggccgccgggttgactgcgctgcctgggccggaggtcttctccggccagggagcgctgtgggaaggggctcgagcggccagggccaggcgaggccgggggggcggggggttaggggaccgcggggctactcttgggagcgcccctgtccggctggctgcgcgccggttttaaatagcatctttcggacttgtcttcgcggccccagtccccgacctcggcgctgcctgggctcctgcagcctctccctaagtcttctccaaacgaccacctcacggattccttatggatcgcagctccaagaggaggcaggtgaagcctttggcagcttctctgctggaagctcttgattatgatagttcagatgacagtgattttaaagttggagatgcctcagattctgaagggagtggtaatggaagtgaagatgcttcaaaggacagtggagaaggttcctgtagtgattctgaagaaaatattttagaagaagaactgaatgaagatattaaagtaaaagaagaacaacttaaaaattctgcagaggaagaagtactatcatcagaaaaacaattaattaaaatggaaaagaaggaagaagaagaaaatggagaaagacctagaaagaaaaaggagaaagagaaggaaaaagaaaaggaaaaggagaaagagaaggaaagagagaaggaaaaagaaaaagcaacagtatctgagaatgtggctgcttctgctgctgccaccacaccagccacaagtcctcctgctgttaacacatccccttctgttcccactacgacaaccgctacagaggaacaagtcagcgagccaaaaaaatggaaccttcgacgaaaccgaccacttctggattttgtgtccatggaagagctgaatgacatggatgactatgacagtgaggatgacaatgattggcgacctactgtagtaaagagaaaagggagatctgcgtctcagaaagagggaagtgatggagacaatgaggatgatgaagatgagggaagcgggagtgatgaagacgagaatgatgaaggcaatgatgaagatcatagtagccctgccagtgaagggggttgcaagaagaagaagagtaaagttcttagcagaaacagtgctgatgatgaggaactgaccaatgatagcctgaccctatctcaaagcaagagtaatgaggactcgctgattcttgagaagagtcaaaactggagctctcaaaaaatggaccatattctgatttgctgtgtttgtctgggagataatagtgaggacgctgatgaaataattcagtgtgacaattgtggcattacagtccatgaaggttgttatggagttgatggagagagtgactctattatgagttcagcttctgaaaactccactgaaccttggttttgtgatgcctgtaaatgtggtgtttctcctagctgtgaactgtgtcctaatcaggatggaattttcaaggagacagatgctggaagatgggttcatattgtttgtgccctgtatgttcctggagtagcctttggagatattgacaaattacgaccagtaacactaacggaaatgaactattccaaatatggtgccaaggagtgtagcttttgtgaagaccctcgctttgctagaactggggtttgcattagctgtgatgcagggatgtgcagagcctatttccatgtgacctgtgctcaaaaggaaggtctgctttcagaggcagcggcggaagaggatatagcagatccattctttgcttattgtaagcaacatgcagataggttagacagaaagtggaagagaaaaaactacttggctctacagtcctattgtaaaatgtctttgcaagagagagagaagcaactatcaccagaagcacaggcaaggatcaatgcccggcttcagcagtatcgtgccaaagcagaactagctcgatctaccagaccccaggcctgggttccaagggaaaaattgcccagaccactcaccagcagtgcttcagctattcgtaaacttatgcggaaagcagaactcatggggatcagtacagatatctttccagtggacaattcagatactagttctagtgtggatggaaggagaaaacataagcaaccagctctcactgcagattttgtgaattattattttgagagaaatatgcgcatgattcaaattcaggaaaatatggctgaacaaaagaatataaaagataaattagagaatgaacaagaaaagcttcatgtagaatataataagctatgtgaatctttagaagaactacaaaacctgaatggaaaacttcgaagtgaaggacaaggaatatgggctttactaggcagaatcacagggcagaagttgaatataccggcaattttgcgagcacccaaggagagaaaaccaagtaaaaaagaaggaggcacacaaaagacatctactcttcctgcagtactttatagttgtgggatttgtaagaagaaccatgatcagcatcttcttttattgtgtgatacctgtaaactacattaccatcttggatgtctggatcctcctcttacaaggatgccaagaaagaccaaaaacagttattggcagtgctcggaatgtgaccaggcagggagcagtgacatggaagcagatatggccatggaaaccctaccagatggaaccaaacgatcaaggaggcagattaaggaaccagtgaaatttgttccacaggatgtgccaccagaacccaagaagattccgataagaaacacgagaaccagaggacgaaaacgaagcttcgttcctgaggaagaaaaacatgaggaaagagttcctagagagagaagacaaagacagtctgtgttgcaaaagaagcccaaggctgaagatttaagaactgaatgtgcaacttgcaagggaactggagacaatgaaaatcttgtcagatacccttcatgagacccaactctgccacagctcatcctcggaggcaatcccggaaacctcttttataagtgtgattttaaaaatgtggattaaactctcgatagagtacataaagtaaaggagaacagctatattgtcctttctataagcttgtcactgcaaaaagttgccttttgcttgtcaggtttggatagaatataattgattggtttgttacttggactaacaaggcagtagatttgcctgtgtggaattttttttcctatttttcttctttttgctttttttgcacttatcagaaatatttgatgtgtgcattgttgaaaaatactggatacatgtcttgtcagaattgtcgtattaagtaatgtctttccctcttgcttctttggcaaatgttgatacacagtgtttggacttactgaagagttactgaagcctgtgggacttaataaatacaatatgctactccctgttgtgattgaacaatacaaataacaaacaagaaagacaatgcattccattagtctgctattctgtttccttcaacttcatacatagattcatatatgaagtactgcattgtaaaacaactatagactcatattaaatgttatttctatttataatattcagcaaaagtgaaagacttgtgaagcatatgacattctatttttgacttattagtcctagtgtgaaagcattaatattattagcatgaaatttttacttcagattttaagctcatgaataaagatatatctgtgttgatctctagatatttttagtaatacccaaatatattcagtccttattgttttaatataagctttctgtgttcagtataattttatttttctcaaccttaaatatgaacttaggaaataaggagggaagtacaaagattattgactatacaacctaccagctgaaagaaagatcttcatcaacatctgtatctttccagaggtatacagaattaaaatttgatcttcaagctttaatgatccagttttaagtcaacggcagaagtatgttgaatatttcatcactcaatcttgaactgatttagaagagactctttgctgaaattgaattgcacttatacatgtaaattgtcaacatgtaatttggaattttctgattaataaatgtggttttggacatct

SEQ ID NO: 403 - protein, 888 aa, Homo sapiens
MDRSSKRRQVKPLAASLLEALDYDSSDDSDFKVGDASDSEGSGNGSEDASKDSGEGSCSDSEENILEEELNEDIKVKEEQLKNSAEEEVLSSEKQLIKMEKKEEEENGERPRKKKEKEKEKEKEKEKEKEREKEKEKATVSENVAASAAATTPATSPPAVNTSPSVPTTTTATEEQVSEPKKWNLRRNRPLLDFVSMEELNDMDDYDSEDDNDWRPTVVKRKGRSASQKEGSDGDNEDDEDEGSGSDEDENDEGNDEDHSSPASEGGCKKKKSKVLSRNSADDEELTNDSLTLSQSKSNEDSLILEKSQNWSSQKMDHILICCVCLGDNSEDADEIIQCDNCGITVHEGCYGVDGESDSIMSSASENSTEPWFCDACKCGVSPSCELCPNQDGIFKETDAGRWVHIVCALYVPGVAFGDIDKLRPVTLTEMNYSKYGAKECSFCEDPRFARTGVCISCDAGMCRAYFHVTCAQKEGLLSEAAAEEDIADPFFAYCKQHADRLDRKWKRKNYLALQSYCKMSLQEREKQLSPEAQARINARLQQYRAKAELARSTRPQAWVPREKLPRPLTSSASAIRKLMRKAELMGISTDIFPVDNSDTSSSVDGRRKHKQPALTADFVNYYFERNMRMIQIQENMAEQKNIKDKLENEQEKLHVEYNKLCESLEELQNLNGKLRSEGQGIWALLGRITGQKLNIPAILRAPKERKPSKKEGGTQKTSTLPAVLYSCGICKKNHDQHLLLLCDTCKLHYHLGCLDPPLTRMPRKTKNSYWQCSECDQAGSSDMEADMAMETLPDGTKRSRRQIKEPVKFVPQDVPPEPKKIPIRNTRTRGRKRSFVPEEEKHEERVPRERRQRQSVLQKKPKAEDLRTECATCKGTGDNENLVRYPS

SEQ ID NO: 404 - DNA, 1956 bp, Homo sapiens
agcagtaggatctcggtttccagcccagtgcaatttctgctctatcccgctgacctcattgttgaggtatgtccttatagcagtgtgagaaccgactaatacagttccttaggaagcccctgctgggtatggatggggagtgaagcaaggtgggcccagaagctgccgctggctgagagaccatgaagaaagtgtatagaatctccaccatcaccagaggaagagagcttggcaggaaagttacttccatgaatggatgagttgaagtgaacagcgtcttgggcaaaactgaagggtagttagtcgggtttgtctctggtgggctttcagctccactccctgcatcccattcccacatcgtgatggtcccctcataggcccagggctaccaccttggagcataggtggggatcctccagccagggtccttccttcacagggagtcagagccctctgctccggaattgccctgccccaggtcggccatctatcaaaagccccactatcccctaaagacccaccctcaagcagcagatgtgcagcaagggagccgcaaatgtcattcctgtgaccccgaagcagtctagtgtgttacctctctcagggctgctatgggctgaattgcttttccccaaaatttctatgctgcttccctaacccccagcgcctcagaatctaactctggataggacctgtgaataagtgattaagttaaaatggggtcctgtggatgggccctaacccaatctgactggtgtccttttaagaagaggaagagacaccagagatgtgcacactcagagacaagacacatgaggacacagagacaaggcggctacctgcaagccagggagaggggcctcggggaagccaaccctgcctacgccttgatcttggacttccagcctccagaactccagaatctgagtgaaatgggtataaatcatgagctaggatacagttcaattattcctatgatgaaaagagctttctccgcatgtgggactctcggcctcattatgagtggcatctttgacaatccagggcccattaaaaacaccttgaagaaagcattcaccatgctgtggagcttcacagtctataccaggctggaatccttgagggtggcattatcaaatgaggaaatggttcctttcatttttcatctgaagactcagacagcaaacatgttatctggccctataagcaccccgatgcttctgtgaaacccaagcaagttctgcatcaccacgacagccgcggatgtcaaatcatcaaaacagcagcagaggaaggggtttattcctcctccaaatcttcagctggttttatagggttaccagtttaaagtttctttgttttcagagcatcagacctcccatttgtagctgatagccatttttcaaaggtttctggctcacccaggaattcattagggtggacgagaaaagaacagtggatagaatagaccagcagggcaatctaagccccattccctgtctctttacattggttcttggtccccgtgactcatccaaactcccttatattcctatctggaatgcgaaagctggaaatacaagtgctctgtaatcacaggcagtggttttcttggagtctggtgtgatttctgtagcttgcagcaatatgtgggacacacttgcactgaagaatttaatgacttgttttactgctgtctgccatcaatatttatctatattaactgaagaaaggcattactcgaaatggcatttcacacctctgagcattatacagtaattctaaagtcatacgttgtaccaaattctctgggcaaacacagagatacagtatgaatggaaagaatccaagttgaagtttttaaaacttgaattgtctgcagtaatctggaaaaccaaagtcaaaatgactcgaattgctatggctgggaatgactggattaaaagcaatggaaac

SEQ ID NO: 405 - protein, 169 aa, Homo sapiens
MGSCGWALTQSDWCPFKKRKRHQRCAHSETRHMRTQRQGGYLQARERGLGEANPAYALILDFQPPELQNLSEMGINHELGYSSIIPMMKRAFSACGTLGLIMSGIFDNPGPIKNTLKKAFTMLWSFTVYTRLESLRVALSNEEMVPFIFHLKTQTANMLSGPISTPMLL

SEQ ID NO: 406 - DNA, 3984 bp, Homo sapiens
ggaaaaccgaggaatacacatgcgcagttggacccctcaggcccttcgtgtcccttcccacccatctccccgccccggccctctgggcggggctgggccgacagtccagctgcagctcgctggagattcagtgacttccttgttgtgagccccggcccggcagtgtcccgactcgtagccccgctgttcttaatccgggccgctagcctgagtctaggtcgcagccgcagccccaccccgtcggtcaccttttcagcgcaggtcctttccccgcacgccctgcgctccctaacatgcccaaccccagcagcacctcctctccctaccccctccctgaggaaattaggaacctgttggcagatgttgaaacatttgtagcagatatactgaaaggagaaaatttatccaagaaagcaaaggaaaagagagaatcccttattaagaagataaaagatgtaaagtctatctatcttcaggaatttcaagacaaaggtgatgcagaagatggggaagaatatgatgacccttttgctgggcctccagacactatttcattagcctcagaacgatatgataaagacgatgaagccccctctgatggagcccagtttcctccaattgcagcacaagaccttccttttgttctaaaggctggctaccttgaaaaacgcagaaaagatcacagctttctgggatttgaatggcagaaacggtggtgtgctctcagtaaaacggtattctattattatggaagtgataaagacaaacaacagaaaggtgaatttgcaatagatggctacagtgtcagaatgaataacactctaagaaaggatggaaagaaagattgctgttttgaaatctctgctcctgataaacgtatatatcagtttacagcagcttctcccaaagatgctgaagaatgggtacagcagctgaaatttgtattgcaagatatggaatctgatattattcctgaggattatgatgagagaggagaattatatgatgatgttgatcatcctctaccaataagcaatccactaacaagcagtcaaccaatagatgatgaaatttatgaagaacttccagaagaagaagaggacagtgctccagtgaaagtggaagaacaaaggaagatgagtcaggatagtgtccatcacacctcaggggataagagcactgattatgctaatttttaccagggattgtgggattgtactggagctttttctgatgagttgtcatttaagcgtggtgatgtgatttacattcttagcaaggaatacaatagatatggctggtgggtaggagaaatgaagggagccattggcttggtgcctaaagcctacataatggagatgtatgatatttgagagtcctggaaaaggaaaattcttctgcttgtctgcaaatgctttggatttagaagcgtcatgaaagcacgagtgacagctcctaacctctccttgttttattaaacattacttatctttgactgttattttatgcagtcgctcattaaaatattcctctgatgtgaaattaaatgaaggatattaatgtaaattagatgcaaccagttaagttatacctgttgctattttgcaaagaaataattatagtttttatttacccatttgatttgtgtgaagaattcatcactattttatacgtaacatatagtctactatagcatagtatgctactattgctacttctggtgtgatttgtaatgtttcttaatcattggacatcaattatttttagagagtaatgtataatttcatagcattttaaatttagtgtatcatgcgagttttttttggtagatgctgaagaatgtggttgctaaacaaagaatgctaaagaatgttcaaactttatagataactttattgttattatttattttcacacatttaattcctattaagtacagccgcaagaaagaaaaaatgatgaagttgcaaatggcagtgtgctgtcacctgcaacagaagtgcgtaccagaagtatgactcatgcaaagcattttaccgtacaaatatcctggtgcgatgatgggcctggcaacattttctactgtacttttgtttaaatttaatgaaacaaaaaattcctaagaaataccaccctaccactaacaaaatggtataaagaatctcccagccaggccaacatggtgaaaccctgtctctactaaaaattagccaagtgtggtaatgttcacctgcagtcccagctacttgggaggccaaggcacgagaattgcttgaacaaggtaggcagaggttgcagtgagccaagatcgcgccactgcactccagcctgggcgacagagtgagactccatctcagaaaaaaaaaaaaaaaaaaacagaatctcagtgtattctcaaagtaaaaaggcataaccaagcactctcttatcttgccttattgctatactatttacatcccactgcagaacagcagatttgaggcttttctatatacttctcagagcactgaaaagaaaggaagggtttgcagaggagagtgtagaaatcccagtggtagcatgtaccaacaggtgagtagaaaggtagtgttagcctgacatttgagttatactctgtgctgcctgagcaagatttgtagaatcatataattaccttttcatgtatatttgaaatcagaggtgtttaaaatacctatgagataccaatgtagccttaacatatgtcaaaatgcattgctggttagataattatttggactacacataaactcctaatattgaatcattacctatcaggtattatctttatggaacttttcaatatctttgctttataaagattctaaacatgtatctgagctggtaatattttaaaatctccattatttgtgtaaaactgtttataagcagtgtttgagagggtctgctttaccattaccccctcaatatcatgatcatccaatctcaaatgtgaaaaaaaaaaagaaatttgattttaggtattgtgagtaaacaagtttatatagagagacattgtgaagttaaagttttcagaagttacatttgtgcagttcttaccttttcctcatatagtgccattgaaatagactgaaattatcttggcaaaagttagacaaccaaagacgactttagtggactggttttcaaaacttgagcagctgaaaagcaaaagccgttgtttcccatgacaatgtagcctttgtggatttgggtttgtgctttgggttgaaaagaagtttttagtcctaggccagtagatggcagcagcttttcattgcagacaaaacctcttgaaacccttcccccatggcacaaactcgcccatgatggaaagcatctagatttctgcctccttttacagttaatccaggagagggagtcctttgccaactgatgaccaacagttccaagccagatagtctcgtgaacagtgacaatacagaaataaggtgttatttctgttcagatctccaccggcctttgttcttttaaaacttgaatataggtgggagacataagaaaggaaagaaaagacttaaaactggagtgacaggacaaataatcattactttcaattcatgactgctttatattcatttgatgaaatcatttgtatacaaaccagggagagttttctttacacccttgacaatatatcacatactcttcaagatcataataatatcattaatataaatttaaacaacatggcttgttagaaaatatgctaattgctatggtctcattatgtttgcttagcttttatttgtttttctgtgaacagttagagagctaatttttttcaaaggtgattgtaagtcatattttatatagcattttgcttgattatttgctctgtactgaatttgtactctattgccattagatcttacaataatgttccactctgcaaatttttaaggttcaaataaagtttaattgtttgcaaaaaaaaaaaaaaaa

SEQ ID NO: 407 - protein, 359 aa, Homo sapiens
MPNPSSTSSPYPLPEEIRNLLADVETFVADILKGENLSKKAKEKRESLIKKIKDVKSIYLQEFQDKGDAEDGEEYDDPFAGPPDTISLASERYDKDDEAPSDGAQFPPIAAQDLPFVLKAGYLEKRRKDHSFLGFEWQKRWCALSKTVFYYYGSDKDKQQKGEFAIDGYSVRMNNTLRKDGKKDCCFEISAPDKRIYQFTAASPKDAEEWVQQLKFVLQDMESDIIPEDYDERGELYDDVDHPLPISNPLTSSQPIDDEIYEELPEEEEDSAPVKVEEQRKMSQDSVHHTSGDKSTDYANFYQGLWDCTGAFSDELSFKRGDVIYILSKEYNRYGWWVGEMKGAIGLVPKAYIMEMYDI

SEQ ID NO: 408 - DNA, 3287 bp, Homo sapiens
cccgctcctccgcgccgccgccagccccgctgcgcgctctgctcttcgcagctccccggacccgcagccatggccgacatcaagacgggcatcttcgccaagaacgtccagaagcgactcaaccgcgcgcaggaaaaggtcctccaaaagctggggaaagctgatgagacaaaagacgaacagttcgaagaatatgtccagaacttcaaacggcaagaagcagagggtaccagacttcagcgagaactccgaggatatttagcagcaatcaaaggcatgcaggaggcctccatgaagctcacagagtcgctgcatgaagtctatgagcctgactggtatgggcgggaagatgtgaaaatggttggtgagaaatgtgatgtgctgtgggaagacttccatcaaaaactcgtggatgggtccttgctaacactggatacctacctggggcaatttcctgacataaagaatcgcatcgccaagcgcagcaggaagctagtggactatgacagtgcccgccaccatctggaagctctgcagagctccaagaggaaggatgagagtcgaatctctaaggcagaagaagaatttcagaaagcacagaaagtgtttgaagagtttaacgttgacttacaagaagagttaccatcattatggtcaagacgagttggattttatgttaatactttcaaaaacgtctccagccttgaagccaagtttcataaggaaattgcggtgctttgccacaaactgtatgaagtgatgacaaaactgggtgaccagcacgccgacaaggccttcaccatccaaggagcgcccagtgattcgggtcctctccgcattgcaaagacaccatcaccgcctgaggagccttcacccctcccgagcccgacagcaagtccaaatcatacattagcacctgcgtctcccgcaccagcacggcctcggtcaccttcacagacaaggaaagggcctcctgtcccacctctacctaaagtcaccccgacaaaggaactgcagcaggagaacatcatcagtttctttgaggacaactttgttccagaaatcagtgtgacaacaccttcccagaatgaagtccctgaggtgaagaaagaggagactttgctggatctggactttgatcctttcaagcccgaggtgacacctgcaggttctgctggagtgacccactcacccatgtctcagacattgccctgggacctatggacgacaagcactgatttggtacagccggcttctggtggttcatttaatggattcacacagccccaggatacttcattattcacaatgcagacagaccagagtatgatctgcaacttggctgaatctgaacaggctccacccacagagccaaaagcagaggagcctctggctgctgtcacacctgccgttggtctggaccttggaatggacactcgggctgaggagccagtggaggaggcagtgatcatacctggagctgatgctgatgcagctgttggaaccttggtgtcagcagctgagggggccccaggagaggaagcagaggcggagaaggccactgtccctgccggggaaggagtaagtttagaggaggccaaaattggaactgaaaccactgagggtgcagagagtgcccaacctgaagcagaggagctcgaagcaacagtgcctcaggagaaggtcattccttcggtggtcatagagcctgcctccaaccatgaagaggaaggagaaaacgaaataactataggtgcagagcccaaggagaccaccgaggacgcggctcctccgggccccaccagcgagacaccggagctggctacggagcagaagcctatccaggaccctcagcccacgccttctgcaccagccatgggggctgctgaccagctagcatctgcaagggaggcctctcaggaattgcctcctggctttctctacaaggtggaaacactgcatgattttgaggcagcaaattctgatgaacttaccttacaaaggggtgatgtggtgctggtggtcccctcagattcagaagctgatcaggatgcaggctggctggtgggagtgaaggaatcagactggcttcagtacagagaccttgccacctacaaaggcctctttccagagaacttcacccgacgcttagattagggcaacaagtactgcaagaaggagctcagttacggggtttttaaaccttcatgaaaacctgaagagttcacttttgttattatgctcttaatgatttacagactgatgccagacaaaccttgggaagatgtatcaatggagcatgtgtgcaaaaaaatgtaagaggaaaaaaagtaaattaaggaaaaaatcctcactcattcccatgttgtcaataacaggtttgtttgtgctttgtccaagctgtggagactcttgtacttgatcccctcccaccaattctaaagtagctttctccagatcagactttaatttctctgcatcaggtgtatcgtattgagtggctgccctgcagaagatgtgatgaattatcctgtagtacaagattatcttattcccctgcccaggtgtgagcacgtgctctcgctccctttcaggtttactatgtttaaaactaaactgctgcaaaagttctcaatgttcttttccaacacatctatatatatatggacacacagtcacgcaagctagttcccatgactcctggatctatgtgtatgcagaaggctacatatacatagttgcttctttcctttccattgtagctctttgcctctcaattgtcattgatacatgcattgctcttattctgtctggcattacaattgcagttttgcctaatggcaaaaccagccatcccattggcaaaagagtcaacagtatctgtgtttgtactgtgcagttttcaggatgagatgacagatagcacgactacactgaggcaccctcagagaaggcagggcctgatttatctagctgtccagccgctgtggctggaggtaggctagttgggatgggcagctaagcagtcttctcttctgcctttatgagattgggtagaaagatggggcatattcatctacccccaaaagaacactataaaaacagctcctctatatttccacctctttctatttatgcaactcatcttcacagattgttctaaagtaaaatagatggtgtatgctgtatccacaaatcatctgtaacaattatgttttcagtgctgtgtcattccaaataaacctttggtaatcttcaacgattaccctaaaaaaaaaaaaaaaaaa

SEQ ID NO: 409 - protein, 695 aa, Homo sapiens
MADIKTGIFAKNVQKRLNRAQEKVLQKLGKADETKDEQFEEYVQNFKRQEAEGTRLQRELRGYLAAIKGMQEASMKLTESLHEVYEPDWYGREDVKMVGEKCDVLWEDFHQKLVDGSLLTLDTYLGQFPDIKNRIAKRSRKLVDYDSARHHLEALQSSKRKDESRISKAEEEFQKAQKVFEEFNVDLQEELPSLWSRRVGFYVNTFKNVSSLEAKFHKEIAVLCHKLYEVMTKLGDQHADKAFTIQGAPSDSGPLRIAKTPSPPEEPSPLPSPTASPNHTLAPASPAPARPRSPSQTRKGPPVPPLPKVTPTKELQQENIISFFEDNFVPEISVTTPSQNEVPEVKKEETLLDLDFDPFKPEVTPAGSAGVTHSPMSQTLPWDLWTTSTDLVQPASGGSFNGFTQPQDTSLFTMQTDQSMICNLAESEQAPPTEPKAEEPLAAVTPAVGLDLGMDTRAEEPVEEAVIIPGADADAAVGTLVSAAEGAPGEEAEAEKATVPAGEGVSLEEAKIGTETTEGAESAQPEAEELEATVPQEKVIPSVVIEPASNHEEEGENEITIGAEPKETTEDAAPPGPTSETPELATEQKPIQDPQPTPSAPAMGAADQLASAREASQELPPGFLYKVETLHDFEAANSDELTLQRGDVVLVVPSDSEADQDAGWLVGVKESDWLQYRDLATYKGLFPENFTRRLD

SEQ ID NO: 410 - DNA, 3161 bp, Homo sapiens
cccgctcctccgcgccgccgccagccccgctgcgcgctctgctcttcgcagctccccggacccgcagccatggccgacatcaagacgggcatcttcgccaagaacgtccagaagcgactcaaccgcgcgcaggaaaaggtcctccaaaagctggggaaagctgatgagacaaaagacgaacagttcgaagaatatgtccagaacttcaaacggcaagaagcagagggtaccagacttcagcgagaactccgaggatatttagcagcaatcaaaggcatgcaggaggcctccatgaagctcacagagtcgctgcatgaagtctatgagcctgactggtatgggcgggaagatgtgaaaatggttggtgagaaatgtgatgtgctgtgggaagacttccatcaaaaactcgtggatgggtccttgctaacactggatacctacctggggcaatttcctgacataaagaatcgcatcgccaagcgcagcaggaagctagtggactatgacagtgcccgccaccatctggaagctctgcagagctccaagaggaaggatgagagtcgaatctctaaggcagaagaagaatttcagaaagcacagaaagtgtttgaagagtttaacgttgacttacaagaagagttaccatcattatggtcaagacgagttggattttatgttaatactttcaaaaacgtctccagccttgaagccaagtttcataaggaaattgcggtgctttgccacaaactgtatgaagtgatgacaaaactgggtgaccagcacgccgacaaggccttcaccatccaaggagcgcccagtgattcgggtcctctccgcattgcaaagacaccatcaccgcctgaggagccttcacccctcccgagcccgacagcaagtccaaatcatacattagcacctgcgtctcccgcaccagcacggcctcggtcaccttcacagacaaggaaagggcctcctgtcccacctctacctaaagtcaccccgacaaaggaactgcagcaggagaacatcatcagtttctttgaggacaactttgttccagaaatcagtgtgacaacaccttcccagaatgaagtccctgaggtgaagaaagaggagactttgctggatctggactttgatcctttcaagcccgaggtgacacctgcaggttctgctggagtgacccactcacccatgtctcagacattgccctgggacctatggacgacaagcactgatttggtacagccggcttctggtggttcatttaatggattcacacagccccaggatacttcattattcacaatgcagacagaccagagtatgatctgcaacttgatcatacctggagctgatgctgatgcagctgttggaaccttggtgtcagcagctgagggggccccaggagaggaagcagaggcggagaaggccactgtccctgccggggaaggagtaagtttagaggaggccaaaattggaactgaaaccactgagggtgcagagagtgcccaacctgaagcagaggagctcgaagcaacagtgcctcaggagaaggtcattccttcggtggtcatagagcctgcctccaaccatgaagaggaaggagaaaacgaaataactataggtgcagagcccaaggagaccaccgaggacgcggctcctccgggccccaccagcgagacaccggagctggctacggagcagaagcctatccaggaccctcagcccacgccttctgcaccagccatgggggctgctgaccagctagcatctgcaagggaggcctctcaggaattgcctcctggctttctctacaaggtggaaacactgcatgattttgaggcagcaaattctgatgaacttaccttacaaaggggtgatgtggtgctggtggtcccctcagattcagaagctgatcaggatgcaggctggctggtgggagtgaaggaatcagactggcttcagtacagagaccttgccacctacaaaggcctctttccagagaacttcacccgacgcttagattagggcaacaagtactgcaagaaggagctcagttacggggtttttaaaccttcatgaaaacctgaagagttcacttttgttattatgctcttaatgatttacagactgatgccagacaaaccttgggaagatgtatcaatggagcatgtgtgcaaaaaaatgtaagaggaaaaaaagtaaattaaggaaaaaatcctcactcattcccatgttgtcaataacaggtttgtttgtgctttgtccaagctgtggagactcttgtacttgatcccctcccaccaattctaaagtagctttctccagatcagactttaatttctctgcatcaggtgtatcgtattgagtggctgccctgcagaagatgtgatgaattatcctgtagtacaagattatcttattcccctgcccaggtgtgagcacgtgctctcgctccctttcaggtttactatgtttaaaactaaactgctgcaaaagttctcaatgttcttttccaacacatctatatatatatggacacacagtcacgcaagctagttcccatgactcctggatctatgtgtatgcagaaggctacatatacatagttgcttctttcctttccattgtagctctttgcctctcaattgtcattgatacatgcattgctcttattctgtctggcattacaattgcagttttgcctaatggcaaaaccagccatcccattggcaaaagagtcaacagtatctgtgtttgtactgtgcagttttcaggatgagatgacagatagcacgactacactgaggcaccctcagagaaggcagggcctgatttatctagctgtccagccgctgtggctggaggtaggctagttgggatgggcagctaagcagtcttctcttctgcctttatgagattgggtagaaagatggggcatattcatctacccccaaaagaacactataaaaacagctcctctatatttccacctctttctatttatgcaactcatcttcacagattgttctaaagtaaaatagatggtgtatgctgtatccacaaatcatctgtaacaattatgttttcagtgctgtgtcattccaaataaacctttggtaatcttcaacgattaccctaaaaaaaaaaaaaaaaaa

SEQ ID NO: 411 - protein, 653 aa, Homo sapiens
MADIKTGIFAKNVQKRLNRAQEKVLQKLGKADETKDEQFEEYVQNFKRQEAEGTRLQRELRGYLAAIKGMQEASMKLTESLHEVYEPDWYGREDVKMVGEKCDVLWEDFHQKLVDGSLLTLDTYLGQFPDIKNRIAKRSRKLVDYDSARHHLEALQSSKRKDESRISKAEEEFQKAQKVFEEFNVDLQEELPSLWSRRVGFYVNTFKNVSSLEAKFHKEIAVLCHKLYEVMTKLGDQHADKAFTIQGAPSDSGPLRIAKTPSPPEEPSPLPSPTASPNHTLAPASPAPARPRSPSQTRKGPPVPPLPKVTPTKELQQENIISFFEDNFVPEISVTTPSQNEVPEVKKEETLLDLDFDPFKPEVTPAGSAGVTHSPMSQTLPWDLWTTSTDLVQPASGGSFNGFTQPQDTSLFTMQTDQSMICNLIIPGADADAAVGTLVSAAEGAPGEEAEAEKATVPAGEGVSLEEAKIGTETTEGAESAQPEAEELEATVPQEKVIPSVVIEPASNHEEEGENEITIGAEPKETTEDAAPPGPTSETPELATEQKPIQDPQPTPSAPAMGAADQLASAREASQELPPGFLYKVETLHDFEAANSDELTLQRGDVVLVVPSDSEADQDAGWLVGVKESDWLQYRDLATYKGLFPENFTRRLD

SEQ ID NO: 412 - DNA, 1520 bp, Homo sapiens
atgctctcagattccaccttacctcaatgtttgaaaagaaaaaatttcagaccaagaagcagcttctccactcctggaatctctgccttgttcagcctgtctgcctccaccatgtccatcagggtgacccagaagtcctacaaggtgtccacctctggcctccgggccttcagcagctgctctcacatgagtgggcctggtgcccacctcagctccttaagcttctcccgagtgggcagcaccagcttccgggctggcctgggcagaggctatggtggggccagcagcatgggaggcatcactgccgtcatggtcaaccagaacctgctgagccccctgaacctggaggtggaccccaacatccaggccatgcgcacccaggagaaggagcagatcaagaccctcaacaagaagtttccctccttcattgacaagatacgtttcctggagcagcagaacaagatgctggagaccaaggggagcctcctgcagcagcagaagatggcttggagcaacgtggacatgttcgagagctacatcaacaactttatgcagcggctggagactctgagccaggagaagccgaagctggaggcagagcttggcaacatgcagaggctggcggagaacttcaagaaaaagtatgaggatgaaatcaataagcgtacagagatggagaatgaatttctcctcagatgtgggtgaagcttacatgaacaaggtagagctggagtctcgcctggaagcgctgactgaagagatcagcttcctcaggcagctgtatgaagaagagatccaggagctgcagtcctagatctcggacacgtctgtggtgctgtccatggacaacagctgctccctggacatggacagcatcatcgctgaggtcaaggctcagtacaaggtgatcgccaaccgcagcctgactgaggctgagagcacggaccagatgaagtatgaggagctgcagatgctggctgggaagcgctgggatgacctggggcgtacaaaggctgagatctccgagatgaaccggaacatcagctggctccaggctgagattgagggcctcaaaggccagagggcttccctagaggccgccgtcacagacgcagagcagcccggggagctggccatgaagggtgccaaagccaagctgtctgagctggagaccgccctgcagctagccaagcaggacatggctcagcagctgcgtgagtacaggaactggccctggacgcctacaggaagctgctggagggcgaggagagctggctggagtctgggatgcagaacatgagtatccatacgaagaccacctgtggctatgcaggtggtctgagctctcctacgggcgcctcacaagccccggcctcagctacggcctgggctccagctttggctctggcgcgggctccagctccttcagccacaccagctccaccagggccgtggctgtgaagatcaagacccgcgatgggaagctggcgtccgagtcctctgacattctgcccaagtga

SEQ ID NO: 413 - DNA, 4894 bp, Homo sapiens
ctgtcaggtgactctcccgtggcgccatggcggaagcagaggagcaggaaactgggtcccttgaagaatctacagatgagtctgaggaagaagagagcgaagaggaacccaagctgaagtatgaaaggctttccaatggggtaactgaaatacttcagaaggatgcagctagctgcatgacagtccatgacaagtttttggcattgggcacacattatggcaaggtttatttacttgatgtccaggggaacatcactcagaagtttgatgtaagtcctgtgaagataaatcagattagcttggatgaaagtggagagcacatgggtgtgtgttcagaggatggcaaggtgcaggtatttggactgtattctggagaagaatttcacgagacttttgactgtcccattaaaattattgctgtgcacccacatttcgtgagatccagttgcaagcagtttgtgaccggagggaagaagctgctactgtttgaacggtcttggatgaacagatggaagtctgctgttctgcatgaaggggaagggaacataaggagtgtgaagtggagaggccatctgattgcttgggccaataatatgggtgtgaagatttttgacatcatctcaaagcaaagaatcaccaatgtgccccgggatgatataagtcttcgcccagacatgtatccctgcagcctctgctggaaggacaatgtgacactgattattggctgggggacttctgtcaaggtgtgctcagtgaaggaacggcatgccagtgaaatgagggatttgccaagtcgatatgttgaaatagtgtctcagtttgaaactgaattctacatcagtggacttgcacctctctgtgatcagcttgttgtactttcgtatgtaaaggagatttcagaaaaaacggaaagagaatactgtgccaggcctagactggacatcatccagccactttctgagacttgtgaagagatctcttctgatgctttgacagtcagaggctttcaggagaatgaatgtagagattatcatttagaatactctgaaggggaatcacttttttacatcgtgagtccgagagatgttgtagtggccaaggaacgagaccaagatgatcacattgactggctccttgaaaagaagaaatatgaagaagcattgatggcagctgaaattagccaaaaaaatattaaaagacataagattctggatattggcttggcatatataaatcacctggtggagagaggagactatgacatagcagcacgcaaatgccagaaaattcttgggaaaaatgcagcactctgggaatatgaagtttataaatttaaagaaattggacagcttaaggctattagtccttatttgccaagaggtgatccagttctgaaaccactcatctatgaaatgatcttacatgaatttttggagagtgattatgagggttttgccacattgatccgagaatggcctggagatctgtataataattcagtcatagttcaagcagttcgggatcatttgaagaaagatagtcagaacaagactttacttaaaaccctggcagaattgtacacctatgacaagaactatggcaatgctctggaaatatacttaacattaagacataaagacgtttttcagttgatccacaagcataatcttttcagttctatcaaggataaaattgttttattaatggattttgattcagagaaagctgttgacatgcttttggacaatgaagataaaatttcaattaaaaaggtagtggaagaattggaagacagaccagagctacagcatgtgtatttgcataagcttttcaagagagaccaccataaggggcagcgttaccatgaaaaacagatcagtctttatgctgaatatgatcgaccaaacttacttccctttctccgagacagtacccattgcccacttgaaaaggctcttgagatctgtcaacagagaaactttgtagaagagacagtttatcttctgagccgaatgggtaatagccgaagtgccctgaagatgattatggaggaattacatgatgttgataaagcaatcgaatttgccaaggagcaagatgatggagagctgtgggaagatttgattttatattccattgacaaaccaccatttattactggcttgttaaacaacattggcacacatgttgacccaattctactgattcaccgtattaaggaaggaatggagatccccaatttgagagattccttggttaaaattctgcaagactacaatttgcaaattctgcttcgtgaaggctgcaagaagattctcgtagctgactctttgtccttactgaagaaaatgcaccgaactcaaatgaaaggtgttcttgttgatgaggagaacatctgtgagtcgtgcctttcccctattcttccatcagatgcagctaagcccttcagcgtggtggtcttccattgccggcacatgttccacaaggagtgcctgcccatgcccagcatgaactctgctgcacagttctgcaacatctgcagtgctaagaaccgtggaccaggaagtgcaattttggagatgaaaaaatagctcatttctccttgtcagtctccttgtcaccactctttttgagactgtttttgcaacaacaaaagcatttgttgacactcgtgctgttaagagatttgtttatgtttatattatactcaaaaacaatttcttcatctattcctgtactaatggtttctctttgcagttcacagagaatttggggctctcttcatgccttgaaattttggggtccatagtgaatattttgttatttatttgtttggctcattctttatatagtaatggaaacataagtctaggagttagaaatgaattttttagaccttagtaaaaccatttaaccataaaatggacaactgagaattctcccagctgcctgaaagcgtcgccaactgtggttatcctgcaagctgctacctgcaacttggacgttgtttccacgtgctctgctggctacgattcttgcattctgggtttggcttttttctgtgtcatcaactatggttatcctctaaataggcatttaatgaaacattgtacaaattgtcactcatttgatgacacctgggaataacattagcaggctgatgtcctgcaccattatgtttactaatcacatgttctgtgtgctgtgacgactgtcaaagagtatctggccatggcggacactcagcatttgttgattgaataaatgttagctcttctcattgtgaaggactcacttttactgggataaacaaatgcagttaagaattctggcacccttgtaaggaagaaaagagagttcaacaccttcgagtctgagcgcttgtggctagagtttgccaggagggaggaaaccagtgaccctgaaaactgagggtgcctcaggagcagtgggaccacctgatgctgaaggacggactaatgatgtttcctcttgccttctctggtgcctccattgccctcatggaacagagcatatcatagagggagaaaagtcaaacttgtaattgtgtcttacagttactggcttcatcttccttgggatatatggtcatcctctaatgagtgtaaaagtgcgcaaaacacatccttattgttcctgatctcttagtcccataaatgggaacaaatacagctttctgcttctttctttttggggaaaggacagggtgctagtgagtactgacagcatgccagctaccgaagtcacccagccattcccatgagcagcagttcatttaattgtcacagcgtcgccaggaagaagatctgataaacctaggtttacagataaagaaagcaaaatgtagagatgttgttgaggtcacagaggtgactgcctaacttcagagcagggcttctgatccctttaagaaattacagggccagccgggcatggtggctcacgcccgtaatcccagggctttgggaggccttggcaggtggatcacctgagatcgcacgttcgagaccagcctgaccaacatggagaaaccccatctctactaaaaacacaaattagccaggcgtggtggtacatgcctgtaatcccagctactcaggaggctgaggcaggagaatcacttgaccccaggagacgtaggttgtggtgagctgagatcgcgccattgcactccagcctgggcaacaagagcaaaactccgtctcaaaaaagaaaagaaaagaaaagaaatcatagggccaagttcaaaggaaatgcacagaacatatcttcacattagagttaagaattctctagcaaacaacagatttttttgttgttgttagtcacaaatacttagaactggaaggctctttgttattattgaatgtacccctcagccttctcagcatttccttatcccaagactagtgtgctttctgctacactgctagttttcagttttgttcttacccaattgttttttcttttcaacattaccaatttacagattcagtttattacatttacattaatcctcacttatgatttgagcaagctcatttccagaaaagtttactttaagatcatcaataggatttgctaatttcagtgaagtcattttgcttcaggggtaaattatcctagttaccaagtcctatttggacataaagaaaatcctacttatagaaaaggagaaaataattaaacagtcttcatttttaagtaactgatttaaaaggaaaataataaaatatgttcgtttatcatttcagaaattgctgtaacacactggaaaattcctgaacaatatagattttatcgttaataaaaaacactagctttcgttccttagaatgtcttttcttttgaataaacagtattgggtgattta

SEQ ID NO: 414 - protein, 854 aa, Homo sapiens
MAEAEEQETGSLEESTDESEEEESEEEPKLKYERLSNGVTEILQKDAASCMTVHDKFLALGTHYGKVYLLDVQGNITQKFDVSPVKINQISLDESGEHMGVCSEDGKVQVFGLYSGEEFHETFDCPIKIIAVHPHFVRSSCKQFVTGGKKLLLFERSWMNRWKSAVLHEGEGNIRSVKWRGHLIAWANNMGVKIFDIISKQRITNVPRDDISLRPDMYPCSLCWKDNVTLIIGWGTSVKVCSVKERHASEMRDLPSRYVEIVSQFETEFYISGLAPLCDQLVVLSYVKEISEKTEREYCARPRLDIIQPLSETCEEISSDALTVRGFQENECRDYHLEYSEGESLFYIVSPRDVVVAKERDQDDHIDWLLEKKKYEEALMAAEISQKNIKRHKILDIGLAYINHLVERGDYDIAARKCQKILGKNAALWEYEVYKFKEIGQLKAISPYLPRGDPVLKPLIYEMILHEFLESDYEGFATLIREWPGDLYNNSVIVQAVRDHLKKDSQNKTLLKTLAELYTYDKNYGNALEIYLTLRHKDVFQLIHKHNLFSSIKDKIVLLMDFDSEKAVDMLLDNEDKISIKKVVEELEDRPELQHVYLHKLFKRDHHKGQRYHEKQISLYAEYDRPNLLPFLRDSTHCPLEKALEICQQRNFVEETVYLLSRMGNSRSALKMIMEELHDVDKAIEFAKEQDDGELWEDLILYSIDKPPFITGLLNNIGTHVDPILLIHRIKEGMEIPNLRDSLVKILQDYNLQILLREGCKKILVADSLSLLKKMHRTQMKGVLVDEENICESCLSPILPSDAAKPFSVVVFHCRHMFHKECLPMPSMNSAAQFCNICSAKNRGPGSAILEMKK

SEQ ID NO: 415 - DNA, 4819 bp, Homo sapiens
ctgtcaggtgactctcccgtggcgccatggcggaagcagaggagcaggaaactgggtcccttgaagaatctacagatgagtctgaggaagaagagagcgaagaggaacccaagctgaagtatgaaaggctttccaatggggtaactgaaatacttcagaaggatgcagctagctgcatgacagtccatgacaagtttttggcattgggcacacattatggcaaggtttatttacttgatgtccaggggaacatcactcagaagtttgatgtagtgcaggtatttggactgtattctggagaagaatttcacgagacttttgactgtcccattaaaattattgctgtgcacccacatttcgtgagatccagttgcaagcagtttgtgaccggagggaagaagctgctactgtttgaacggtcttggatgaacagatggaagtctgctgttctgcatgaaggggaagggaacataaggagtgtgaagtggagaggccatctgattgcttgggccaataatatgggtgtgaagatttttgacatcatctcaaagcaaagaatcaccaatgtgccccgggatgatataagtcttcgcccagacatgtatccctgcagcctctgctggaaggacaatgtgacactgattattggctgggggacttctgtcaaggtgtgctcagtgaaggaacggcatgccagtgaaatgagggatttgccaagtcgatatgttgaaatagtgtctcagtttgaaactgaattctacatcagtggacttgcacctctctgtgatcagcttgttgtactttcgtatgtaaaggagatttcagaaaaaacggaaagagaatactgtgccaggcctagactggacatcatccagccactttctgagacttgtgaagagatctcttctgatgctttgacagtcagaggctttcaggagaatgaatgtagagattatcatttagaatactctgaaggggaatcacttttttacatcgtgagtccgagagatgttgtagtggccaaggaacgagaccaagatgatcacattgactggctccttgaaaagaagaaatatgaagaagcattgatggcagctgaaattagccaaaaaaatattaaaagacataagattctggatattggcttggcatatataaatcacctggtggagagaggagactatgacatagcagcacgcaaatgccagaaaattcttgggaaaaatgcagcactctgggaatatgaagtttataaatttaaagaaattggacagcttaaggctattagtccttatttgccaagaggtgatccagttctgaaaccactcatctatgaaatgatcttacatgaatttttggagagtgattatgagggttttgccacattgatccgagaatggcctggagatctgtataataattcagtcatagttcaagcagttcgggatcatttgaagaaagatagtcagaacaagactttacttaaaaccctggcagaattgtacacctatgacaagaactatggcaatgctctggaaatatacttaacattaagacataaagacgtttttcagttgatccacaagcataatcttttcagttctatcaaggataaaattgttttattaatggattttgattcagagaaagctgttgacatgcttttggacaatgaagataaaatttcaattaaaaaggtagtggaagaattggaagacagaccagagctacagcatgtgtatttgcataagcttttcaagagagaccaccataaggggcagcgttaccatgaaaaacagatcagtctttatgctgaatatgatcgaccaaacttacttccctttctccgagacagtacccattgcccacttgaaaaggctcttgagatctgtcaacagagaaactttgtagaagagacagtttatcttctgagccgaatgggtaatagccgaagtgccctgaagatgattatggaggaattacatgatgttgataaagcaatcgaatttgccaaggagcaagatgatggagagctgtgggaagatttgattttatattccattgacaaaccaccatttattactggcttgttaaacaacattggcacacatgttgacccaattctactgattcaccgtattaaggaaggaatggagatccccaatttgagagattccttggttaaaattctgcaagactacaatttgcaaattctgcttcgtgaaggctgcaagaagattctcgtagctgactctttgtccttactgaagaaaatgcaccgaactcaaatgaaaggtgttcttgttgatgaggagaacatctgtgagtcgtgcctttcccctattcttccatcagatgcagctaagcccttcagcgtggtggtcttccattgccggcacatgttccacaaggagtgcctgcccatgcccagcatgaactctgctgcacagttctgcaacatctgcagtgctaagaaccgtggaccaggaagtgcaattttggagatgaaaaaatagctcatttctccttgtcagtctccttgtcaccactctttttgagactgtttttgcaacaacaaaagcatttgttgacactcgtgctgttaagagatttgtttatgtttatattatactcaaaaacaatttcttcatctattcctgtactaatggtttctctttgcagttcacagagaatttggggctctcttcatgccttgaaattttggggtccatagtgaatattttgttatttatttgtttggctcattctttatatagtaatggaaacataagtctaggagttagaaatgaattttttagaccttagtaaaaccatttaaccataaaatggacaactgagaattctcccagctgcctgaaagcgtcgccaactgtggttatcctgcaagctgctacctgcaacttggacgttgtttccacgtgctctgctggctacgattcttgcattctgggtttggcttttttctgtgtcatcaactatggttatcctctaaataggcatttaatgaaacattgtacaaattgtcactcatttgatgacacctgggaataacattagcaggctgatgtcctgcaccattatgtttactaatcacatgttctgtgtgctgtgacgactgtcaaagagtatctggccatggcggacactcagcatttgttgattgaataaatgttagctcttctcattgtgaaggactcacttttactgggataaacaaatgcagttaagaattctggcacccttgtaaggaagaaaagagagttcaacaccttcgagtctgagcgcttgtggctagagtttgccaggagggaggaaaccagtgaccctgaaaactgagggtgcctcaggagcagtgggaccacctgatgctgaaggacggactaatgatgtttcctcttgccttctctggtgcctccattgccctcatggaacagagcatatcatagagggagaaaagtcaaacttgtaattgtgtcttacagttactggcttcatcttccttgggatatatggtcatcctctaatgagtgtaaaagtgcgcaaaacacatccttattgttcctgatctcttagtcccataaatgggaacaaatacagctttctgcttctttctttttggggaaaggacagggtgctagtgagtactgacagcatgccagctaccgaagtcacccagccattcccatgagcagcagttcatttaattgtcacagcgtcgccaggaagaagatctgataaacctaggtttacagataaagaaagcaaaatgtagagatgttgttgaggtcacagaggtgactgcctaacttcagagcagggcttctgatccctttaagaaattacagggccagccgggcatggtggctcacgcccgtaatcccagggctttgggaggccttggcaggtggatcacctgagatcgcacgttcgagaccagcctgaccaacatggagaaaccccatctctactaaaaacacaaattagccaggcgtggtggtacatgcctgtaatcccagctactcaggaggctgaggcaggagaatcacttgaccccaggagacgtaggttgtggtgagctgagatcgcgccattgcactccagcctgggcaacaagagcaaaactccgtctcaaaaaagaaaagaaaagaaaagaaatcatagggccaagttcaaaggaaatgcacagaacatatcttcacattagagttaagaattctctagcaaacaacagatttttttgttgttgttagtcacaaatacttagaactggaaggctctttgttattattgaatgtacccctcagccttctcagcatttccttatcccaagactagtgtgctttctgctacactgctagttttcagttttgttcttacccaattgttttttcttttcaacattaccaatttacagattcagtttattacatttacattaatcctcacttatgatttgagcaagctcatttccagaaaagtttactttaagatcatcaataggatttgctaatttcagtgaagtcattttgcttcaggggtaaattatcctagttaccaagtcctatttggacataaagaaaatcctacttatagaaaaggagaaaataattaaacagtcttcatttttaagtaactgatttaaaaggaaaataataaaatatgttcgtttatcatttcagaaattgctgtaacacactggaaaattcctgaacaatatagattttatcgttaataaaaaacactagctttcgttccttagaatgtcttttcttttgaataaacagtattgggtgattta

SEQ ID NO: 416 - protein, 829 aa, Homo sapiens
MAEAEEQETGSLEESTDESEEEESEEEPKLKYERLSNGVTEILQKDAASCMTVHDKFLALGTHYGKVYLLDVQGNITQKFDVVQVFGLYSGEEFHETFDCPIKIIAVHPHFVRSSCKQFVTGGKKLLLFERSWMNRWKSAVLHEGEGNIRSVKWRGHLIAWANNMGVKIFDIISKQRITNVPRDDISLRPDMYPCSLCWKDNVTLIIGWGTSVKVCSVKERHASEMRDLPSRYVEIVSQFETEFYISGLAPLCDQLVVLSYVKEISEKTEREYCARPRLDIIQPLSETCEEISSDALTVRGFQENECRDYHLEYSEGESLFYIVSPRDVVVAKERDQDDHIDWLLEKKKYEEALMAAEISQKNIKRHKILDIGLAYINHLVERGDYDIAARKCQKILGKNAALWEYEVYKFKEIGQLKAISPYLPRGDPVLKPLIYEMILHEFLESDYEGFATLIREWPGDLYNNSVIVQAVRDHLKKDSQNKTLLKTLAELYTYDKNYGNALEIYLTLRHKDVFQLIHKHNLFSSIKDKIVLLMDFDSEKAVDMLLDNEDKISIKKVVEELEDRPELQHVYLHKLFKRDHHKGQRYHEKQISLYAEYDRPNLLPFLRDSTHCPLEKALEICQQRNFVEETVYLLSRMGNSRSALKMIMEELHDVDKAIEFAKEQDDGELWEDLILYSIDKPPFITGLLNNIGTHVDPILLIHRIKEGMEIPNLRDSLVKILQDYNLQILLREGCKKILVADSLSLLKKMHRTQMKGVLVDEENICESCLSPILPSDAAKPFSVVVFHCRHMFHKECLPMPSMNSAAQFCNICSAKNRGPGSAILEMKK

SEQ ID NO: 417 - DNA, 8209 bp, Homo sapiens
gtctatgggaagttcggggacttgacagccgctgccgccgcagggcatttttggtcgaagagagctgaagtaatgagaagacatcatggaggcccagtcccacagctccacgaccactgaaaagaaaaaagttgagaattccatagtgaagtgctccactcgaacagatgtgagcgagaaagccgttgcctccagcaccacttctaatgaggatgaaagtcctggacagacttatcacagagagagaagaaacgcaatcactatgcagccacagaatgtccaggggctcagcaaagtcagtgaggaaccttcaacatcgagtgacgagagggcctcattgatcaagaaagagatccatgggtccctgccacacgtggcggagccctctgtgccgtaccgcgggacggtgtttgccatggaccccaggaatggttacatggagccccactaccaccctcctcatcttttccctgccttccatcctcctgtaccaattgatgccagacatcatgagggccgttaccattacgatccatctccgattcctccattgcatatgacttccgccttatctagtagccctacgtatccggacctgcccttcattaggatctccccacaccggaaccccactgctgcttccgagtctcccttcagccctccacatccctacattaatccctacatggactatatccgctccttgcacagcagcccatcgctctccatgatctcagcaacccgtgggctgagccctacagatgcgccccatgcaggagtcagcccagcagaatactatcatcagatggccctgctaactggccagcgcagcccctatgcagacattattccctcagctgccaccgccggcacgggggccatccacatggaatatcttcatgctatggatagcaccagattctccagccccaggctgtcagccaggccgagccgaaaacgtacactgtccatatcaccactctccgatcatagctttgaccttcagaccatgataaggacgtctcccaactccttggtcacgattctcaataattcccgtagcagctcttcagcaagtggctcctatggtcacttatctgcaagtgcaatcagccctgccttgagcttcacctactcttccgcgcccgtctctctccacatgcatcagcagatcctaagccgacaacagagcttaggttcagcctttggacacagccctccactcatccaccctgccccaacttttccaacacagaggcctattccagggatccctacggttctgaaccccgtccaggtcagctccggcccttctgagtcctcacagaacaagcccacgagtgagtctgcagtgagcagcactggtgacccgatgcacaacaagaggtccaagatcaaacccgatgaagacctccccagcccaggggctcgggggcagcaggaacagcccgaaggaacaacccttgtcaaggaggaaggggacaaagatgaaagcaaacaggagcctgaagtcatctatgagacaaactgccactgggaaggctgcgcgagggagttcgacacccaagagcagcttgtgcaccatataaataacgaccatattcatggagagaagaaggagttcgtgtgcaggtggctggactgctcaagagagcagaaacccttcaaagcccagtatatgttggtagtgcatatgagaagacacacgggcgagaagcctcacaaatgcacttttgaaggttgcacaaaggcctactcgagactagaaaacttgaaaacacacttgagatctcacactggagagaaaccatacgtctgtgagcacgaaggttgcaacaaggctttctcaaatgcctctgatcgcgccaaacaccaaaacagaacgcattccaatgagaaaccatatgtgtgcaaaatcccaggctgcactaagcgttacacagacccaagctccctccggaaacatgtgaagacagtgcatggcccagaggctcatgtcaccaagaagcagcgaggggacatccatcctcggccgccacccccgagagattccggcagccattcacagtccaggtcgcctggccgaccgactcagggagcccttggtgagcagcaggacctcagcaacactacctcaaagcgggaagaatgcctccaggtgaaaaccgtcaaggcagagaagccaatgacatctcagccaagccctggtggtcagtcttcatgcagcagccaacagtcccccatcagcaactattccaacagtgggctcgagcttcctctgaccgatggaggtagtataggagacctcagtgccatcgatgaaaccccaatcatggactcaaccatttccactgcaaccacagcccttgctttgcaagccaggagaaacccggcagggaccaaatggatggagcacgtaaaactagaaaggctaaaacaagtgaatggaatgtttccgcgactgaaccccattctaccccctaaagcccctgcggtctctcctctcataggaaatggcacacagtccaacaacacctgcagcttgggtgggcccatgacgcttctcccgggcagaagcgacctctctggggtggacgtcactatgctgaacatgctcaacagaagggacagcagcgccagcaccatcagctcggcctacctgagcagccgccgctcctcagggatctcgccctgcttctccagccgccgctccagcgaggcgtcacaggccgagggccggccgcagaacgtgagcgtggccgactcctacgaccccatctccaccgacgcctcgcgccgctccagcgaagccagccagagcgacggcctgcccagcctgctcagcctcacgcccgcccagcagtaccgcctcaaggccaagtacgcggctgccacaggagggccgccgccgacgcccctgcccaacatggagaggatgagcctgaagacgcgcctggcgctgctcggggatgccctcgagcctggcgtggccctgcctccagttcatgccccgaggaggtgcagcgacgggggagcccacggctacgggcggcgccacctgcagccgcacgatgcgccgggccacggcgtgaggagggccagcgacccggtgcggacaggctccgagggcctggccctgcctcgtgtgccgcgcttcagcagcctcagcagctgcaaccccccggcgatggccacgtccgcggagaagcgcagtctcgtgcttcagaattacacgcggcccgagggcggccagtcccgaaacttccactcgtccccctgtcctcccagcatcaccgagaacgtcaccctggagtccctgaccatggacgctgatgccaacctgaacgatgaggatttcctgccggacgacgtggtgcagtatttaaattcccagaaccaagcagggtacgagcagcacttccccagcgccctcccggacgacagcaaagtgccccacgggcccggtgactttgacgcgcccgggctgccagacagccacgctggccagcagttccatgccctcgagcagccctgccccgagggcagcaaaaccgacctgcccattcagtggaacgaagtcagctccggaagcgccgacctgtcctcctccaagctcaagtgtgggccgcggcccgctgtgccgcagactcgcgcctttgggttctgcaacggcatggtcgtccacccgcagaaccccttgaggagcgggcctgctgggggctatcagaccctcggggagaacagcaacccctacggtggcccagagcacttgatgctccacaacagccccggaagtggcaccagtggaaacgccttccatgaacagccctgtaaggccccgcagtatgggaactgtctcaacaggcagccagtggcccctggtgcactcgacggtgcctgtggtgccgggattcaagcctcaaagctgaagagcacccccatgcaagggagcgggggccagctgaatttcggcctgccggtagcgccaaatgagtcagctggcagcatggtgaatggcatgcagaaccaggacccagtgggacaggggtacctggctcaccagctcctcggcgacagcatgcagcacccgggggcaggccgccccggtcagcagatgcttgggcagattagtgctacctcacacatcaacatctaccaagggccagagagctgcctgccaggggctcacggcatgggcagccagccgtcaagcttggcagttgtcaggggctaccagccatgtgccagctttgggggcagcaggcgccaggctatgccgagggacagccttgctctgcagtcaggacagctcagtgacacaagtcagacctgcagggtgaatggtatcaagatggagatgaaagggcagccccatccgctgtgctctaatctgcagaattactctggtcagttctatgaccaaaccgtgggcttcagtcagcaagacacgaaagctggttcattctctatttcagacgccagctgcctgctacaggggaccagcgccaaaaactctgagttactttccccaggtgctaatcaggtgacaagcacagtggacagcctcgacagccatgacctggaaggggtacagattgacttcgatgccatcatagacgatggggaccactccagcctgatgtcgggggccctgagcccaagtatcattcagaacctttcccatagctcctcccgcctcaccacgcctcgggcgtccctcccattcccagcgctgtccatgagcaccaccaacatggctatcggggacatgagttctttgctgacctccctagcggaagaaagcaaattccttgcagttatgcaataggctttaggaaaaaaagactgcaaccaacggaaatcaataggagttgaagagattaaactgactttgttttggctgtttttttagttctgtatgtattttagcaatctcatctcacctaactgagatgtgtttcaattatattccttttatggaaaaggactctgaaaaaccctaaagtattctagggagaaactgtcttccatttcagttttgaatcagtattgttacactcaaaccaccctctttttaaaaaaaaaaaaaaaaactgtaagccccgccccctttttagtaaaccgatgtaaatttgtgatgtgcatattcttctttcttttagaagagcagtcaaattaaaggatttgacatgttttgctgttgctcaaaggaaataggagttggtgtgcttgtgaccaaggggttacacttccagcttttaaaattctcctttacatgtgctcagtgttttgttttgtgttttggtttctgttttttattttaattcccacattgggcacaagaatcagaatatggatagctagtttaagaaacttttgtgggtgcactgtagcatagatgacagaatattgatgttccccccatctccaattcagttcagggcattccacagttaaacagaaatgggaacgtggggctcttataaatgaaatgggcgctcacagttttggttttcagctcttcatgtctgtaagtgtgctttgggggaggctatgtctgtatggtcgattctcagttatcacatttgcctctcctcccactaccttcatgaacattcagtgctgtttcgcactgcagttagagagaagggacggacagttggtgacactcagccacattgctacttttatctgttctggtaagaagttagatagatggtagattgaagcaattgggtagaattagttgggggaatatttatgagttgctgtgtttgttgattagttccatctctttcccattttaactgagaattgattatatatagctctaagtatataggtatttaaacaaccccacaagcggctgtatcagtaacatttattaattccactatagtgagggaggatttccattctaaataccttattttgagggatttataaaacttagttgtaaaagagaaagcccacatagtgggaataaattgcttcagccatttttagtatttgagagcactagggaagatgtttagtagctgtgtggatgccttttttcacaccctgtctattgaatgctgcatccattcacgaagttaaatgttacatgcagttagtccttaatgtggactggatctgtacttttgttttggattaaaacatttaaagatttttgaagtgcagctactccccacgtgcatttgatacacataaaagtcatactgtgtgtgcacaaagagtacatggattttccagcatattgctttaaaaaattatataaactgttaaaatattaacacctcaggctacctgctgtattctgtcccattgacccctggaattggatttactgcaagtgattgataattcaattatgtggcttttcccctttaatcttgccatttaaattacagtagaaagacaaaatcaagtaaaataaagtgttagataatagaaagagtgttaagaccagcccacttttctcatgtttatgttctttcatttggaccaagaatctccgcatggaggttgatttgccactggggactttggctaagactattaggtttgctttcaactagatgttcctgagacaagcagagggacactgcaattccccttccatgcctgctgttctcccccatgtaagtcttctttgaaattaacggatgtgtctcctttggaacagccccataacaaaagagaactactgatctgagcataggaaagtagaggctctaccacttttcagttgaaaaagcaagactttctctgtgtttctgaaacaaggcataatgttgtcacagaatcagagatccagtctcacttttccacaaatctccaaatctccagtcttatcttgtgtgctctaatggtttggttcaatccctttccaactcttgttttcaaagcatggggcctgagtgttctccactcctcctaagaaaggagcttgggtggaagggaccatgctgacctcctccatcagagggctcttccagtagtattctcggatgcaacctccatttctcagttaccattatttcctgtatcagctttgtccttcctggagggatgcacagtgatccggcccaccactgttgttgtcttgtgcttctgctctttcctatggtttcaggttattttctgggtttcccctattcttcttttatttctttttttttttatatttgctttcctttctactgcttttagatttgcaggagatgcaagtttcagctcaatgtttggcttctctcaatatggaaatttcagaaggacagaggagaggagggaggaagaagaaagtatactcctccagaatttcagtgatctgttgtggcagtccagtggaaggaaggtcttttgaggtcacttagaagcatctttttgggacatccttttgggatctctgtaggctaggcatctcatatcttgagactcacccccagcctccaagcctctctccatttctctaacctatgcattttagagcgagaggaccgcctcactagtgtcaccatcctgccttttctaaaacatgcaggctcacacattctactcctgcttaatgtctgtgttaaacgttttctaaccatttttgttttatttttctgaaaaagttaacccctcccaactcctcacacattggctcttcctcttgagccacaaagttttgattcttgcgatgtatgtgccttattttatgttaatcttgtcaatgagagggaccagttggtgttgcccaatcagcactccaaggctgtgtgtgcaccagccagagagcgcacggtggtagcagagtcgaggctgtcttgtatcctggtttcatgtgttgttttgaactgataggaggatgttctcttctgacaagttacccttgtgtatcctgcagacatgtaaaataaaatacaagttcatttttttcaccttttttagatttttttaaaaaataaaatgtgtaatcctttttttaaaagaaacacatgtaaatacatttaagtattgtaggcatagcgttcagatgtgactggcccaggcgttcctcggacaagcctgcattccccgtgatcacgcccacctcaagcccaggggctgcagcccagccacagatgaactctacctttgctttcagaaccacttagtccttttgtaacaaagaaaaaaaaatgtttcttacaatgtcaataaaaaattctttgtatggaaa

SEQ ID NO: 418 - protein, 1580 aa, Homo sapiens
MEAQSHSSTTTEKKKVENSIVKCSTRTDVSEKAVASSTTSNEDESPGQTYHRERRNAITMQPQNVQGLSKVSEEPSTSSDERASLIKKEIHGSLPHVAEPSVPYRGTVFAMDPRNGYMEPHYHPPHLFPAFHPPVPIDARHHEGRYHYDPSPIPPLHMTSALSSSPTYPDLPFIRISPHRNPTAASESPFSPPHPYINPYMDYIRSLHSSPSLSMISATRGLSPTDAPHAGVSPAEYYHQMALLTGQRSPYADIIPSAATAGTGAIHMEYLHAMDSTRFSSPRLSARPSRKRTLSISPLSDHSFDLQTMIRTSPNSLVTILNNSRSSSSASGSYGHLSASAISPALSFTYSSAPVSLHMHQQILSRQQSLGSAFGHSPPLIHPAPTFPTQRPIPGIPTVLNPVQVSSGPSESSQNKPTSESAVSSTGDPMHNKRSKIKPDEDLPSPGARGQQEQPEGTTLVKEEGDKDESKQEPEVIYETNCHWEGCAREFDTQEQLVHHINNDHIHGEKKEFVCRWLDCSREQKPFKAQYMLVVHMRRHTGEKPHKCTFEGCTKAYSRLENLKTHLRSHTGEKPYVCEHEGCNKAFSNASDRAKHQNRTHSNEKPYVCKIPGCTKRYTDPSSLRKHVKTVHGPEAHVTKKQRGDIHPRPPPPRDSGSHSQSRSPGRPTQGALGEQQDLSNTTSKREECLQVKTVKAEKPMTSQPSPGGQSSCSSQQSPISNYSNSGLELPLTDGGSIGDLSAIDETPIMDSTISTATTALALQARRNPAGTKWMEHVKLERLKQVNGMFPRLNPILPPKAPAVSPLIGNGTQSNNTCSLGGPMTLLPGRSDLSGVDVTMLNMLNRRDSSASTISSAYLSSRRSSGISPCFSSRRSSEASQAEGRPQNVSVADSYDPISTDASRRSSEASQSDGLPSLLSLTPAQQYRLKAKYAAATGGPPPTPLPNMERMSLKTRLALLGDALEPGVALPPVHAPRRCSDGGAHGYGRRHLQPHDAPGHGVRRASDPVRTGSEGLALPRVPRFSSLSSCNPPAMATSAEKRSLVLQNYTRPEGGQSRNFHSSPCPPSITENVTLESLTMDADANLNDEDFLPDDVVQYLNSQNQAGYEQHFPSALPDDSKVPHGPGDFDAPGLPDSHAGQQFHALEQPCPEGSKTDLPIQWNEVSSGSADLSSSKLKCGPRPAVPQTRAFGFCNGMVVHPQNPLRSGPAGGYQTLGENSNPYGGPEHLMLHNSPGSGTSGNAFHEQPCKAPQYGNCLNRQPVAPGALDGACGAGIQASKLKSTPMQGSGGQLNFGLPVAPNESAGSMVNGMQNQDPVGQGYLAHQLLGDSMQHPGAGRPGQQMLGQISATSHINIYQGPESCLPGAHGMGSQPSSLAVVRGYQPCASFGGSRRQAMPRDSLALQSGQLSDTSQTCRVNGIKMEMKGQPHPLCSNLQNYSGQFYDQTVGFSQQDTKAGSFSISDASCLLQGTSAKNSELLSPGANQVTSTVDSLDSHDLEGVQIDFDAIIDDGDHSSLMSGALSPSIIQNLSHSSSRLTTPRASLPFPALSMSTTNMAIGDMSSLLTSLAEESKFLAVMQ

SEQ ID NO: 419 - DNA, 3259 bp, Homo sapiens
ggggcagggcgggggcggtggggcctcccctagccttccctccccctctccttcactgtccttccagcaggcacaggaaggtgaggcaaggtgtttccagccggcaggatggaggacgaggaaggccctgagtatggcaaacctgactttgtgcttttggaccaagtgaccatggaggacttcatgaggaacctgcagctcaggttcgagaagggccgcatctacacctacatcggtgaggtgctggtgtccgtgaacccctaccaggagctgcccctgtatgggcctgaggccatcgccaggtaccagggccgtgagctctatgagcggccaccccatctctatgctgtggccaacgccgcctacaaggcaatgaagcaccggtccagggacacctgcatcgtcatctcaggggagagtggggcagggaagacagaagccagtaagcacatcatgcagtacatcgctgctgtcaccaatccaagccagagggctgaggtggagagggtcaaggacgtgctgctcaagtccacctgtgtgctggaggcctttggcaatgcccgcaccaaccgcaatcacaactccagccgctttggcaagtacatggacatcaactttgacttcaagggggacccgatcggaggacacatccacagctacctactggagaagtctcgggtcctcaagcagcacgtgggtgaaagaaacttccacgccttctaccaattgctgagaggcagtgaggacaagcagctgcatgaactgcacttggagagaaaccctgctgtatacaatttcacacaccagggagcaggactcaacatgactgtgcacagtgccttggacagtgatgagcagagccaccaggcagtgaccgaggccatgagggtcatcggcttcagtcctgaagaggtggagtctgtgcatcgcatcctggctgccatattgcacctgggaaacatcgagtttgtggagacggaggagggtgggctgcagaaggagggcctggcagtggccgaggaggcactggtggaccatgtggctgagctgacggccacaccccgggacctcgtgctccgctccctgctggctcgcacagttgcctcgggaggcagggaactcatagagaagggccacactgcagctgaggccagctatgcccgggatgcctgtgccaaggcagtgtaccagcggctgtttgagtgggtggtgaacaggatcaacagtgtcatggaaccccggggccgggatcctcggcgtgatggcaaggacacagtcattggcgtgctggacatctatggcttcgaggtgtttcccgtcaacagtttcgagcagttctgcatcaactactgcaacgagaagctgcagcagctattcatccagctcatcctgaagcaggaacaggaagagtacgagcgcgagggcatcacctggcagagcgttgagtatttcaacaacgccaccattgtggatctggtggagcggccccaccgtggcatcctggccgtgctggacgaggcctgcagctctgctggcaccatcactgaccgaatcttcctgcagaccctggacacgcaccaccgccatcacctacactacaccagccgccagctctgccccacagacaagaccatggagtttggccgagacttccggatcaagcactatgcaggggacgtcacgtactccgtggaaggcttcatcgacaagaacagagatttcctcttccaggacttcaagcggctgctgtacaacagcacggaccccactctacgggccatgtggccggacgggcagcaggacatcacagaggtgaccaagcgccccctgacggctggcacactcttcaagaactccatggtggccctggtggagaaccttgcctccaaggagcccttctacgtccgctgcatcaagcccaatgaggacaaggtagctgggaagctggatgagaaccactgtcgccaccaggtcgcatacctggggctgctggagaatgtgagggtccgcagggctggcttcgcttcccgccagccctactctcgattcctgctcaggtacaagatgacctgtgaatacacatggcccaaccacctgctgggctccgacaaggcagccgtgagcgctctcctggagcagcacgggctgcagggggacgtggcctttggccacagcaagctgttcatccgctcaccccggacactggtcacactggagcagagccgagcccgcctcatccccatcattgtgctgctattgcagaaggcatggcggggcaccttggcgaggtggcgctgccggaggctgagggctatctacaccatcatgcgctggttccggagacacaaggtgcgggctcacctggctgagctgcagcggcgattccaggctgcaaggcagccgccactctacgggcgtgaccttgtgtggccgctgccccctgctgtgctgcagcccttccaggacacctgccacgcactcttctgcaggtggcgggcccggcagctggtgaagaacatccccccttcagacatgccccagatcaaggccaaggtggccgccatgggggccctgcaagggcttcgtcaggactggggctgccgacgggcctgggcccgagactacctgtcctctgccactgacaatcccacagcatcaagcctgtttgctcagcgactaaagacacttcgggacaaagatggcttcggggctgtgctcttttcaagccatgtccgcaaggtgaaccgcttccacaagatccggaaccgggccctcctgctcacagaccagcacctctacaagctggaccctgaccggcagtaccgggtgatgcgggccgtgccccttgaggcggtgacggggctgagcgtgaccagcggaggagaccagctggtggtgctgcacgcccgcggccaggacgacctcgtggtgtgcctgcaccgctcccggccgccattggacaaccgcgttggggagctggtgggcgtgctggccgcacactgccagggggagggccgcaccctggaggttcgcgtctccgactgcatcccactaagccatcgcggggtccggcgcctcatctccgtggagcccaggccggagcagccagagcccgatttccgctgcgctcgcggctccttcaccctgctctggcccagccgctgagcgcccgcacccgccgcaccccgaggccgccaattgtccgccccgccagcgctgcaaataaaccttctgagtcagccaaaaaaaaaaaaaaaaa

SEQ ID NO: 420 - protein, 1018 aa, Homo sapiens
MEDEEGPEYGKPDFVLLDQVTMEDFMRNLQLRFEKGRIYTYIGEVLVSVNPYQELPLYGPEAIARYQGRELYERPPHLYAVANAAYKAMKHRSRDTCIVISGESGAGKTEASKHIMQYIAAVTNPSQRAEVERVKDVLLKSTCVLEAFGNARTNRNHNSSRFGKYMDINFDFKGDPIGGHIHSYLLEKSRVLKQHVGERNFHAFYQLLRGSEDKQLHELHLERNPAVYNFTHQGAGLNMTVHSALDSDEQSHQAVTEAMRVIGFSPEEVESVHRILAAILHLGNIEFVETEEGGLQKEGLAVAEEALVDHVAELTATPRDLVLRSLLARTVASGGRELIEKGHTAAEASYARDACAKAVYQRLFEWVVNRINSVMEPRGRDPRRDGKDTVIGVLDIYGFEVFPVNSFEQFCINYCNEKLQQLFIQLILKQEQEEYEREGITWQSVEYFNNATIVDLVERPHRGILAVLDEACSSAGTITDRIFLQTLDTHHRHHLHYTSRQLCPTDKTMEFGRDFRIKHYAGDVTYSVEGFIDKNRDFLFQDFKRLLYNSTDPTLRAMWPDGQQDITEVTKRPLTAGTLFKNSMVALVENLASKEPFYVRCIKPNEDKVAGKLDENHCRHQVAYLGLLENVRVRRAGFASRQPYSRFLLRYKMTCEYTWPNHLLGSDKAAVSALLEQHGLQGDVAFGHSKLFIRSPRTLVTLEQSRARLIPIIVLLLQKAWRGTLARWRCRRLRAIYTIMRWFRRHKVRAHLAELQRRFQAARQPPLYGRDLVWPLPPAVLQPFQDTCHALFCRWRARQLVKNIPPSDMPQIKAKVAAMGALQGLRQDWGCRRAWARDYLSSATDNPTASSLFAQRLKTLRDKDGFGAVLFSSHVRKVNRFHKIRNRALLLTDQHLYKLDPDRQYRVMRAVPLEAVTGLSVTSGGDQLVVLHARGQDDLVVCLHRSRPPLDNRVGELVGVLAAHCQGEGRTLEVRVSDCIPLSHRGVRRLISVEPRPEQPEPDFRCARGSFTLLWPSR

SEQ ID NO: 421 - DNA, 133 bp, Homo sapiens
tagcaagcctccagcgtgcttgggtctgcggtgaccctatgcattccttcagtgcttgctagaacagttttgaaacggtttgaggccttgccctgctccatccagagcaaggttatagaaatttcagacaatg

SEQ ID NO: 422 - DNA, 648 bp, Homo sapiens
atgctcgacccgggcccgccgcccccgcgctcccggcgccgcccgccagccgggcccgaagtctccgccccggccgcgccccacacccgcacttccgggcccgagccccctccgccccgcccaggccccaccttccccagcgcaggccccgcccacggttgtcgctcatcctcactttcaggcccaagggaatccgacccgcagcgatcagaccccgccccttcagggagaacacggcccgttggccccgctcacggcgagagcaccgcccacaggctgaagatcctgccccttcaggacggccgagaacgcgcctgccttgcaccacccccaccccgccccgcgtccttcaggagagccggaaacgctcctacccctacttcgcttctgcacggccgcgagaacgcacctgtccagccccctgttcgctccgcccactcagcgcgcgcgggagcgcgcgcgggagcagctccaactttttcaatttgccgccatctttacggcggccgacttcccagcctgcctcgcgtccagggaggcggagctcaggcaggctcctgttcattcccaaggctccgtgtccacatcgtgcttggattccgcccggccccgcctgtgcggccgcaccaggaaggcaccacccattag

SEQ ID NO: 423 - protein, 215 aa, Homo sapiens
MLDPGPPPPRSRRRPPAGPEVSAPAAPHTRTSGPEPPPPRPGPTFPSAGPAHGCRSSSLSGPRESDPQRSDPAPSGRTRPVGPAHGESTAHRLKILPLQDGRERACLAPPPPRPASFRRAGNAPTPTSLLHGRENAPVQPPVRSAHSARAGARAGAAPTFSICRHLYGGRLPSLPRVQGGGAQAGSCSFPRLRVHIVLGFRPAPPVRPHQEGTTH

SEQ ID NO: 424 - DNA, 2140 bp, Homo sapiens
tttgaaattaatgtccttctgttgactgcagaatttctgctggaaatgcagggaggctgcttgtggggttcgcgtgctgtgggaagtagggaaaatgagctggtttactttgtgtctttttgtgcatgcagactgtttggattttgccaacagtttctgggtgctgcctgctttttaaacttttaaaaaattgtaaacagcttcagtggctttgcagaaggaagctgtggtttctggtcttcctgttcagtcatgtttttttcagagggagggctaacatctggccatatttttcaacaaattcagaagtgagtagagaatgcatagtagctgtcggcagaggaggaaccagaatctctccaaagaaattcctcaaacagaatttcacacagggtattccatggagaatgagcctggaattgtctcgccatttaaacgagtattcctaaaaggtgaaaagagtagagataagaaagcccatgagaaggtgacagagaggcgccctctgcacactgtggtgttgtcattgcctgagcgcgtcgagccagacagactgctgagcgactatattgagaaggaggtaaagtatttaggtcagttaacgtccataccaggatacctgaatccctccagtaggactgaaatcctgcatttcatagacaatgcaaagagagcccaccagcttccgggacacttgactcaggagcacgatgctgtgctcagcctgtctgcgtacaacgtcaagctggcctggagggacggggaggatatcatcctcagggtgcccatccatgacatcgccgccgtctcctatgttcgggatgacgctgcacacctggtggtcctgaagacagcccaggacccagggatctcccccagccagagtctgtgtgcggaaagttccagaggcctcagtgcaggctccctgtcggagagtgcagttgggcccgtggaggcatgctgcctggtcatcctggctgcagagagcaaggtcgctgcggaggagctttgctgtctgctaggccaggtcttccaggttgtttacacggagtccaccatcgactttctggacagagcgatatttgatggggcctctaccccgacccaccacctgtccctgcacagcgatgactcttctacaaaagtggacattaaggagacctacgaggtggaagccagcactttctgcttccctgaatctgtggatgtgggtggtgcatcaccccacagcaagaccatcagtgagagcgagctgagcgccagcgccactgagctgctgcaggactacatgctgacgctgcgcaccaagctgtcatcacaggagatccagcagtttgcagcactgctgcacgagtaccgcaatggggcctctatccacgagttctgcatcaacctgcggcagctctacggggacagccgcaagttcctgctgcttggtctgaggcccttcatccctgagaaggacagccagcacttcgagaacttcctggagaccattggcgtgaaggatggccgcggcatcatcactgacagctttggcaggcaccggcgggccctgagcaccacatccagttccaccaccaatgggaacagggccacgggcagctctgatgaccggtcggcaccctcagagggggatgagtgggaccgcatgatctcggacatcagcagcgacattgaggcgctgggctgcagcatggaccaggactcagcatgatggacagtggatgggggggcacccacaccttccgcgcagtcgtcataggccttcccagaaggagctgcccagacctgcgtgtcagcccttggtggtggccagggagaggcgcccggtgcagatggccccgggcggcccaggtcctctactgtgaaggagcagggagctgccgagggacacgagcctcagtgcggggtggaaggctctttgccttgtccaccagggctcagccaagccctgcagtgtgtccccgctcggggagggcccggccgagcgggcagggagagccagtcctgtcggctgggcccttggacggctgtcagttttgcacatgatgttcctattgtaactctcagagaccttaaaaagaagtttactgcaatgtgaataatttaatctctggttgccaagcaaaaaaaaaaa

SEQ ID NO: 425 - protein, 465 aa, Homo sapiens
MHSSCRQRRNQNLSKEIPQTEFHTGYSMENEPGIVSPFKRVFLKGEKSRDKKAHEKVTERRPLHTVVLSLPERVEPDRLLSDYIEKEVKYLGQLTSIPGYLNPSSRTEILHFIDNAKRAHQLPGHLTQEHDAVLSLSAYNVKLAWRDGEDIILRVPIHDIAAVSYVRDDAAHLVVLKTAQDPGISPSQSLCAESSRGLSAGSLSESAVGPVEACCLVILAAESKVAAEELCCLLGQVFQVVYTESTIDFLDRAIFDGASTPTHHLSLHSDDSSTKVDIKETYEVEASTFCFPESVDVGGASPHSKTISESELSASATELLQDYMLTLRTKLSSQEIQQFAALLHEYRNGASIHEFCINLRQLYGDSRKFLLLGLRPFIPEKDSQHFENFLETIGVKDGRGIITDSFGRHRRALSTTSSSTTNGNRATGSSDDRSAPSEGDEWDRMISDISSDIEALGCSMDQDSA

SEQ ID NO: 426 - DNA, 1904 bp, Homo sapiens
gcgcggccggggcggagacttcgggcccggctggcgggcggcgccgggagcgcgggggcggcgggcccgggtcgagcatgtagcggctgctggcggcggggctcccggggcgggccgggcgggccgcgggagccgcacgcggcgatatggaagaggagggcaagaagggcaagaagcctggaattgtctcgccatttaaacgagtattcctaaaaggtgaaaagagtagagataagaaagcccatgagaaggtgacagagaggcgccctctgcacactgtggtgttgtcattgcctgagcgcgtcgagccagacagactgctgagcgactatattgagaaggaggtaaagtatttaggtcagttaacgtccataccaggatacctgaatccctccagtaggactgaaatcctgcatttcatagacaatgcaaagagagcccaccagcttccgggacacttgactcaggagcacgatgctgtgctcagcctgtctgcgtacaacgtcaagctggcctggagggacggggaggatatcatcctcagggtgcccatccatgacatcgccgccgtctcctatgttcgggatgacgctgcacacctggtggtcctgaagacagcccaggacccagggatctcccccagccagagtctgtgtgcggaaagttccagaggcctcagtgcaggctccctgtcggagagtgcagttgggcccgtggaggcatgctgcctggtcatcctggctgcagagagcaaggtcgctgcggaggagctttgctgtctgctaggccaggtcttccaggttgtttacacggagtccaccatcgactttctggacagagcgatatttgatggggcctctaccccgacccaccacctgtccctgcacagcgatgactcttctacaaaagtggacattaaggagacctacgaggtggaagccagcactttctgcttccctgaatctgtggatgtgggtggtgcatcaccccacagcaagaccatcagtgagagcgagctgagcgccagcgccactgagctgctgcaggactacatgctgacgctgcgcaccaagctgtcatcacaggagatccagcagtttgcagcactgctgcacgagtaccgcaatggggcctctatccacgagttctgcatcaacctgcggcagctctacggggacagccgcaagttcctgctgcttggtctgaggcccttcatccctgagaaggacagccagcacttcgagaacttcctggagaccattggcgtgaaggatggccgcggcatcatcactgacagctttggcaggcaccggcgggccctgagcaccacatccagttccaccaccaatgggaacagggccacgggcagctctgatgaccggtcggcaccctcagagggggatgagtgggaccgcatgatctcggacatcagcagcgacattgaggcgctgggctgcagcatggaccaggactcagcatgatggacagtggatgggggggcacccacaccttccgcgcagtcgtcataggccttcccagaaggagctgcccagacctgcgtgtcagcccttggtggtggccagggagaggcgcccggtgcagatggccccgggcggcccaggtcctctactgtgaaggagcagggagctgccgagggacacgagcctcagtgcggggtggaaggctctttgccttgtccaccagggctcagccaagccctgcagtgtgtccccgctcggggagggcccggccgagcgggcagggagagccagtcctgtcggctgggcccttggacggctgtcagttttgcacatgatgttcctattgtaactctcagagaccttaaaaagaagtttactgcaatgtgaataatttaatctctggttgccaagcaaaaaaaaaaa

SEQ ID NO: 427 - protein, 444 aa, Homo sapiens
MEEEGKKGKKPGIVSPFKRVFLKGEKSRDKKAHEKVTERRPLHTVVLSLPERVEPDRLLSDYIEKEVKYLGQLTSIPGYLNPSSRTEILHFIDNAKRAHQLPGHLTQEHDAVLSLSAYNVKLAWRDGEDIILRVPIHDIAAVSYVRDDAAHLVVLKTAQDPGISPSQSLCAESSRGLSAGSLSESAVGPVEACCLVILAAESKVAAEELCCLLGQVFQVVYTESTIDFLDRAIFDGASTPTHHLSLHSDDSSTKVDIKETYEVEASTFCFPESVDVGGASPHSKTISESELSASATELLQDYMLTLRTKLSSQEIQQFAALLHEYRNGASIHEFCINLRQLYGDSRKFLLLGLRPFIPEKDSQHFENFLETIGVKDGRGIITDSFGRHRRALSTTSSSTTNGNRATGSSDDRSAPSEGDEWDRMISDISSDIEALGCSMDQDSA

SEQ ID NO: 428 - DNA, 681 bp, Homo sapiens
atgcttgcccctccagggtccatcccaggtgtggcccccgtgctgcagtcgctggtctttgctagcagaaagagtagaggacatggagcagatgaagggacaccagagggtaatgaggggacaccagagagtaatgaagggacatcagagggtggtgacaggacaccagagggcagtgaggggacaccagggagtaatgggacatcagggagtgatgggacatcagaaggtgatgaggggacaccagagggtggtgaggggacaccagagagtagtgaggggacaccagagagtaatgaggggacactagaaggtgaggggacaccagagggcggtgaagggacaccagagagtaatgaggggcacgagagggtggtgaggggacatcagagggtgatgggacaccagagggcgatgaggggacaccggagagtattgaggggacaccagagggcagtgaagggacgccagagagtactgaggggacaccagagggtggtgaggggacaccagagagtaatggggacaccagaaggtgaggggacgccagagggcagtgaagggacaccggagagtattgggacaccagagggcagtgaggggacaccagagggcgatgaggggacaccagagagtaatgaggggacatcagagagtaatgaggggacatcaaggcggtga

SEQ ID NO: 429 - protein, 226 aa, Homo sapiens [sequence omitted]

SEQ ID NO: 430 - DNA, 5351 bp, Homo sapiens
atgataggacagatcaccgagttgcctagagacctggagaccgacccatccgggtcgccttccctggtgcgctctcgtcggctccatccctggttgccatggagacaggaggcggttgccacggagaccgacgactgccaggaccagccaatcactccagagctgcagctccagctcaccttttgcatggagtgcctggcgagcccgcgcacgctcactcgctgggacaggcgggcggggcggcctgacgtcacccactgcccccaccgcccggccgaggggcggtggccgcgcaggctcggcggggcggcggcacggactgacggagggtcggaaggactgagggacgggcgggcgcacggccaggccatgcctggggaggctgcccgcgccgagctgctgctgcccgaggcggaccgacccgggccccgcacagaactgcggggaaggtggggcgcacgaagtgcccgccgcgagccagaaagaacgtgggggcttaagcccttggcttccgacccagggatcgtggggctcgcatcccgcccgctgcatcccgttgtttgcaccgagctgccagcctgctggggctgggccgctctggacagaggcagcgggttctggaggcggggtgtccggctgatacccccagtacgatcagatctgtcctgcgatgcggccgctgccaccaccatcctgggaggggaccggcgggagccctgtgctctgaccccagggcccagccacctggccctcacgttcctgcccagcaagccgggtgcccggccccagcccgagggagccagctgggatgcagggcctggtggggcaccctcggcctgggcggacccaggggagggcggcccaagccccatgctcctccctgagggcctgtcttcccaggctctgtccacggaggctcctctcccggccaccctggagccccggattgtgatgggagaggagacgtgccaggccctcctgtcacccagagctgcccggacagcgctcagggaccaggagggtgggcacgcaagcccagacccaccccccgagctgtgttctcagggtgatctttctgtgccttcccctcccccagaccctgattccttcttcacgcctccctccacccccaccaagaccacctatgccctgcttcctgcctgtgggccccacggggacgccagggactcagaggctgagctgcgggatgagctgctggactcgccccccgcctcaccctcgggctcctacattacggccgatggggacagctgggcctcttcaccctcctgttccctcagcctgctggctccggctgaagggctggacttcccctcaggctggggcctgtccccgcaggggtccatggtggatgaacgagagctgcacccagcagggaccccagagcccccgtcctctgagtccagcctctctgcagacagcagctcctcctggggccaggagggccacttcttcgacctggacttcctggccaatgacccaatgatccccgcagccctcctacccttccagggcagcctcatctttcaggtggaggcagtggaggtgacaccgctatccccagaggaagaagaagaggaggctgtggcggatcccgacccaggtggggacctggctggggagggtgaggaggacagcacgtctgcctccttcctgcagtcactgtctgacctgtccatcacggagggcatggacgaggcttttgccttccgggacgacacctctgcagcctcctctgattcagactcagcctcctacgcagaggcagatgatgagaggctgtacagcggggagccccatgcccaggccactttgctccaggacagtgtccagaagacagaggaggagagcggaggtggggccaaggggctgcaggctcaggatgggactgtgtcctgggccgtggaggctgctcctcagacctcagacagaggggcctatctgtcccagagacaggaattgatctcagaagtaacagaagagggccttgctttaggccaggagtccactgccactgtgacccctcacactctgcaggtagccccaggcctccaggtggaggtggctaccagagtgaccccacaggctggggaggaagaaacagactccaccgctggacaagaatctgctgccatggcaatgcctcagccctcccaggagggcatcagcgagatcttaggccaagagtctgtcactgcagaaaaacttccaactccacaggaagaaacaagcctcacattgtgtccagactctcctcagaacttgaaggaagaaggagggctggacctcccctctggcagaaagcctgtagctgcagccacgattgtccccaggcaggctaaagaggacctcaccttaccccaggactccgctatgacaccgcctctgcccctacaagacacagatctctcatcagccccaaagcctgtggctgcagccacgattgtgtcccagcaggctgaagagggcctcaccttaccccaggactccgttatgacaccgcctctgcccctacaagacacagaactctcgtcagccccaaagcctgtggctgcagccacgcttgtgtcccagcaggctgaagagggcctcaccttaccccaggactccgctatgacaccgcctctgcccctacaagacacagatctctcgtcagccccaaagcctgtggctgcagccacgcttgtgtcccagcaggctgaagagggcctcaccttaccccaggactccgctatgacaccgcctctgcccctacaagacacagatctctcgtcagccccaaagcctgtggctgcagccacgcttgtgtcccagcaggctgaagagggcctcaccttaccccaggactccgctatgacaccgcctctgcccctacaagacacagatctctcgtcagccccaaagcctgtggctgcagccacgattgtgtcccagcaggctgaagagggcctcaccttaccccaggactccgctatgacaccgcctctgcccctacaagacacagatctctcgtcagccccaaagcctgtggctgcagccacgattgtgtcccagcaggctgaagagggcctcaccttaccccaggactccgctatgacaccgcctctgcccctacaagacacagatctctcgtcagccccaaagcctgtggctgcagccacgcctgtgtcccagcaggctgaagagggcctcaccttaccccaggactccgctatgacaccgcctctgcccctacaagacacagatctctcgtcagccccaaagcctgtggctgcagccacgcctgtgtcccagcaggctgaagagggcctcaccttaccccaggactccgctatgacagcacctctgcctctgcaagacacaggccccacctcaggtccagagcctctggctgtggccacccctcaaaccttgcaggcagaagcaggctgtgccccagggacagagcctgtggccaccatggctcagcaggaagtaggtgaggccttaggccccaggccagcacctgaggagaagaatgcagccctccctacagtcccggagcctgcagccttggaccaggtccaacaggatgacccacagccagctgcagaagctgggacaccttgggccgcacaggaagatgcggattccactttgggcatggaggccctcagtctccctgagccggcctctggtgctggggaggaaatagcagaagccctttctaggcctggacgggaagcatgtctggaagcgcgagcgcacacaggtgatggggctaagcctgactcaccccaaaaggagaccctggaggttgagaaccagcaggaaggaggcctgaagccactggcacaggaacatggacccaggtcagcacttggaggtgcaagggaggtccccgatgcgcctcctgctgcctgccctgaggtcagccaggcccggctcctgagcccagccagggaggaaagaggcctgagtggcaagtccaccccggagcccacgcttccctcagctgtggccacagaggccagtctggactcctgcccagagtcttcagtaggggctgtgtccagtctggacagaggctgccctgacgcgcctgcccccacgtctgcaccaacctcccagcagccggagcctgtactgggtctgggcagtgttgagcaaccccacgaagtacccagtgtccttggcacccccttgctgcagcccccagaaaaccttgccaagggtcagcccagcacgcccgtggacaggcccctgggccctgacccttctgctcctggtacccttgctggggcagccctacccccactggagcccccagccccctgcctgtgccaggacccccaggaagactctgtggaagacgaggagcccccaggctctctgggcctcccaccgccccaggcaggagtccagcctgccgctgctgctgtctcaggaaccacacagcctctggggactgggccgcgagtcagcctctcgcctcactccccactcctcagccccaaggtggcctccatggatgccaaagacctggccttgcagatcttgccgccttgccaagtgcctcctccctctgggccccagagcccagctggccctcaagggctctcagcccccgagcagcaagaggatgaggacagcctggaggaagactcgcctcgggccctgggctcgggccagcattcggatagccacggggagtcatcagccgagctggacgagcaggacatcttggctcctcagaccgtgcagtgtccagcccaggccccagcaggcggcagtgaggagaccatcgccaaagccaagcagagtcgcagtgagaagaaggcccgaaaggcaatgtcaaagctgggcttgcggcagattcagggagtcaccaggatcaccatccagaagtccaagaacatcctctttgtcatcgccaagcctgatgtcttcaagagcccagcctcagacacttatgtggtctttggcgaggccaagattgaggacctgtcccagcaagtgcacaaagccgcagctgagaagtttaaggtgccctcagagccctcagccttggtccctgagtcagcacccaggccccgggtgaggctggagtgcaaggaagaggaagaggaggaggaggaagaggtggacgaggcggggctggaactgcgtgacattgagctggtgatggcgcaggccaatgtgtccagggccaaggccgtgcgggctctgagagacaaccacagtgacatcgtcaacgccatcatggaactgaccatgtagccactgaccggaagctggagccatcctacgccttccctcagctctgctactcaataaatcggtgtcccttc

SEQ ID NO: 431 - protein, 1759 aa, Homo sapiens
MIGQITELPRDLETDPSGSPSLVRSRRLHPWLPWRQEAVATETDDCQDQPITPELQLQLTFCMECLASPRTLTRWDRRAGRPDVTHCPHRPAEGRWPRRLGGAAARTDGGSEGLRDGRAHGQAMPGEAARAELLLPEADRPGPRTELRGRWGARSARREPERTWGLKPLASDPGIVGLASRPLHPVVCTELPACWGWAALDRGSGFWRRGVRLIPPVRSDLSCDAAAATTILGGDRREPCALTPGPSHLALTFLPSKPGARPQPEGASWDAGPGGAPSAWADPGEGGPSPMLLPEGLSSQALSTEAPLPATLEPRIVMGEETCQALLSPRAARTALRDQEGGHASPDPPPELCSQGDLSVPSPPPDPDSFFTPPSTPTKTTYALLPACGPHGDARDSEAELRDELLDSPPASPSGSYITADGDSWASSPSCSLSLLAPAEGLDFPSGWGLSPQGSMVDERELHPAGTPEPPSSESSLSADSSSSWGQEGHFFDLDFLANDPMIPAALLPFQGSLIFQVEAVEVTPLSPEEEEEEAVADPDPGGDLAGEGEEDSTSASFLQSLSDLSITEGMDEAFAFRDDTSAASSDSDSASYAEADDERLYSGEPHAQATLLQDSVQKTEEESGGGAKGLQAQDGTVSWAVEAAPQTSDRGAYLSQRQELISEVTEEGLALGQESTATVTPHTLQVAPGLQVEVATRVTPQAGEEETDSTAGQESAAMAMPQPSQEGISEILGQESVTAEKLPTPQEETSLTLCPDSPQNLKEEGGLDLPSGRKPVAAATIVPRQAKEDLTLPQDSAMTPPLPLQDTDLSSAPKPVAAATIVSQQAEEGLTLPQDSVMTPPLPLQDTELSSAPKPVAAATLVSQQAEEGLTLPQDSAMTPPLPLQDTDLSSAPKPVAAATLVSQQAEEGLTLPQDSAMTPPLPLQDTDLSSAPKPVAAATLVSQQAEEGLTLPQDSAMTPPLPLQDTDLSSAPKPVAAATIVSQQAEEGLTLPQDSAMTPPLPLQDTDLSSAPKPVAAATIVSQQAEEGLTLPQDSAMTPPLPLQDTDLSSAPKPVAAATPVSQQAEEGLTLPQDSAMTPPLPLQDTDLSSAPKPVAAATPVSQQAEEGLTLPQDSAMTAPLPLQDTGPTSGPEPLAVATPQTLQAEAGCAPGTEPVATMAQQEVGEALGPRPAPEEKNAALPTVPEPAALDQVQQDDPQPAAEAGTPWAAQEDADSTLGMEALSLPEPASGAGEEIAEALSRPGREACLEARAHTGDGAKPDSPQKETLEVENQQEGGLKPLAQEHGPRSALGGAREVPDAPPAACPEVSQARLLSPAREERGLSGKSTPEPTLPSAVATEASLDSCPESSVGAVSSLDRGCPDAPAPTSAPTSQQPEPVLGLGSVEQPHEVPSVLGTPLLQPPENLAKGQPSTPVDRPLGPDPSAPGTLAGAALPPLEPPAPCLCQDPQEDSVEDEEPPGSLGLPPPQAGVQPAAAAVSGTTQPLGTGPRVSLSPHSPLLSPKVASMDAKDLALQILPPCQVPPPSGPQSPAGPQGLSAPEQQEDEDSLEEDSPRALGSGQHSDSHGESSAELDEQDILAPQTVQCPAQAPAGGSEETIAKAKQSRSEKKARKAMSKLGLRQIQGVTRITIQKSKNILFVIAKPDVFKSPASDTYVVFGEAKIEDLSQQVHKAAAEKFKVPSEPSALVPESAPRPRVRLECKEEEEEEEEEVDEAGLELRDIELVMAQANVSRAKAVRALRDNHSDIVNAIMELTM

SEQ ID NO: 432 - DNA, 2299 bp, Homo sapiens
gggaagcgcgccgcgcacctcatggttccggggacagttagggcggcggatggaggtcagcggtggtgctcgctgcggtttggaatcacttgctaggagtcttgtctctctgccacccaggacatcatggcagctcacctggtaaagcgatgcacgtgcctcctgagagaagctgctcgtcaggcccctgccatggctccagttggccgactgagacttgcctgggtagcccataagactctgacttcctcagccacctcacccatttcccacctcccaggttccttgatggagccggtggagaaggaacgagcatctactccctacatagagaagcaggtggaccacctcatcaagaaggccacaaggccagaggagctcctggagctacttggtggcagtcacgacttggacagcaatcaagcagcaatggtacttatccggctctctcacttgctgtctgagaagccagaagataaaggcttgctcatacaggatgcccactttcatcaacttctctgtctgctcaacagtcagattgcctcggtctggcatggtaccctctcgaagctgctgggaagcctgtatgctctgggcatccccaaggcctccaaggagctgcagtcggtggagcaggaggtccgctggcgcatgcggaagctcaagtacaagcacctggccttcctggcagagtcctgtgccaccctctcacaggagcagcactcgcaggagctgctggctgagctgctcacacacctggaaaggcgttggacagaaattgaagattcccacacattagtgaccgtcatgatgaaggtgggacacctctcggagccactaatgaaccgcctggaagacaagtgcctggagttggtggagcactttggccccaatgagctgcggaaggtgctggtgatgctggcagctcagagccggcggtccgtgcccttgctgcgggccatctcctaccacctggtgcagaagcccttctctctgacgaaagatgtgctcttggacgtggcctatgcctatggcaaactcagctttcaccagacccaggtgtcccagcgcctggccaccgacctgctatccctcatgcccagcctgacttctggtgaggtggcccactgtgccaagtccttcgccttactcaagtggctcagcctgcccctgtttgaggcctttgcccagcacgtcctgaacagagcgcaggacatcaccctgccccacctgtgcagcgtacttctggcttttgcgcgtctgaacttccatccagaccaagaggatcagttcttcagcctggtacatgagaagctggggtcagagctgccaggcctggagccagccctgcaggtggacctggtgtgggccctgtgtgtgctgcagcaggcacgggaagcagagctgcaagccgtcctccaccctgaatttcacatccaatttctagggggcaagtctcagaaggatcagaacaccttccagaagctgctccacatcaacgccactgccctgctggagtaccccgagtactcgggtccccttctgcctgcctcggctgtggcccctgggccctcagcccttgacaggaaggtgacccccctgcaaaaggagctgcaggagacgctgaaggggctgctggggagcgccgacaagggcagcctcgaggtggccacgcagtatggctgggtgctggatgctgaggtgctgctggacagtgacggcgagtttctgcccgtaagggactttgtggcacctcaccttgcccagccaactgggagccagtcaccacctccagggtctaagaggctagcgttcttgcggtgggagttccccaacttcaacagccgaagcaaggacttgctgggtcgctttgttctggcccggcgacacatagtggctgcaggcttcctgatagtggacgtcccattctatgagtggctggaactcaagtctgaatggcagaaaggcgcctacctcaaggacaagatgcgcaaagcggtggctgaggagctggccaagtgacttgtgccagcagcatggactgcgtgcctctccgccggaggtctagctgtgggcggccaagaagggtcacccttgaggacaaacctctgtgcaggaccttggccagagtggggagggtggccagccactctgagggacagaacgtcctcttgtgtataataaacctttaattttggtgttggacccctggggccttcccaggcttggtcaccctctgcactgtcaaaaaaaaaaaaaaaaaaaaaaaaaaaaaaaaaaaaaaaaaaaaaaaaaaaaa

SEQ ID NO: 433 - protein, 631 aa, Homo sapiens
MAAHLVKRCTCLLREAARQAPAMAPVGRLRLAWVAHKTLTSSATSPISHLPGSLMEPVEKERASTPYIEKQVDHLIKKATRPEELLELLGGSHDLDSNQAAMVLIRLSHLLSEKPEDKGLLIQDAHFHQLLCLLNSQIASVWHGTLSKLLGSLYALGIPKASKELQSVEQEVRWRMRKLKYKHLAFLAESCATLSQEQHSQELLAELLTHLERRWTEIEDSHTLVTVMMKVGHLSEPLMNRLEDKCLELVEHFGPNELRKVLVMLAAQSRRSVPLLRAISYHLVQKPFSLTKDVLLDVAYAYGKLSFHQTQVSQRLATDLLSLMPSLTSGEVAHCAKSFALLKWLSLPLFEAFAQHVLNRAQDITLPHLCSVLLAFARLNFHPDQEDQFFSLVHEKLGSELPGLEPALQVDLVWALCVLQQAREAELQAVLHPEFHIQFLGGKSQKDQNTFQKLLHINATALLEYPEYSGPLLPASAVAPGPSALDRKVTPLQKELQETLKGLLGSADKGSLEVATQYGWVLDAEVLLDSDGEFLPVRDFVAPHLAQPTGSQSPPPGSKRLAFLRWEFPNFNSRSKDLLGRFVLARRHIVAAGFLIVDVPFYEWLELKSEWQKGAYLKDKMRKAVAEELAK

SEQ ID NO: 434 - DNA, 1956 bp, Homo sapiens
gggaagcgcgccgcgcacctcatggttccggggacagttagggcggcggatggaggtcagcggtggtgctcgctgcggtttggaatcacttgctaggagtcttgtctctctgccacccaggacatcatggcagctcacctggtaaagcgatgcacgtgcctcctgagagaagctgctcgtcaggcccctgccatggctccagttggccgactgagacttgcctgggtagcccataagactctgacttcctcagccacctcacccatttcccacctcccaggttccttgatggagccggtggagaaggaacgagcatctactccctacatagagaagcaggtggaccacctcatcaagaaggccacaaggccagaggagctcctggagctacttggtggcagtcacgacttggacagcaatcaagcagcaatggtacttatccggctctctcacttgctgtctgagaagccagaagataaaggcttgctcatacaggatgcccactttcatcaacttctctgtctgctcaacagtcagattgcctcggtctggcatggtaccctctcgaagctgctgggaagcctgtatgctctgggcatccccaaggcctccaaggagctgcagtcggtggagcaggaggtccgctggcgcatgcggaagctcaagtacaagcacctggccttcctggcagagtcctgtgccaccctctcacaggagcagcactcgcaggagctgctggctgagctgctcacacacctggaaaggcgttggacagaaattgaagattcccacacattagtgaccgtcatgatgaaggtgggacacctctcggagccactaatgaaccgcctggaagacaagcacgtcctgaacagagcgcaggacatcaccctgccccacctgtgcagcgtacttctggcttttgcgcgtctgaacttccatccagaccaagaggatcagttcttcagcctggtacatgagaagctggggtcagagctgccaggcctggagccagccctgcaggtggacctggtgtgggccctgtgtgtgctgcagcaggcacgggaagcagagctgcaagccgtcctccaccctgaatttcacatccaatttctagggggcaagtctcagaaggatcagaacaccttccagaagctgctccacatcaacgccactgccctgctggagtaccccgagtactcgggtccccttctgcctgcctcggctgtggcccctgggccctcagcccttgacaggaaggtgacccccctgcaaaaggagctgcaggagacgctgaaggggctgctggggagcgccgacaagggcagcctcgaggtggccacgcagtatggctgggtgctggatgctgaggtgctgctggacagtgacggcgagtttctgcccgtaagggactttgtggcacctcaccttgcccagccaactgggagccagtcaccacctccagggtctaagaggctagcgttcttgcggtgggagttccccaacttcaacagccgaagcaaggacttgctgggtcgctttgttctggcccggcgacacatagtggctgcaggcttcctgatagtggacgtcccattctatgagtggctggaactcaagtctgaatggcagaaaggcgcctacctcaaggacaagatgcgcaaagcggtggctgaggagctggccaagtgacttgtgccagcagcatggactgcgtgcctctccgccggaggtctagctgtgggcggccaagaagggtcacccttgaggacaaacctctgtgcaggaccttggccagagtggggagggtggccagccactctgagggacagaacgtcctcttgtgtataataaacctttaattttggtgttggacccctggggccttcccaggcttggtcaccctctgcactgtcaaaaaaaaaaaaaaaaaaaaaaaaaaaaaaaaaaaaaaaa

SEQ ID NO: 435 - protein, 521 aa, Homo sapiens
MAAHLVKRCTCLLREAARQAPAMAPVGRLRLAWVAHKTLTSSATSPISHLPGSLMEPVEKERASTPYIEKQVDHLIKKATRPEELLELLGGSHDLDSNQAAMVLIRLSHLLSEKPEDKGLLIQDAHFHQLLCLLNSQIASVWHGTLSKLLGSLYALGIPKASKELQSVEQEVRWRMRKLKYKHLAFLAESCATLSQEQHSQELLAELLTHLERRWTEIEDSHTLVTVMMKVGHLSEPLMNRLEDKHVLNRAQDITLPHLCSVLLAFARLNFHPDQEDQFFSLVHEKLGSELPGLEPALQVDLVWALCVLQQAREAELQAVLHPEFHIQFLGGKSQKDQNTFQKLLHINATALLEYPEYSGPLLPASAVAPGPSALDRKVTPLQKELQETLKGLLGSADKGSLEVATQYGWVLDAEVLLDSDGEFLPVRDFVAPHLAQPTGSQSPPPGSKRLAFLRWEFPNFNSRSKDLLGRFVLARRHIVAAGFLIVDVPFYEWLELKSEWQKGAYLKDKMRKAVAEELAK

SEQ ID NO: 436 - DNA, 1935 bp, Homo sapiens
gggaagcgcgccgcgcacctcatggttccggggacagttagggcggcggatggagggtttggaatcacttgctaggagtcttgtctctctgccacccaggacatcatggcagctcacctggtaaagcgatgcacgtgcctcctgagagaagctgctcgtcaggcccctgccatggctccagttggccgactgagacttgcctgggtagcccataagactctgacttcctcagccacctcacccatttcccacctcccaggttccttgatggagccggtggagaaggaacgagcatctactccctacatagagaagcaggtggaccacctcatcaagaaggccacaaggccagaggagctcctggagctacttggtggcagtcacgacttggacagcaatcaagcagcaatggtacttatccggctctctcacttgctgtctgagaagccagaagataaaggcttgctcatacaggatgcccactttcatcaacttctctgtctgctcaacagtcagattgcctcggtctggcatggtaccctctcgaagctgctgggaagcctgtatgctctgggcatccccaaggcctccaaggagctgcagtcggtggagcaggaggtccgctggcgcatgcggaagctcaagtacaagcacctggccttcctggcagagtcctgtgccaccctctcacaggagcagcactcgcaggagctgctggctgagctgctcacacacctggaaaggcgttggacagaaattgaagattcccacacattagtgaccgtcatgatgaaggtgggacacctctcggagccactaatgaaccgcctggaagacaagcacgtcctgaacagagcgcaggacatcaccctgccccacctgtgcagcgtacttctggcttttgcgcgtctgaacttccatccagaccaagaggatcagttcttcagcctggtacatgagaagctggggtcagagctgccaggcctggagccagccctgcaggtggacctggtgtgggccctgtgtgtgctgcagcaggcacgggaagcagagctgcaagccgtcctccaccctgaatttcacatccaatttctagggggcaagtctcagaaggatcagaacaccttccagaagctgctccacatcaacgccactgccctgctggagtaccccgagtactcgggtccccttctgcctgcctcggctgtggcccctgggccctcagcccttgacaggaaggtgacccccctgcaaaaggagctgcaggagacgctgaaggggctgctggggagcgccgacaagggcagcctcgaggtggccacgcagtatggctgggtgctggatgctgaggtgctgctggacagtgacggcgagtttctgcccgtaagggactttgtggcacctcaccttgcccagccaactgggagccagtcaccacctccagggtctaagaggctagcgttcttgcggtgggagttccccaacttcaacagccgaagcaaggacttgctgggtcgctttgttctggcccggcgacacatagtggctgcaggcttcctgatagtggacgtcccattctatgagtggctggaactcaagtctgaatggcagaaaggcgcctacctcaaggacaagatgcgcaaagcggtggctgaggagctggccaagtgacttgtgccagcagcatggactgcgtgcctctccgccggaggtctagctgtgggcggccaagaagggtcacccttgaggacaaacctctgtgcaggaccttggccagagtggggagggtggccagccactctgagggacagaacgtcctcttgtgtataataaacctttaattttggtgttggacccctggggccttcccaggcttggtcaccctctgcactgtcaaaaaaaaaaaaaaaaaaaaaaaaaaaaaaaaaaaaaaaa

SEQ ID NO: 437 - protein, 521 aa, Homo sapiens; identical to SEQ ID NO: 435

SEQ ID NO: 438 - DNA, 134 bp, Homo sapiens
tgcagccgtgtcaaattcagtacctgtcctatgcatggtaggcactggcccagaaggctgccacagaaacactgtgactcatgggccctgttcctgtgtcccaggctcagggataaatttggttacagacatca

SEQ ID NO: 439 - DNA, 137 bp, Homo sapiens
tgcagtcaagtcaaattcagtgcccgtttctgtcatagcgggggctggcccagatggctgccacagcaagctccacagctcatgggccctgggtcacctaccctgggacctggggataagtttggctgtggacagtg

SEQ ID NO: 440 - DNA, 132 bp, Homo sapiens
ggcagccatgtcaaattcagtgcctgccctgtctatggtaggcactggcccagaagactgccacagaaacagtgactcacaggccctgttactgtgtcccaggctcagggataaatttggttacagacacca

SEQ ID NO: 441 - DNA, 3480 bp, Homo sapiens
ctccctctttccctcacagccgacgaggcaacaattaggctttggggataaaacgaggtgcggagagcgggctggggcatttctccccgagatggcgggtctgacggcggcggccccgcggcccggagtcctcctgctcctgctgtccatcctccacccctctcggcctggaggggtccctggggccattcctggtggagttcctggaggagtcttttatccaggggctggtctcggagcccttggaggaggagcgctggggcctggaggcaaacctcttaagccagttcccggagggcttgcgggtgctggccttggggcagggctcggcgccttccccgcagttacctttccgggggctctggtgcctggtggagtggctgacgctgctgcagcctataaagctgctaaggctggcgctgggcttggtggtgtcccaggagttggtggcttaggagtgtctgcaggtgcggtggttcctcagcctggagccggagtgaagcctgggaaagtgccgggtgtggggctgccaggtgtatacccaggtggcgtgctcccaggagctcggttccccggtgtgggggtgctccctggagttcccactggagcaggagttaagcccaaggctccaggtgtaggtggagcttttgctggaatcccaggagttggaccctttgggggaccgcaacctggagtcccactggggtatcccatcaaggcccccaagctgcctggtggctatggactgccctacaccacagggaaactgccctatggctatgggcccggaggagtggctggtgcagcgggcaaggctggttacccaacagggacaggggttggcccccaggcagcagcagcagcggcagctaaagcagcagcaaagttcggtgctggagcagccggagtcctccctggtgttggaggggctggtgttcctggcgtgcctggggcaattcctggaattggaggcatcgcaggcgttgggactccagctgcagctgcagctgcagcagcagccgctaaggcagccaagtatggagctgctgcaggcttagtgcctggtgggccaggctttggcccgggagtagttggtgtcccaggagctggcgttccaggtgttggtgtcccaggagctgggattccagttgtcccaggtgctgggatcccaggtgctgcggttccaggggttgtgtcaccagaagcagctgctaaggcagctgcaaaggcagccaaatacggggccaggcccggagtcggagttggaggcattcctacttacggggttggagctgggggctttcccggctttggtgtcggagtcggaggtatccctggagtcgcaggtgtccctggtgtcggaggtgttcccggagtcggaggtgtcccgggagttggcatttcccccgaagctcaggcagcagctgccgccaaggctgccaagtacggagtggggaccccagcagctgcagctgctaaagcagccgccaaagccgcccagtttgggttagttcctggtgtcggcgtggctcctggagttggcgtggctcctggtgtcggtgtggctcctggagttggcttggctcctggagttggcgtggctcctggagttggtgtggctcctggcgttggcgtggctcccggcattggccctggtggagttgcagctgcagcaaaatccgctgccaaggtggctgccaaagcccagctccgagctgcagctgggcttggtgctggcatccctggacttggagttggtgtcggcgtccctggacttggagttggtgctggtgttcctggacttggagttggtgctggtgttcctggcttcggggcagtacctggagccctggctgccgctaaagcagccaaatatggagcagcagtgcctggggtccttggagggctcggggctctcggtggagtaggcatcccaggcggtgtggtgggagccggacccgccgccgccgctgccgcagccaaagctgctgccaaagccgcccagtttggcctagtgggagccgctgggctcggaggactcggagtcggagggcttggagttccaggtgttgggggccttggaggtatacctccagctgcagccgctaaagcagctaaatacggtgctgctggccttggaggtgtcctagggggtgccgggcagttcccacttggaggagtggcagcaagacctggcttcggattgtctcccattttcccaggtggggcctgcctggggaaagcttgtggccggaagagaaaatgagcttcctaggacccctgactcacgacctcatcaacgttggtgctactgcttggtggagaatgtaaaccctttgtaaccccatcccatgcccctccgactccccaccccaggagggaacgggcaggccgggcggccttgcagatccacagggcaaggaaacaagaggggagcggccaagtgccccgaccaggaggccccctacttcagaggcaagggccatgtggtcctggccccccaccccatcccttcccacctaggagctccccctccacacagcctccatctccaggggaacttggtgctacacgctggtgctcttatcttcctggggggagggaggagggaagggtggcccctcggggaaccccctacctggggctcctctaaagatggtgcagacacttcctgggcagtcccagctccccctgcccaccaggacccaccgttggctgccatccagttggtacccaagcacctgaagcctcaaagctggattcgctctagcatccctcctctcctgggtccacttggccgtctcctccccaccgatcgctgttccccacatctggggcgcttttgggttggaaaaccaccccacactgggaatagccaccttgcccttgtagaatccatccgcccatccgtccattcatccatcggtccgtccatccatgtccccagttgaccgcccggcaccactagctggctgggtgcacccaccatcaacctggttgacctgtcatggccgcctgtgccctgcctccacccccatcctacactcccccagggcgtgcggggctgtgcagactggggtgccaggcatctcctccccacccggggtgtccccacatgcagtactgtataccccccatccctccctcggtccactgaacttcagagcagttcccattcctgccccgcccatctttttgtgtctcgctgtgatagatcaataaatattttattttttgtcctggatatttggggattatttttgattgttgatattctcttttggttttattgttgtggttcattgaaaaaaaaagataatttttttttctgatccggggagctgtatccccagtagaaaaaacattttaatcactctaatataactctggatgaaacacacctttttttttaataagaaaagagaattaactgcttcagaaatgactaataaatgaaaaacctttaaaggaaaaaaaaaa

SEQ ID NO: 442 - protein, 724 aa, Homo sapiens
MAGLTAAAPRPGVLLLLLSILHPSRPGGVPGAIPGGVPGGVFYPGAGLGALGGGALGPGGKPLKPVPGGLAGAGLGAGLGAFPAVTFPGALVPGGVADAAAAYKAAKAGAGLGGVPGVGGLGVSAGAVVPQPGAGVKPGKVPGVGLPGVYPGGVLPGARFPGVGVLPGVPTGAGVKPKAPGVGGAFAGIPGVGPFGGPQPGVPLGYPIKAPKLPGGYGLPYTTGKLPYGYGPGGVAGAAGKAGYPTGTGVGPQAAAAAAAKAAAKFGAGAAGVLPGVGGAGVPGVPGAIPGIGGIAGVGTPAAAAAAAAAAKAAKYGAAAGLVPGGPGFGPGVVGVPGAGVPGVGVPGAGIPVVPGAGIPGAAVPGVVSPEAAAKAAAKAAKYGARPGVGVGGIPTYGVGAGGFPGFGVGVGGIPGVAGVPGVGGVPGVGGVPGVGISPEAQAAAAAKAAKYGVGTPAAAAAKAAAKAAQFGLVPGVGVAPGVGVAPGVGVAPGVGLAPGVGVAPGVGVAPGVGVAPGIGPGGVAAAAKSAAKVAAKAQLRAAAGLGAGIPGLGVGVGVPGLGVGAGVPGLGVGAGVPGFGAVPGALAAAKAAKYGAAVPGVLGGLGALGGVGIPGGVVGAGPAAAAAAAKAAAKAAQFGLVGAAGLGGLGVGGLGVPGVGGLGGIPPAAAAKAAKYGAAGLGGVLGGAGQFPLGGVAARPGFGLSPIFPGGACLGKACGRKRK

SEQ ID NO: 443 - DNA, 3332 bp, Homo sapiens
gcgccgagccggtttccccgccggtgtccgagaggcgcccccggcccggcccggcccggcccgcgccctccgcccccgcctccccgggccggcggcggtgggcgagctcgcgggcccggccgcccccagccccagccccgccgggccccgccccccgtcgagtgcatgaggttgacgctactttgttgcacctggagggaagaacgtatgggagaggaaggaagcgagttgcccgtgtgtgcaagctgcggccagaggatctatgatggccagtacctccaggccctgaacgcggactggcacgcagactgcttcaggtgttgtgactgcagtgcctccctgtcgcaccagtactatgagaaggatgggcagctcttctgcaagaaggactactgggcccgctatggcgagtcctgccatgggtgctctgagcaaatcaccaagggactggttatggtggctggggagctgaagtaccaccccgagtgtttcatctgcctcacgtgtgggacctttatcggtgacggggacacctacacgctggtggagcactccaagctgtactgcgggcactgctactaccagactgtggtgacccccgtcatcgagcagatcctgcctgactcccctggctcccacctgccccacaccgtcaccctggtgtccatcccagcctcatctcatggcaagcgtggactttcagtctccattgaccccccgcacggcccaccgggctgtggcaccgagcactcacacaccgtccgcgtccagggagtggatccgggctgcatgagcccagatgtgaagaattccatccacgtcggagaccggatcttggaaatcaatggcacgcccatccgaaatgtgcccctggacgagattgacctgctgattcaggaaaccagccgcctgctccagctgaccctcgagcatgaccctcacgatacactgggccacgggctggggcctgagaccagccccctgagctctccggcttatactcccagcggggaggcgggcagctctgcccggcagaaacctgtcttgaggagctgcagcatcgacaggtctccgggcgctggctcactgggctccccggcctcccagcgcaaggacctgggtcgctctgagtccctccgcgtagtctgccggccacaccgcatcttccggccgtcggacctcatccacggggaggtgctgggcaagggctgcttcggccaggctatcaaggtgacacaccgtgagacaggtgaggtgatggtgatgaaggagctgatccggttcgacgaggagacccagaggacgttcctcaaggaggtgaaggtcatgcgatgcctggaacaccccaacgtgctcaagttcatcggggtgctctacaaggacaagaggctcaacttcatcactgagtacatcaagggcggcacgctccggggcatcatcaagagcatggacagccagtacccatggagccagagagtgagctttgccaaggacatcgcatcagggatggcctacctccactccatgaacatcatccaccgagacctcaactcccacaactgcctggtccgcgagaacaagaatgtggtggtggctgacttcgggctggcgcgtctcatggtggacgagaagactcagcctgagggcctgcggagcctcaagaagccagaccgcaagaagcgctacaccgtggtgggcaacccctactggatggcacctgagatgatcaacggccgcagctatgatgagaaggtggatgtgttctcctttgggatcgtcctgtgcgagatcatcgggcgggtgaacgcagaccctgactacctgccccgcaccatggactttggcctcaacgtgcgaggattcctggaccgctactgccccccaaactgccccccgagcttcttccccatcaccgtgcgctgttgcgatctggaccccgagaagaggccatcctttgtgaagctggaacactggctggagaccctccgcatgcacctggccggccacctgccactgggcccacagctggagcagctggacagaggtttctgggagacctaccggcgcggcgagagcggactgcctgcccaccctgaggtccccgactgagccagggccactcagctgcccctgtccccacctctggagaatccacccccaccagattcctccgcgggaggtggccctcagctgggacagtggggacccaggcttctcctcagagccaggccctgacttgccttctcccaccccgtggaccgcttcccctgccttctctctgccgtggcccagagccggcccagctgcacacacacaccatgctctcgccctgctgtaacctctgtcttggcagggctgtcccctcttgcttctccttgcatgagctggagggcctgtgtgagttacgcccctttccacacgccgctgccccagcaaccctgttcacgctccacctgtctggtccatagctccctggaggctgggccaggaggcagcctccgaaccatgccccatataacgcttgggtgcgtgggagggcgcacatcagggcagaggccaagttccaggtgtctgtgttcccaggaaccaaatggggagtctggggcccgttttccccccagggggtgtctaggtagcaacaggtatcgaggactctccaaacccccaaagcagagagagggctgatcccatggggcggaggtccccagtggctgagcaaacagccccttctctcgctttgggtcttttttttgtttctttcttaaagccactttagtgagaagcaggtaccaagcctcagggtgaagggggtcccttgagggagcgtggagctgcggtgccctggccggcgatggggaggagccggctccggcagtgagaggataggcacagtggaccgggcaggtgtccaccagcagctcagcccctgcagtcatctcagagccccttcccgggcctctcccccaaggctccctgcccctcctcatgcccctctgtcctctgcgttttttctgtgtaatctattttttaagaagagtttgtattattttttcatacggctgcagcagcagctgccaggggcttgggattttatttttgtggcgggcgggggtgggagggccattttgtcactttgcctcagttgagcatctaggaagtattaaaactgtgaagctttctcagtgcactttgaacctggaaaacaatcccaacaggcccgtgggaccatgacttagggaggtgggacccacccacccccatccaggaaccgtgacgtccaaggaaccaaacccagacgcagaacaataaaataaattccgtactccccaccc

SEQ ID NO: 444 - protein, 647 aa, Homo sapiens
MRLTLLCCTWREERMGEEGSELPVCASCGQRIYDGQYLQALNADWHADCFRCCDCSASLSHQYYEKDGQLFCKKDYWARYGESCHGCSEQITKGLVMVAGELKYHPECFICLTCGTFIGDGDTYTLVEHSKLYCGHCYYQTVVTPVIEQILPDSPGSHLPHTVTLVSIPASSHGKRGLSVSIDPPHGPPGCGTEHSHTVRVQGVDPGCMSPDVKNSIHVGDRILEINGTPIRNVPLDEIDLLIQETSRLLQLTLEHDPHDTLGHGLGPETSPLSSPAYTPSGEAGSSARQKPVLRSCSIDRSPGAGSLGSPASQRKDLGRSESLRVVCRPHRIFRPSDLIHGEVLGKGCFGQAIKVTHRETGEVMVMKELIRFDEETQRTFLKEVKVMRCLEHPNVLKFIGVLYKDKRLNFITEYIKGGTLRGIIKSMDSQYPWSQRVSFAKDIASGMAYLHSMNIIHRDLNSHNCLVRENKNVVVADFGLARLMVDEKTQPEGLRSLKKPDRKKRYTVVGNPYWMAPEMINGRSYDEKVDVFSFGIVLCEIIGRVNADPDYLPRTMDFGLNVRGFLDRYCPPNCPPSFFPITVRCCDLDPEKRPSFVKLEHWLETLRMHLAGHLPLGPQLEQLDRGFWETYRRGESGLPAHPEVPD

SEQ ID NO: 445 - DNA, 2546 bp, Homo sapiens
gacggcaaatggcggacttcgacacctacgacgatcgggcctacagcagcttcggcggcggcagagggtcccgcggcagtgctggtggccatggttcccgtagccagaaggagttgcccacagagcccccctacacagcatacgtaggaaatctacctttcaatacggttcagggcgacatagatgctatctttaaggatctcagcataaggagtgtacggctagtcagagacaaagacacagataaatttaaaggattctgctatgtagaattcgatgaagtggattcccttaaggaagccttgacatacgatggtgcactgttgggcgatcggtcacttcgtgtggacattgcagaaggcagaaaacaagataaaggtggctttggattcagaaaaggtggaccagatgacagaggaatgggtagctctcgagaatctagaggtggatgggattcccgggatgacttcaattctggcttcagggatgacttcttagggggcaggggaggtagtcgcccaggcgaccggcgaacaggcccccccatgggcagccgcttcagagatggccctcccctccgtggatccaacatggatttcagagaacccacagaagaggaaagagcacagagaccacgactccagcttaaacctcgaacagtcgcgacgcccctcaatcaagtagccaatcccaactctgctatcttcgggggtgccaggcctagagaggaagtcgttcaaaaggagcaagaatgagcctgcggttgggagggaatggggcgtggggggttagagcaggaccacagcctggtgagtccccgggcagccgtcctgcagccgccactcctgcgcctgccattggcctcctcacagcggaaacacagcttgtgagtgcatgtcagctgttaacaagtggtttttagtacattctgggctttgctgtatctatctagtgcctgtttgtgcgtttttttctttcttccgctgcttccccattttccttctgtcctttttctcctgctccttgttttcccagcagcacatggggttcctcggaggagcagaggtggccgccgtgggggggcgtttgggctgcggtgctgcgtcatttttcctttgctttctctttactttagacactggcccaactccaggcgtttcctttcattccctcagtgcttctcttctgacctgcatgttgagttctgtattgctggggcttccaacaaaaaccagagtcactgacagagggaacagcagagaccttgttggtattcagctgtgatggatatagagaatcagaggcaccttgttttcacaactaggataaaaatatctgcagggtcctttccattcctatttagagggagtcctggctccatgaccccctcccgagtggactgtccaagcagataggctcacacgagaaacagtgaggctgaaagggggggctatggaagagcggtagggagtccacggagaagatgcagtgaatgcttgcatgcattcacacgtgtgtgtgtcccagctagttcactcctttcgccgtgcgtggtggaggctggcctctctggctgggtgcagtgaatggccagcgggtttcttttctgctgggccaaggcgctttgggggtggagggggtggtgctggtgctgcactgggctgactgcggcgctgacgcagcgtttccccccatccctgttgcctgtgtgttgtgtggatctgttcctagtataggcaacataatgagatactgtgcttcccacctccccttcagttcagagccaaaatgggtctagaatctggcactttactcatttcctttgataaattgtactatgcagagctgtcaggaaccttcagatagcagtagaggactgcagctgtctaggtctgcggccacatcttggggacacactggactgttcccatgtgcagggttcagcagttatgtgggagtgctaggggttaggcttttgagcttgaacgcctgcgtgtgaacagatgaaaaatccttcagtacccaagtcccagtctgtcctatggggagcagtttgggggcggccggcagcaggagcctgggaaagaggccctcgccaggtgatggcagggccagggtggcctggggcacccagcggaatgtgcttagtatttggtcaccagccgtcatcctgggcttttcctactgtgtcttgttacaaggcctcagcaatccacagaactctctctccttccttccacctgtcagcttctctgcttctgagataagaaccatttgtgtaacaccaacacttaacttcagaaagacatgcattatgtggtgtaatcaaacccgatgctttcagatgacctacttacatcttcaatgtggataagataaagaacaaaacacatgcatctaaactgctgggcaatccagttgacttttaaatgtaagaatggaattccaaacacttaacacattcagctatatgacagaaagtaaatctatggatatggtattttgtgaatgatcttttaaataaaagaaaaccttacgtaatattt

SEQ ID NO: 446 - protein, 248 aa, Homo sapiens
MADFDTYDDRAYSSFGGGRGSRGSAGGHGSRSQKELPTEPPYTAYVGNLPFNTVQGDIDAIFKDLSIRSVRLVRDKDTDKFKGFCYVEFDEVDSLKEALTYDGALLGDRSLRVDIAEGRKQDKGGFGFRKGGPDDRGMGSSRESRGGWDSRDDFNSGFRDDFLGGRGGSRPGDRRTGPPMGSRFRDGPPLRGSNMDFREPTEEERAQRPRLQLKPRTVATPLNQVANPNSAIFGGARPREEVVQKEQE

SEQ ID NO: 447 - DNA, 2486 bp, Homo sapiens
gacggcaaatggcggacttcgacacctacgacgatcgggcctacagcagcttcggcggcggcagagggtcccgcggcagtgctggtggccatggttcccgtagccagaaggagttgcccacagagcccccctacacagcatacgtaggaaatctacctttcaatacggttcagggcgacatagatgctatctttaaggatctcagcataaggagtgtacggctagtcagagacaaagacacagataaatttaaaggattctgctatgtagaattcgatgaagtggattcccttaaggaagccttgacatacgatggtgcactgttgggcgatcggtcacttcgtgtggacattgcagaaggcagaaaacaagataaaggtggctttggattcagaaaaggtggaccagatgacagaggcttcagggatgacttcttagggggcaggggaggtagtcgcccaggcgaccggcgaacaggcccccccatgggcagccgcttcagagatggccctcccctccgtggatccaacatggatttcagagaacccacagaagaggaaagagcacagagaccacgactccagcttaaacctcgaacagtcgcgacgcccctcaatcaagtagccaatcccaactctgctatcttcgggggtgccaggcctagagaggaagtcgttcaaaaggagcaagaatgagcctgcggttgggagggaatggggcgtggggggttagagcaggaccacagcctggtgagtccccgggcagccgtcctgcagccgccactcctgcgcctgccattggcctcctcacagcggaaacacagcttgtgagtgcatgtcagctgttaacaagtggtttttagtacattctgggctttgctgtatctatctagtgcctgtttgtgcgtttttttctttcttccgctgcttccccattttccttctgtcctttttctcctgctccttgttttcccagcagcacatggggttcctcggaggagcagaggtggccgccgtgggggggcgtttgggctgcggtgctgcgtcatttttcctttgctttctctttactttagacactggcccaactccaggcgtttcctttcattccctcagtgcttctcttctgacctgcatgttgagttctgtattgctggggcttccaacaaaaaccagagtcactgacagagggaacagcagagaccttgttggtattcagctgtgatggatatagagaatcagaggcaccttgttttcacaactaggataaaaatatctgcagggtcctttccattcctatttagagggagtcctggctccatgaccccctcccgagtggactgtccaagcagataggctcacacgagaaacagtgaggctgaaagggggggctatggaagagcggtagggagtccacggagaagatgcagtgaatgcttgcatgcattcacacgtgtgtgtgtcccagctagttcactcctttcgccgtgcgtggtggaggctggcctctctggctgggtgcagtgaatggccagcgggtttcttttctgctgggccaaggcgctttgggggtggagggggtggtgctggtgctgcactgggctgactgcggcgctgacgcagcgtttccccccatccctgttgcctgtgtgttgtgtggatctgttcctagtataggcaacataatgagatactgtgcttcccacctccccttcagttcagagccaaaatgggtctagaatctggcactttactcatttcctttgataaattgtactatgcagagctgtcaggaaccttcagatagcagtagaggactgcagctgtctaggtctgcggccacatcttggggacacactggactgttcccatgtgcagggttcagcagttatgtgggagtgctaggggttaggcttttgagcttgaacgcctgcgtgtgaacagatgaaaaatccttcagtacccaagtcccagtctgtcctatggggagcagtttgggggcggccggcagcaggagcctgggaaagaggccctcgccaggtgatggcagggccagggtggcctggggcacccagcggaatgtgcttagtatttggtcaccagccgtcatcctgggcttttcctactgtgtcttgttacaaggcctcagcaatccacagaactctctctccttccttccacctgtcagcttctctgcttctgagataagaaccatttgtgtaacaccaacacttaacttcagaaagacatgcattatgtggtgtaatcaaacccgatgctttcagatgacctacttacatcttcaatgtggataagataaagaacaaaacacatgcatctaaactgctgggcaatccagttgacttttaaatgtaagaatggaattccaaacacttaacacattcagctatatgacagaaagtaaatctatggatatggtattttgtgaatgatcttttaaataaaagaaaaccttacgtaatattt

SEQ ID NO: 448 - protein, 228 aa, Homo sapiens
MADFDTYDDRAYSSFGGGRGSRGSAGGHGSRSQKELPTEPPYTAYVGNLPFNTVQGDIDAIFKDLSIRSVRLVRDKDTDKFKGFCYVEFDEVDSLKEALTYDGALLGDRSLRVDIAEGRKQDKGGFGFRKGGPDDRGFRDDFLGGRGGSRPGDRRTGPPMGSRFRDGPPLRGSNMDFREPTEEERAQRPRLQLKPRTVATPLNQVANPNSAIFGGARPREEVVQKEQE

SEQ ID NO: 449 - DNA, 2010 bp, Homo sapiens
acgtgatccacccgcctcggcctcccaaagtttttggattacaggtgtgagccacctcgcccggtcctatctctctttcttctctttctccctctcactttgtttctcttctctctctctctcccgcctccttcccccgtctcccctcccttccccccaccgccctcttcatagctgagcctgtccggcagtgcggcggatgtacggatgattcagtggctggcaggaagcccgccctgcccgcccgccagtgtcagtggtgttggcatcagcttgggcaggtgtgcgggctcaggatggggcggccgtggtgaggaaccctggactctcagcatcacaagaggcaacaccaggagccaacatgagctcggggactgaactgctgtggcccggagcagcgctgctggtgctgttgggggtggcagccagtctgtgtgtgcgctgctcacgcccaggtgcaaagaggtcagagaaaatctaccagcagagaagtctgcgtgaggaccaacagagctttacggggtcccggacctactccttggtcgggcaggcatggccaggacccctggcggacatggcacccacaaggaaggacaagctgttgcaattctaccccagcctggaggatccagcatcttccaggtaccagaacttcagcaaaggaagcagacacgggtcggaggaagcctacatagaccccattgccatggagtattacaactgggggcggttctcgaagcccccagaagatgatgatgccaattcctacgagaatgtgctcatttgcaagcagaaaaccacagagacaggtgcccagcaggagggcataggtggcctctgcagaggggacctcagcctgtcactggccctgaagactggccccacttctggtctctgtccctctgcctccccggaagaagatgaggaatctgaggattatcagaactcagcatccatccatcagtggcgcgagtccaggaaggtcatggggcaactccagagagaagcatcccctggcccggtgggaagcccagacgaggaggacggggaaccggattacgtgaatggggaggtggcagccacagaagcctagggcagaccaagaagaaaggagccaaggcaaagagggaccactgtgctcatggacccatcgctgccttccaaggaccatttcccagagctactcaacttttaagcccctgccatggttgctcctggaaggagaaccagccaccctgaggaccacctggccatgcgtgcacagcctgggaaaagacagttactcacgggagctgcaggcccgtcaccaagccctctcccgacccaggctttgtggggcaggcacctggtaccaagggtaacccggctcctggtatggacggatgcgcaggatttaggataagctgtcacccagtccccataacaaaaccactgtccaacactggtatctgtgttcttttgtgctatgaatttggattcctaattgctattgttggttgctggggttttaaatgattgataagcttgtacagttaacttatagagggggagccatatttaacattctggatttcagagtagagatttctgtgttgtctcctagaaagcattacatgtagtttatttcagcatccttgttgggtggggccctggctctcttcccctttggtgggacctcccctttctttgggcttcagttcactcaggaagaaatgaggctgtcgccatctttatgtgcttccagtggaaatgtcacttgctacagacaatagtgcatgagagtctagagaagtagtgaccagaacagggcagagtaggtcccctccatggccctgaatcctcctctgctccagggctggcctctgcagagctgattaaacagtgttgtgactgtctcatgggaagagctggggcccagagggaccttgagtcagaaatgttgccagaaaaagtatctcctccaaccaaaacatctcaataaaaccattttagttgaaaagcaaaaaaaaa

SEQ ID NO: 450 - protein, 243 aa, Homo sapiens
MSSGTELLWPGAALLVLLGVAASLCVRCSRPGAKRSEKIYQQRSLREDQQSFTGSRTYSLVGQAWPGPLADMAPTRKDKLLQFYPSLEDPASSRYQNFSKGSRHGSEEAYIDPIAMEYYNWGRFSKPPEDDDANSYENVLICKQKTTETGAQQEGIGGLCRGDLSLSLALKTGPTSGLCPSASPEEDEESEDYQNSASIHQWRESRKVMGQLQREASPGPVGSPDEEDGEPDYVNGEVAATEA

SEQ ID NO: 451 - DNA, 2129 bp, Homo sapiens
acgtgatccacccgcctcggcctcccaaagtttttggattacaggtgtgagccacctcgcccggtcctatctctctttcttctctttctccctctcactttgtttctcttctctctctctctcccgcctccttcccccgtctcccctcccttccccccaccgccctcttcatagctgagcctgtccggcagtgcggcggatgtacggatgattcagtggctggcaggaagcccgccctgcccgcccgccagtgtcagtggtgttggcatcagcttgggcaggtgtgcgggctcaggatggggcggccgtggtgaggaaccctggactctcagagatggaatttcaccgtgttgcctaggctggtctggagctcttgatctcaagcgatcctccctgcctcggcctcccaacgtgctgggattataggcgtgagccaccgctcctggccaggcatcacaagaggcaacaccaggagccaacatgagctcggggactgaactgctgtggcccggagcagcgctgctggtgctgttgggggtggcagccagtctgtgtgtgcgctgctcacgcccaggtgcaaagaggtcagagaaaatctaccagcagagaagtctgcgtgaggaccaacagagctttacggggtcccggacctactccttggtcgggcaggcatggccaggacccctggcggacatggcacccacaaggaaggacaagctgttgcaattctaccccagcctggaggatccagcatcttccaggtaccagaacttcagcaaaggaagcagacacgggtcggaggaagcctacatagaccccattgccatggagtattacaactgggggcggttctcgaagcccccagaagatgatgatgccaattcctacgagaatgtgctcatttgcaagcagaaaaccacagagacaggtgcccagcaggagggcataggtggcctctgcagaggggacctcagcctgtcactggccctgaagactggccccacttctggtctctgtccctctgcctccccggaagaagatgaggaatctgaggattatcagaactcagcatccatccatcagtggcgcgagtccaggaaggtcatggggcaactccagagagaagcatcccctggcccggtgggaagcccagacgaggaggacggggaaccggattacgtgaatggggaggtggcagccacagaagcctagggcagaccaagaagaaaggagccaaggcaaagagggaccactgtgctcatggacccatcgctgccttccaaggaccatttcccagagctactcaacttttaagcccctgccatggttgctcctggaaggagaaccagccaccctgaggaccacctggccatgcgtgcacagcctgggaaaagacagttactcacgggagctgcaggcccgtcaccaagccctctcccgacccaggctttgtggggcaggcacctggtaccaagggtaacccggctcctggtatggacggatgcgcaggatttaggataagctgtcacccagtccccataacaaaaccactgtccaacactggtatctgtgttcttttgtgctatgaatttggattcctaattgctattgttggttgctggggttttaaatgattgataagcttgtacagttaacttatagagggggagccatatttaacattctggatttcagagtagagatttctgtgttgtctcctagaaagcattacatgtagtttatttcagcatccttgttgggtggggccctggctctcttcccctttggtgggacctcccctttctttgggcttcagttcactcaggaagaaatgaggctgtcgccatctttatgtgcttccagtggaaatgtcacttgctacagacaatagtgcatgagagtctagagaagtagtgaccagaacagggcagagtaggtcccctccatggccctgaatcctcctctgctccagggctggcctctgcagagctgattaaacagtgttgtgactgtctcatgggaagagctggggcccagagggaccttgagtcagaaatgttgccagaaaaagtatctcctccaaccaaaacatctcaataaaaccattttagttgaaaagcaaaaaaaaa

SEQ ID NO: 452 - protein, 243 aa, Homo sapiens; identical to SEQ ID NO: 450

SEQ ID NO: 453 - DNA, 1613 bp, Homo sapiens
ggtggcgggaagaggaggcgcgagaatggaggtggaggccgtctgtggtggcgcgggcgaggtggaggcccaggactctgaccctgcccctgccttcagcaaggcccccggcagcgccggccactacgaactgccgtgggttgaaaaatataggccagtaaagctgaatgaaattgtcgggaatgaagacaccgtgagcaggctagaggtctttgcaagggaaggaaatgtgcccaacatcatcattgcgggccctccaggaaccggcaagaccacaagcattctgtgcttggcccgggccctgctgggcccagcactcaaagatgccatgttggaactcaatgcttcaaatgacagcatgaccgacggagcccagcaagccttgaggagaaccatggaaatctactctaaaaccactcgcttcgcccttgcttgtaatgcttcggataagatcatcgagcccattcagtcccgctgtgcagtcctccggtacacaaagctgaccgacgcccagatcctcaccaggctgatgaatgttatcgagaaggagagggtaccctacactgatgacggcctagaagccatcatcttcacggcccagggagacatgaggcaggcgctgaacaacctgcagtccaccttctcaggatttggcttcattaacagtgagaacgtgttcaaggtctgtgacgagccccacccactgctggtaaaggagatgatccagcactgtgtgaatgccaacattgacgaagcctacaagattcttgctcacttgtggcatctgggctactcaccagaagatatcattggcaacatctttcgagtgtgtaaaactttccaaatggcagaatacctgaaactggagtttatcaaggaaattggatacactcacatgaaaatagcggaaggagtgaactctcttttgcagatggcaggcctcctggcaaggctgtgtcagaagacaatggccccggtggccagttagagcagagacttcactgactgacttacaggtgccctattctgaggtacaggagccgcggctttctgatgggggaaaatgccgccttaggctggagccaacatgactgtcctttaaactccagtggctggccaggcacggtagctcacgcctgtaatcccaacactttgggaggccgaggcaggtggatcacctgaggtcagaagttcaagaccagcctggccaacatggggaaaccctgtctttactaaaaatataaaaattagctgggtgtggtggcgggcacctgtaatcccagctactcgggaggctgtggcaggagaatcgcttgaacccaggaggtggaggttgcagtgagccaagatcacaccattgcactccagcctgggcgacagagtctccatctggggaaaaaaattaaataaataaactcccgtgacttgcatgtttgcttctgggacgtctgtgccccgcaagtgtttgagtttggcctccaccccattgatgcggtgacggggcggaaaggcgcagagaagctgagggcggtctctgatctgtgtgtgggttgacattttagctaataaagccttgcagtgtttgttggcaaaaaaaaaaaaaaaaaaaaaaa

SEQ ID NO: 454 - protein, 320 aa, Homo sapiens
MEVEAVCGGAGEVEAQDSDPAPAFSKAPGSAGHYELPWVEKYRPVKLNEIVGNEDTVSRLEVFAREGNVPNIIIAGPPGTGKTTSILCLARALLGPALKDAMLELNASNDSMTDGAQQALRRTMEIYSKTTRFALACNASDKIIEPIQSRCAVLRYTKLTDAQILTRLMNVIEKERVPYTDDGLEAIIFTAQGDMRQALNNLQSTFSGFGFINSENVFKVCDEPHPLLVKEMIQHCVNANIDEAYKILAHLWHLGYSPEDIIGNIFRVCKTFQMAEYLKLEFIKEIGYTHMKIAEGVNSLLQMAGLLARLCQKTMAPVAS

SEQ ID NO: 455 - DNA, 1715 bp, Homo sapiens
ggtggcgggaagaggaggcgcgagaatggaggtggaggccgtctgtggtggcgcgggcgaggtggaggcccaggactctgaccctgcccctgccttcagcaaggcccccggcagcgccggccactacgaactgccgtgggttgaaaaatataggccagtaaagctgaatgaaattgtcgggaatgaagacaccgtgagcaggctagaggtctttgcaagggaaggaaatgtgcccaacatcatcattgcgggccctccaggaaccggcaagaccacaagcattctgtgcttggcccgggccctgctgggcccagcactcaaagatgccatgttggaactcaatgcttcaaatgacaggggcattgacgttgtgaggaataaaattaaaatgtttgctcaacaaaaagtcactcttcccaaaggccgacataagatcatcattctggatgaagcagacagcatgaccgacggagcccagcaagccttgaggagaaccatggaaatctactctaaaaccactcgcttcgcccttgcttgtaatgcttcggataagatcatcgagcccattcagtcccgctgtgcagtcctccggtacacaaagctgaccgacgcccagatcctcaccaggctgatgaatgttatcgagaaggagagggtaccctacactgatgacggcctagaagccatcatcttcacggcccagggagacatgaggcaggcgctgaacaacctgcagtccaccttctcaggatttggcttcattaacagtgagaacgtgttcaaggtctgtgacgagccccacccactgctggtaaaggagatgatccagcactgtgtgaatgccaacattgacgaagcctacaagattcttgctcacttgtggcatctgggctactcaccagaagatatcattggcaacatctttcgagtgtgtaaaactttccaaatggcagaatacctgaaactggagtttatcaaggaaattggatacactcacatgaaaatagcggaaggagtgaactctcttttgcagatggcaggcctcctggcaaggctgtgtcagaagacaatggccccggtggccagttagagcagagacttcactgactgacttacaggtgccctattctgaggtacaggagccgcggctttctgatgggggaaaatgccgccttaggctggagccaacatgactgtcctttaaactccagtggctggccaggcacggtagctcacgcctgtaatcccaacactttgggaggccgaggcaggtggatcacctgaggtcagaagttcaagaccagcctggccaacatggggaaaccctgtctttactaaaaatataaaaattagctgggtgtggtggcgggcacctgtaatcccagctactcgggaggctgtggcaggagaatcgcttgaacccaggaggtggaggttgcagtgagccaagatcacaccattgcactccagcctgggcgacagagtctccatctggggaaaaaaattaaataaataaactcccgtgacttgcatgtttgcttctgggacgtctgtgccccgcaagtgtttgagtttggcctccaccccattgatgcggtgacggggcggaaaggcgcagagaagctgagggcggtctctgatctgtgtgtgggttgacattttagctaataaagccttgcagtgtttgttggcaaaaaaaaaaaaaaaaaaaaaaa

SEQ ID NO: 456 - protein, 354 aa, Homo sapiens
MEVEAVCGGAGEVEAQDSDPAPAFSKAPGSAGHYELPWVEKYRPVKLNEIVGNEDTVSRLEVFAREGNVPNIIIAGPPGTGKTTSILCLARALLGPALKDAMLELNASNDRGIDVVRNKIKMFAQQKVTLPKGRHKIIILDEADSMTDGAQQALRRTMEIYSKTTRFALACNASDKIIEPIQSRCAVLRYTKLTDAQILTRLMNVIEKERVPYTDDGLEAIIFTAQGDMRQALNNLQSTFSGFGFINSENVFKVCDEPHPLLVKEMIQHCVNANIDEAYKILAHLWHLGYSPEDIIGNIFRVCKTFQMAEYLKLEFIKEIGYTHMKIAEGVNSLLQMAGLLARLCQKTMAPVAS

SEQ ID NO: 457 - DNA, 5563 bp, Homo sapiens
cggctcggccgcggggcgcgcaggcggctgctgggcggcctcggtgcgcgcctcccgccttcccagagacgtggcgcgaggcccgggccctgagcacctatcgcggggatccccggcgccaggagggggtgcagccggtgggcagcgccgcgcagggaggggccgcagcatcctcgccccccagcgcgcccgggcccgagaggaggaggccggggctctccgggcctcccgccgcttagcctgatgctggaaggacgaaggtgagtgaagatggcagagaggacgtgaccagcactcacccttgtccacctgcccagtggcaccgccatgcagaagcccagcggcctgaagccccccggccgtggggggaagcactccagccccatgggccggacatctactgggtcagcttcatcctcggcggcggtggccgctagctccaaggaaggctccccactgcacaaacagtcatctggaccctcctcctccccggccgcagctgctgcccccgagaagccgggccccaaggcggcggaagtgggggatgacttcctgggggactttgtggtgggcgagcgggtgtgggtgaacggcgtgaagccaggcgtggtgcagtatctgggagagacgcagttcgcaccgggccagtgggctggcgtggtgctggacgacccggtgggcaagaatgatggcgcggtgggcggcgtgcgctacttcgagtgcccggccctccagggtatcttcacgcggccctccaagctgacccggcagcccacggccgagggctcggggagtgatgcccactccgtggagtcgctgactgcccagaacctgtcattgcattcgggcacggccacgcccccgctgaccagccgcgtcatccccctgcgggagagcgtcctcaacagctccgtgaagactggcaacgagtcgggatccaacctctcagacagcggctctgtgaagcggggcgaaaaggacctgcgcctgggggaccgcgtgctggttggcgggacgaagactggcgtggtgcggtacgtgggggagacagactttgccaagggcgagtggtgtggcgtggagctggacgagccccttgggaagaatgatggggcggtggcgggcaccaggtacttccagtgcccacccaagtttggtctcttcgcgcccatccacaaagtgatccgtatcggcttcccatctaccagcccagccaaggccaagaagaccaagcgtatggccatgggtgtgtcagcactgacccacagtcccagcagttcctccatcagctccgtcagctctgtggcctcctccgtggggggtcggcccagccgcagtggcctgctcacggagacctcttcacgctacgcccgcaagatctcgggcaccacggccttgcaggaggcactgaaggagaagcagcagcacattgagcagctgctggctgaacgagacctggaacgggctgaggtggccaaggccacaagccacatctgcgaggtggagaaggagattgccctgctcaaggcacagcatgagcagtatgttgcagaagccgaggagaagctgcagcgagcccggctgctcgtggagagcgtgcggaaagagaaggtggacctgtccaaccagctggaggaggagaggaggaaggtggaggatctgcagttccgcgtggaggaggagtccatcaccaagggagacctggagacccagacgcagctggagcacgcgcgcattggggagctggaacagagcctgctactggagaaggcgcaggccgagcggctgctccgagaattagcggacaacaggctgaccacagtggccgagaagtcgcgcgtgctgcagctggaggaggagctcaccctgcgccgaggtgaaatcgaggagctccagcagtgcctgttgcactcgggtcccccacctccggaccacccagacgccgccgagatcctgcggctacgggagcggctgctctcggccagcaaggaacaccagagggagagtggggtgctgcgggataaatacgagaaggccctgaaggcctaccaggcggaggtggacaagctccgcgcggccaacgagaagtacgcacaggaggtggcgggcctgaaggacaaggttcagcaggccaccagcgagaacatggggctaatggacaactggaaatccaagctggactcgctggcctcggaccaccagaagtccctggaggacctcaaagccaccctgaactcgggcccaggcgcccagcagaaggagatcggcgagctgaaggcagtgatggagggcatcaagatggagcaccagctggagctgggtaacttgcaggccaagcatgacctggagaccgccatgcacgtgaaggagaaggaggccctgcgagagaagctgcaggaggcccaggaggagctggctgggctgcagcggcactggcgggcccagctggaggtgcaagccagccagcaccggctggagctgcaggaggcccaggaccagcgccgggatgccgagctgcgtgtgcacgagctggaaaaactggacgtggagtaccggggccaggcgcaggctatcgagttcctcaaggagcagatctcgctggccgagaagaagatgttggactacgagcggctgcagcgggcagaagcccagggcaaacaggaggtcgagagtttgcgggagaagctcctggtggctgagaacagactccaggcggtcgaggccctgtgctcctcccagcacacccacatgattgagtcgaatgacatttcagaggagacgatcaggacgaaggaaactgtggagggcctgcaggacaagctgaacaagagggacaaagaggtgacagccttgacctcccagaccgagatgctcagggcccaagtaagtgcgctggagagcaagtgtaagtcaggcgagaagaaggtggacgccctcctgaaggagaagcggcgcctggaggcagagctggagaccgtgtcccggaagacccatgacgcctcgggccagctagtcctcatcagccaggagctgctgcggaaggagcggagcctgaacgaactgcgggtgttgctgctggaggccaatcgtcactccccagggccggagagggacctgagccgtgaggtacacaaggctgagtggcggatcaaggagcagaaactcaaggatgacatccggggcctgcgtgaaaagctgaccgggctggacaaagagaaatccctgtcggatcagaggcgctactccctcatcgacccgtcctcggcgcccgagcttctgcggctgcagcaccagctgatgagcacggaggacgccctgcgggatgcgctggaccaggctcagcaggtggagaagctgatggaggccatgaggagctgccctgacaaggcccagaccatcggcaattccggttctgcaaacggcatccaccagcaggacaaagctcagaaacaagaggacaagcactgatcctgaggggatactgtggagcagcccagtccacaccagagccccacgcggctgcccggcagtacctcctccaggcaggagccgggactgtcactttggagacaaaacagtgtttgtaacaataacgtactcaccgccgcggacaatcccccaccccgatccctcgccagaccaggacgcttcctcaagcccagccttctacagagagtgtgaacggtacagccccggcctgacccggggaccttcagcctggacacccggcagcttctggagtttgtcagtggaggcagaggggatccggccaggcccctctgtccagaaggagctgccctgaggaccatcttagcggccctgtcctctttttccgcccattctccctcgggtctccccagaggggccggcgggggctggggagggggtaagtttatccatgcagacaccaagggggagcatccagtctttaagagccaagtgggggccccttttccgaagccacttccaggccaaggcagtcgccagggcttcttgtccccaccttctgaaccttcttcaaacagtagtacaagctcccctcagccagcctgcctgcccagcgaggcccccaggttcaaggtgttggcgggggcggagggcaggggaacgggatccttctcccgctgcccaccaacaccaacacacacacacctctaagctgctggccgaagatgtcaccaaggccaaagacacagtattatgaaggtttggaaacccctctcctcacctcccaccgtgaccttgggcaaaccctggctcggagcccagggcagaggcagctcagagtggaggctctaggcaggtttgacaaaggtcagtaatacggtttcccctggggttgaccagatgttccaaaatatctgcatccacctggagatgcagctaagtgggtccttatgtacacaccacgttcacacacacacagagggaccacgtgtgcacgcatgaccgtgtgggtggcggcgtttgctgtgaaccacgctcaggccacacagagacacatacttggtttctgggactgagacccaggcctggcaggaccgtgcctacagatactgcaaacgttcctacagcctagaggtgcgtatacacacccaagtacacgcagccaggcattcaggggtgtgtttgccacatggagcatcccttcctggtcttgccaggcacctgcacagagcgtctccagccccatctcctaacgggggctgggggtaagagaaatctaactgcgctcccccaacccctcgccctgccatcttcccctcaagcctgctaagttatcccaggcctgtgcgtggtggaaaaagccagccttggccctgcagcctccacctcgccgctgggggaccaacaggttgcttacagctttgcaccccggcatcagcacaggggtccctgccccaccctccggcagctcagggagtgttttcctgtgaggcctcccccatcagtggaccagagggagaagcccgatgccccatcccggctttcccgtaacgcacaggacacgtgtgcaattcataggaacggcccagatcgccctcatgagtgccacctggtacaggtaggtggcgctcacgttcctgcccaaatgcagcccatcggggagtcacagtcagtccccccggcccccctcccagtccctgttggctttcggtagctctcgcatgcagttctattaacagccgtctagaagcgatgctttagtggcctaacccagggtcaaatacagctctttctagcaaaatcaggcagctctgccccatcggtaggggcaccgattagtctactaacagccagaggtccatctagcagggtgccgggaggagctgagcccccggaggtgggctcctggtgacgggtgtccaagaagcggtttccttgggagcttctgcctccgtgggcctctcagcccgccccgtgtggccgcccgggtgtggctcagccatgtcccctccccaggtccttcattcacccctcccctccccacagtggaattgttgaagtgtggcgagtctgtgctcgggacaataaagcttgtgacaggtccaggaccccggca

SEQ ID NO: 458 - protein, 1046 aa, Homo sapiens
MQKPSGLKPPGRGGKHSSPMGRTSTGSASSSAAVAASSKEGSPLHKQSSGPSSSPAAAAAPEKPGPKAAEVGDDFLGDFVVGERVWVNGVKPGVVQYLGETQFAPGQWAGVVLDDPVGKNDGAVGGVRYFECPALQGIFTRPSKLTRQPTAEGSGSDAHSVESLTAQNLSLHSGTATPPLTSRVIPLRESVLNSSVKTGNESGSNLSDSGSVKRGEKDLRLGDRVLVGGTKTGVVRYVGETDFAKGEWCGVELDEPLGKNDGAVAGTRYFQCPPKFGLFAPIHKVIRIGFPSTSPAKAKKTKRMAMGVSALTHSPSSSSISSVSSVASSVGGRPSRSGLLTETSSRYARKISGTTALQEALKEKQQHIEQLLAERDLERAEVAKATSHICEVEKEIALLKAQHEQYVAEAEEKLQRARLLVESVRKEKVDLSNQLEEERRKVEDLQFRVEEESITKGDLETQTQLEHARIGELEQSLLLEKAQAERLLRELADNRLTTVAEKSRVLQLEEELTLRRGEIEELQQCLLHSGPPPPDHPDAAEILRLRERLLSASKEHQRESGVLRDKYEKALKAYQAEVDKLRAANEKYAQEVAGLKDKVQQATSENMGLMDNWKSKLDSLASDHQKSLEDLKATLNSGPGAQQKEIGELKAVMEGIKMEHQLELGNLQAKHDLETAMHVKEKEALREKLQEAQEELAGLQRHWRAQLEVQASQHRLELQEAQDQRRDAELRVHELEKLDVEYRGQAQAIEFLKEQISLAEKKMLDYERLQRAEAQGKQEVESLREKLLVAENRLQAVEALCSSQHTHMIESNDISEETIRTKETVEGLQDKLNKRDKEVTALTSQTEMLRAQVSALESKCKSGEKKVDALLKEKRRLEAELETVSRKTHDASGQLVLISQELLRKERSLNELRVLLLEANRHSPGPERDLSREVHKAEWRIKEQKLKDDIRGLREKLTGLDKEKSLSDQRRYSLIDPSSAPELLRLQHQLMSTEDALRDALDQAQQVEKLMEAMRSCPDKAQTIGNSGSANGIHQQDKAQKQEDKH

SEQ ID NO: 459 - DNA, 5458 bp, Homo sapiens
cggctcggccgcggggcgcgcaggcggctgctgggcggcctcggtgcgcgcctcccgccttcccagagacgtggcgcgaggcccgggccctgagcacctatcgcggggatccccggcgccaggagggggtgcagccggtgggcagcgccgcgcagggaggggccgcagcatcctcgccccccagcgcgcccgggcccgagaggaggaggccggggctctccgggcctcccgccgcttagcctgatgctggaaggacgaaggtgagtgaagatggcagagaggacgtgaccagcactcacccttgtccacctgcccagtggcaccgccatgcagaagcccagcggcctgaagccccccggccgtggggggaagcactccagccccatgggccggacatctactgggtcagcttcatcctcggcggcggtggccgctagctccaaggaaggctccccactgcacaaacagtcatctggaccctcctcctccccggccgcagctgctgcccccgagaagccgggccccaaggcggcggaagtgggggatgacttcctgggggactttgtggtgggcgagcgggtgtgggtgaacggcgtgaagccaggcgtggtgcagtatctgggagagacgcagttcgcaccgggccagtgggctggcgtggtgctggacgacccggtgggcaagaatgatggcgcggtgggcggcgtgcgctacttcgagtgcccggccctccagggtatcttcacgcggccctccaagctgacccggcagcccacggccgagggctcggggagtgatgcccactccgtggagtcgctgactgcccagaacctgtcattgcattcgggcacggccacgcccccgctgaccagccgcgtcatccccctgcgggagagcgtcctcaacagctccgtgaagactggcaacgagtcgggatccaacctctcagacagcggctctgtgaagcggggcgaaaaggacctgcgcctgggggaccgcgtgctggttggcgggacgaagactggcgtggtgcggtacgtgggggagacagactttgccaagggcgagtggtgtggcgtggagctggacgagccccttgggaagaatgatggggcggtggcgggcaccaggtacttccagtgcccacccaagtttggtctcttcgcgcccatccacaaagtgatccgtatcggcttcccatctaccagcccagccaaggccaagaagaccaagcgtatggccatgggtgtgtcagcactgacccacagtcccagcagttcctccatcagctccgtcagctctgtggcctcctccgtggggggtcggcccagccgcagtggcctgctcacggagacctcttcacgctacgcccgcaagatctcgggcaccacggccttgcaggaggcactgaaggagaagcagcagcacattgagcagctgctggctgaacgagacctggaacgggctgaggtggccaaggccacaagccacatctgcgaggtggagaaggagattgccctgctcaaggcacagcatgagcagtatgttgcagaagccgaggagaagctgcagcgagcccggctgctcgtggagagcgtgcggaaagagaaggtggacctgtccaaccagctggaggaggagaggaggaaggtggaggatctgcagttccgcgtggaggaggagtccatcaccaagggagacctggagctgaccacagtggccgagaagtcgcgcgtgctgcagctggaggaggagctcaccctgcgccgaggtgaaatcgaggagctccagcagtgcctgttgcactcgggtcccccacctccggaccacccagacgccgccgagatcctgcggctacgggagcggctgctctcggccagcaaggaacaccagagggagagtggggtgctgcgggataaatacgagaaggccctgaaggcctaccaggcggaggtggacaagctccgcgcggccaacgagaagtacgcacaggaggtggcgggcctgaaggacaaggttcagcaggccaccagcgagaacatggggctaatggacaactggaaatccaagctggactcgctggcctcggaccaccagaagtccctggaggacctcaaagccaccctgaactcgggcccaggcgcccagcagaaggagatcggcgagctgaaggcagtgatggagggcatcaagatggagcaccagctggagctgggtaacttgcaggccaagcatgacctggagaccgccatgcacgtgaaggagaaggaggccctgcgagagaagctgcaggaggcccaggaggagctggctgggctgcagcggcactggcgggcccagctggaggtgcaagccagccagcaccggctggagctgcaggaggcccaggaccagcgccgggatgccgagctgcgtgtgcacgagctggaaaaactggacgtggagtaccggggccaggcgcaggctatcgagttcctcaaggagcagatctcgctggccgagaagaagatgttggactacgagcggctgcagcgggcagaagcccagggcaaacaggaggtcgagagtttgcgggagaagctcctggtggctgagaacagactccaggcggtcgaggccctgtgctcctcccagcacacccacatgattgagtcgaatgacatttcagaggagacgatcaggacgaaggaaactgtggagggcctgcaggacaagctgaacaagagggacaaagaggtgacagccttgacctcccagaccgagatgctcagggcccaagtaagtgcgctggagagcaagtgtaagtcaggcgagaagaaggtggacgccctcctgaaggagaagcggcgcctggaggcagagctggagaccgtgtcccggaagacccatgacgcctcgggccagctagtcctcatcagccaggagctgctgcggaaggagcggagcctgaacgaactgcgggtgttgctgctggaggccaatcgtcactccccagggccggagagggacctgagccgtgaggtacacaaggctgagtggcggatcaaggagcagaaactcaaggatgacatccggggcctgcgtgaaaagctgaccgggctggacaaagagaaatccctgtcggatcagaggcgctactccctcatcgacccgtcctcggcgcccgagcttctgcggctgcagcaccagctgatgagcacggaggacgccctgcgggatgcgctggaccaggctcagcaggtggagaagctgatggaggccatgaggagctgccctgacaaggcccagaccatcggcaattccggttctgcaaacggcatccaccagcaggacaaagctcagaaacaagaggacaagcactgatcctgaggggatactgtggagcagcccagtccacaccagagccccacgcggctgcccggcagtacctcctccaggcaggagccgggactgtcactttggagacaaaacagtgtttgtaacaataacgtactcaccgccgcggacaatcccccaccccgatccctcgccagaccaggacgcttcctcaagcccagccttctacagagagtgtgaacggtacagccccggcctgacccggggaccttcagcctggacacccggcagcttctggagtttgtcagtggaggcagaggggatccggccaggcccctctgtccagaaggagctgccctgaggaccatcttagcggccctgtcctctttttccgcccattctccctcgggtctccccagaggggccggcgggggctggggagggggtaagtttatccatgcagacaccaagggggagcatccagtctttaagagccaagtgggggccccttttccgaagccacttccaggccaaggcagtcgccagggcttcttgtccccaccttctgaaccttcttcaaacagtagtacaagctcccctcagccagcctgcctgcccagcgaggcccccaggttcaaggtgttggcgggggcggagggcaggggaacgggatccttctcccgctgcccaccaacaccaacacacacacacctctaagctgctggccgaagatgtcaccaaggccaaagacacagtattatgaaggtttggaaacccctctcctcacctcccaccgtgaccttgggcaaaccctggctcggagcccagggcagaggcagctcagagtggaggctctaggcaggtttgacaaaggtcagtaatacggtttcccctggggttgaccagatgttccaaaatatctgcatccacctggagatgcagctaagtgggtccttatgtacacaccacgttcacacacacacagagggaccacgtgtgcacgcatgaccgtgtgggtggcggcgtttgctgtgaaccacgctcaggccacacagagacacatacttggtttctgggactgagacccaggcctggcaggaccgtgcctacagatactgcaaacgttcctacagcctagaggtgcgtatacacacccaagtacacgcagccaggcattcaggggtgtgtttgccacatggagcatcccttcctggtcttgccaggcacctgcacagagcgtctccagccccatctcctaacgggggctgggggtaagagaaatctaactgcgctcccccaacccctcgccctgccatcttcccctcaagcctgctaagttatcccaggcctgtgcgtggtggaaaaagccagccttggccctgcagcctccacctcgccgctgggggaccaacaggttgcttacagctttgcaccccggcatcagcacaggggtccctgccccaccctccggcagctcagggagtgttttcctgtgaggcctcccccatcagtggaccagagggagaagcccgatgccccatcccggctttcccgtaacgcacaggacacgtgtgcaattcataggaacggcccagatcgccctcatgagtgccacctggtacaggtaggtggcgctcacgttcctgcccaaatgcagcccatcggggagtcacagtcagtccccccggcccccctcccagtccctgttggctttcggtagctctcgcatgcagttctattaacagccgtctagaagcgatgctttagtggcctaacccagggtcaaatacagctctttctagcaaaatcaggcagctctgccccatcggtaggggcaccgattagtctactaacagccagaggtccatctagcagggtgccgggaggagctgagcccccggaggtgggctcctggtgacgggtgtccaagaagcggtttccttgggagcttctgcctccgtgggcctctcagcccgccccgtgtggccgcccgggtgtggctcagccatgtcccctccccaggtccttcattcacccctcccctccccacagtggaattgttgaagtgtggcgagtctgtgctcgggacaataaagcttgtgacaggtccaggaccccggca

SEQ ID NO: 460 - protein, 1011 aa, Homo sapiens
MQKPSGLKPPGRGGKHSSPMGRTSTGSASSSAAVAASSKEGSPLHKQSSGPSSSPAAAAAPEKPGPKAAEVGDDFLGDFVVGERVWVNGVKPGVVQYLGETQFAPGQWAGVVLDDPVGKNDGAVGGVRYFECPALQGIFTRPSKLTRQPTAEGSGSDAHSVESLTAQNLSLHSGTATPPLTSRVIPLRESVLNSSVKTGNESGSNLSDSGSVKRGEKDLRLGDRVLVGGTKTGVVRYVGETDFAKGEWCGVELDEPLGKNDGAVAGTRYFQCPPKFGLFAPIHKVIRIGFPSTSPAKAKKTKRMAMGVSALTHSPSSSSISSVSSVASSVGGRPSRSGLLTETSSRYARKISGTTALQEALKEKQQHIEQLLAERDLERAEVAKATSHICEVEKEIALLKAQHEQYVAEAEEKLQRARLLVESVRKEKVDLSNQLEEERRKVEDLQFRVEEESITKGDLELTTVAEKSRVLQLEEELTLRRGEIEELQQCLLHSGPPPPDHPDAAEILRLRERLLSASKEHQRESGVLRDKYEKALKAYQAEVDKLRAANEKYAQEVAGLKDKVQQATSENMGLMDNWKSKLDSLASDHQKSLEDLKATLNSGPGAQQKEIGELKAVMEGIKMEHQLELGNLQAKHDLETAMHVKEKEALREKLQEAQEELAGLQRHWRAQLEVQASQHRLELQEAQDQRRDAELRVHELEKLDVEYRGQAQAIEFLKEQISLAEKKMLDYERLQRAEAQGKQEVESLREKLLVAENRLQAVEALCSSQHTHMIESNDISEETIRTKETVEGLQDKLNKRDKEVTALTSQTEMLRAQVSALESKCKSGEKKVDALLKEKRRLEAELETVSRKTHDASGQLVLISQELLRKERSLNELRVLLLEANRHSPGPERDLSREVHKAEWRIKEQKLKDDIRGLREKLTGLDKEKSLSDQRRYSLIDPSSAPELLRLQHQLMSTEDALRDALDQAQQVEKLMEAMRSCPDKAQTIGNSGSANGIHQQDKAQKQEDKH

SEQ ID NO: 461 - DNA, 3078 bp, Homo sapiens
aggaggctgagtcctggccgcgggccggggccggggcgccgctggcaggagcgcttggggatcctccaaggcgaccatggccttgctgggtaagcgctgtgacgtccccaccaacggctgcggacccgaccgctggaactccgcgttcacccgcaaagacgagatcatcaccagcctcgtgtctgccttagactccatgtgctcagcgctgtccaaactgaacgccgaggtggcctgtgtcgccgtgcacgatgagagcgcctttgtggtgggcacagagaaggggagaatgttcctgaatgcccggaaggagctacagtcagacttcctcaggttctgccgagggcccccgtggaaggatccggaggcagagcaccccaagaaggtgcagcggggcgagggtggaggccgtagcctccctcggtcctccctggaacatggctcagatgtgtaccttctgcggaagatggtagaggaggtgtttgatgttctttatagcgaggccctgggaagggccagtgtggtgccactgccctatgagaggctgctcagggagccagggctgctggccgtgcaggggctgcccgaaggcctggccttccgaaggccagccgagtatgaccccaaggccctcatggccatcctggaacacagccaccgcatccgcttcaagctcaagaggccacttgaggatggcgggcgggactcgaaggccctggtggagctgaacggtgtctccctgattcccaaggggtcacgggactgtggcctgcatggccaggcccccaaggtgccaccccaggacctgcccccaaccgccacctcctcctccatggccagcttcctgtacagcacggcgctccccaaccacgccatccgagagctcaagcaggaagcaccttcctgcccccttgcccccagcgacctgggcctgagtcggcccatgccagagcccaaggccaccggtgcccaagacttctccgactgttgtggacagaagcccactgggcctggtgggcctctcatccagaacgtccatgcctccaagcgcattctcttctccatcgtccatgacaagtcagagaagtgggacgccttcataaaggaaaccgaggacatcaacacgctccgggagtgtgtgcagatcctgtttaacagcagatatgcggaagccctgggcctggaccacatggtccccgtgccctaccggaagattgcctgtgacccggaggctgtggagatcgtgggcatcccggacaagatccccttcaagcgcccctgcacttatggagtccccaagctgaagcggatcctggaggagcgccatagtatccacttcatcattaagaggatgtttgatgagcgaattttcacagggaacaagtttaccaaagacaccacgaagctggagccagccagcccgccagaggacacctctgcagaggtctctagggccaccgtccttgaccttgctgggaatgctcggtcagacaagggcagcatgtctgaagactgtgggccaggaacctccggggagctgggcgggctgaggccgatcaaaattgagccagaggatctggacatcattcaggtcaccgtcccagacccctcgccaacctctgaggaaatgacagactcgatgcctgggcacctgccatcggaggattctggttatgggatggagatgctgacagacaaaggtctgagtgaggacgcgcggcccgaggagaggcccgtggaggacagccacggtgacgtgatccggcccctgcggaagcaggtggagctgctcttcaacacacgatacgccaaggccattggcatctcggagcccgtcaaggtgccgtactccaagtttctgatgcacccggaggagctgtttgtggtgggactgcctgaaggcatctccctccgcaggcccaactgcttcgggatcgccaagctccggaagattctggaggccagcaacagcatccagtttgtcatcaagaggcccgagctgctcactgagggagtcaaagagcccatcgtggatagtcaagagagggattccggggaccctctggtggacgagagcctgaagagacagggctttcaagaaaattatgacgcgaggctctcacggatcgacatcgccaacacactaagggagcaggtccaggaccttttcaataagaaatacggggaagccttgggcatcaagtacccggtccaggtcccctacaagcggatcaagagtaaccccggctccgtgatcatcgaggggctgcccccaggaatcccgttccgaaagccctgtaccttcggctcccagaacctggagaggattcttgctgtggctgacaagatcaagttcacagtcaccaggcctttccaaggactcatcccaaagcctgatgaagatgacgccaacagactcggggagaaggtgatcctgcgggagcaggtgaaggaactcttcaacgagaaatacggtgaggccctgggcctgaaccggccggtgctggtcccttataaactaatccgggacagcccagacgccgtggaggtcacgggtctgcctgatgacatccccttccggaaccccaacacgtacgacatccaccggctggagaagatcctgaaggcccgagagcatgtccgcatggtcatcattaaccagctccaaccctttgcagaaatctgcaatgatgccaaggtgccagccaaagacagcagcattcccaagcgcaagagaaagcgggtctcggaaggaaattccgtctcctcttcctcctcgtcttcctcttcctcgtcctctaacccggattcagtggcatcggccaaccagatctcactcgtgcaatggccaatgtacatggtggactatgccggcctgaacgtgcagctcccgggacctcttaattactagacctcagtactgaatcaggacctcactcagaaagactaaaggaaatgtaatttatgtacaaaatgtatattcggatatgtatcgatgccttttagtttttccaatgatttttacactatattcctgccaccaaggcctttttaaataagtaaaaaaaaaaaaaaaaa

SEQ ID NO: 462 - protein, 944 aa, Homo sapiens
MALLGKRCDVPTNGCGPDRWNSAFTRKDEIITSLVSALDSMCSALSKLNAEVACVAVHDESAFVVGTEKGRMFLNARKELQSDFLRFCRGPPWKDPEAEHPKKVQRGEGGGRSLPRSSLEHGSDVYLLRKMVEEVFDVLYSEALGRASVVPLPYERLLREPGLLAVQGLPEGLAFRRPAEYDPKALMAILEHSHRIRFKLKRPLEDGGRDSKALVELNGVSLIPKGSRDCGLHGQAPKVPPQDLPPTATSSSMASFLYSTALPNHAIRELKQEAPSCPLAPSDLGLSRPMPEPKATGAQDFSDCCGQKPTGPGGPLIQNVHASKRILFSIVHDKSEKWDAFIKETEDINTLRECVQILFNSRYAEALGLDHMVPVPYRKIACDPEAVEIVGIPDKIPFKRPCTYGVPKLKRILEERHSIHFIIKRMFDERIFTGNKFTKDTTKLEPASPPEDTSAEVSRATVLDLAGNARSDKGSMSEDCGPGTSGELGGLRPIKIEPEDLDIIQVTVPDPSPTSEEMTDSMPGHLPSEDSGYGMEMLTDKGLSEDARPEERPVEDSHGDVIRPLRKQVELLFNTRYAKAIGISEPVKVPYSKFLMHPEELFVVGLPEGISLRRPNCFGIAKLRKILEASNSIQFVIKRPELLTEGVKEPIVDSQERDSGDPLVDESLKRQGFQENYDARLSRIDIANTLREQVQDLFNKKYGEALGIKYPVQVPYKRIKSNPGSVIIEGLPPGIPFRKPCTFGSQNLERILAVADKIKFTVTRPFQGLIPKPDEDDANRLGEKVILREQVKELFNEKYGEALGLNRPVLVPYKLIRDSPDAVEVTGLPDDIPFRNPNTYDIHRLEKILKAREHVRMVIINQLQPFAEICNDAKVPAKDSSIPKRKRKRVSEGNSVSSSSSSSSSSSSNPDSVASANQISLVQWPMYMVDYAGLNVQLPGPLNY

SEQ ID NO: 463 - DNA, 3446 bp, Homo sapiens
taaatggcagccaatggagggtggtgttgcgcggggctgggattagggccggggcgaatggctggcaatcttactgggattacagaacaaagagcctccccgcgctcccgctctccgctcctctccccgcgccgccccgccctccgccgcagcccgcgccgggggtgggggccgccgagcgccagccccccggccggccgattccccccccgcgccccctccccgcgcctccctccccgccctcgccgcgccgccgtcctcgcctccctctgcctctccttcccccattctcccggattaattaaggaggcagcggcaggaggctgagtcctggccgcgggccggggccggggcgccgctggcaggagcgcttggggatcctccaaggcgaccatggccttgctgggtaagcgctgtgacgtccccaccaacggctgcggacccgaccgctggaactccgcgttcacccgcaaagacgagatcatcaccagcctcgtgtctgccttagactccatgtgctcagcgctgtccaaactgaacgccgaggtggcctgtgtcgccgtgcacgatgagagcgcctttgtggtgggcacagagaaggggagaatgttcctgaatgcccggaaggagctacagtcagacttcctcaggttctgccgagggcccccgtggaaggatccggaggcagagcaccccaagaaggtgcagcggggcgagggtggaggccgtagcctccctcggtcctccctggaacatggctcagatgtgtaccttctgcggaagatggtagaggaggtgtttgatgttctttatagcgaggccctgggaagggccagtgtggtgccactgccctatgagaggctgctcagggagccagggctgctggccgtgcaggggctgcccgaaggcctggccttccgaaggccagccgagtatgaccccaaggccctcatggccatcctggaacacagccaccgcatccgcttcaagctcaagaggccacttgaggatggcgggcgggactcgaaggccctggtggagctgaacggtgtctccctgattcccaaggggtcacgggactgtggcctgcatggccaggcccccaaggtgccaccccaggacctgcccccaaccgccacctcctcctccatggccagcttcctgtacagcacggcgctccccaaccacgccatccgagagctcaagcaggaagcaccttcctgcccccttgcccccagcgacctgggcctgagtcggcccatgccagagcccaaggccaccggtgcccaagacttctccgactgttgtggacagaagcccactgggcctggtgggcctctcatccagaacgtccatgcctccaagcgcattctcttctccatcgtccatgacaagtcagagaagtgggacgccttcataaaggaaaccgaggacatcaacacgctccgggagtgtgtgcagatcctgtttaacagcagatatgcggaagccctgggcctggaccacatggtccccgtgccctaccggaagattgcctgtgacccggaggctgtggagatcgtgggcatcccggacaagatccccttcaagcgcccctgcacttatggagtccccaagctgaagcggatcctggaggagcgccatagtatccacttcatcattaagaggatgtttgatgagcgaattttcacagggaacaagtttaccaaagacaccacgaagctggagccagccagcccgccagaggacacctctgcagaggtctctagggccaccgtccttgaccttgctgggaatgctcggtcagacaagggcagcatgtctgaagactgtgggccaggaacctccggggagctgggcgggctgaggccgatcaaaattgagccagaggatctggacatcattcaggtcaccgtcccagacccctcgccaacctctgaggaaatgacagactcgatgcctgggcacctgccatcggaggattctggttatgggatggagatgctgacagacaaaggtctgagtgaggacgcgcggccggaggagaggcccgtggaggacagccacggtgacgtgatccggcccctgcggaagcaggtggagctgctcttcaacacacgatacgccaaggccattggcatctcggagcccgtcaaggtgccgtactccaagtttctgatgcacccggaggagctgtttgtggtgggactgcctgaaggcatctccctccgcaggcccaactgcttcgggatcgccaagctccggaagattctggaggccagcaacagcatccagtttgtcatcaagaggcccgagctgctcactgagggagtcaaagagcccatcatggatagtcaaggaactgcctcctcacttggcttctctccccctgccctgcccccagagagggattccggggaccctctggtggacgagagcctgaagagacagggctttcaagaaaattatgacgcgaggctctcacggatcgacatcgccaacacactaagggagcaggtccaggaccttttcaataagaaatacggggaagccttgggcatcaagtacccggtccaggtcccctacaagcggatcaagagtaaccccggctccgtgatcatcgaggggctgcccccaggaatcccgttccgaaagccctgtaccttcggctcccagaacctggagaggattcttgctgtggctgacaagatcaagttcacagtcaccaggcctttccaaggactcatcccaaagcctgatgaagatgacgccaacagactcggggagaaggtgatcctgcgggagcaggtgaaggaactcttcaacgagaaatacggtgaggccctgggcctgaaccggccggtgctggtcccttataaactaatccgggacagcccagacgccgtggaggtcacgggtctgcctgatgacatccccttccggaaccccaacacgtacgacatccaccggctggagaagatcctgaaggcccgagagcatgtccgcatggtcatcattaaccagctccaaccctttgcagaaatctgcaatgatgccaaggtgccagccaaagacagcagcattcccaagcgcaagagaaagcgggtctcggaaggaaattccgtctcctcttcctcctcgtcttcctcttcctcgtcctctaacccggattcagtggcatcggccaaccagatctcactcgtgcaatggccaatgtacatggtggactatgccggcctgaacgtgcagctcccgggacctcttaattactagacctcagtactgaatcaggacctcactcagaaagactaaaggaaatgtaatttatgtacaaaatgtatattcggatatgtatcgatgccttttagtttttccaatgatttttacactatattcctgccaccaaggcctttttaaataagtaaaaaaaaaaaaaaaaaaaaaaa

SEQ ID NO: 464 - protein, 959 aa, Homo sapiens
MALLGKRCDVPTNGCGPDRWNSAFTRKDEIITSLVSALDSMCSALSKLNAEVACVAVHDESAFVVGTEKGRMFLNARKELQSDFLRFCRGPPWKDPEAEHPKKVQRGEGGGRSLPRSSLEHGSDVYLLRKMVEEVFDVLYSEALGRASVVPLPYERLLREPGLLAVQGLPEGLAFRRPAEYDPKALMAILEHSHRIRFKLKRPLEDGGRDSKALVELNGVSLIPKGSRDCGLHGQAPKVPPQDLPPTATSSSMASFLYSTALPNHAIRELKQEAPSCPLAPSDLGLSRPMPEPKATGAQDFSDCCGQKPTGPGGPLIQNVHASKRILFSIVHDKSEKWDAFIKETEDINTLRECVQILFNSRYAEALGLDHMVPVPYRKIACDPEAVEIVGIPDKIPFKRPCTYGVPKLKRILEERHSIHFIIKRMFDERIFTGNKFTKDTTKLEPASPPEDTSAEVSRATVLDLAGNARSDKGSMSEDCGPGTSGELGGLRPIKIEPEDLDIIQVTVPDPSPTSEEMTDSMPGHLPSEDSGYGMEMLTDKGLSEDARPEERPVEDSHGDVIRPLRKQVELLFNTRYAKAIGISEPVKVPYSKFLMHPEELFVVGLPEGISLRRPNCFGIAKLRKILEASNSIQFVIKRPELLTEGVKEPIMDSQGTASSLGFSPPALPPERDSGDPLVDESLKRQGFQENYDARLSRIDIANTLREQVQDLFNKKYGEALGIKYPVQVPYKRIKSNPGSVIIEGLPPGIPFRKPCTFGSQNLERILAVADKIKFTVTRPFQGLIPKPDEDDANRLGEKVILREQVKELFNEKYGEALGLNRPVLVPYKLIRDSPDAVEVTGLPDDIPFRNPNTYDIHRLEKILKAREHVRMVIINQLQPFAEICNDAKVPAKDSSIPKRKRKRVSEGNSVSSSSSSSSSSSSNPDSVASANQISLVQWPMYMVDYAGLNVQLPGPLNY

SEQ ID NO: 465 - DNA, 4422 bp, Homo sapiens
aggaggaggagggtgagagagaagctgggagagcagagaaaaggggccaccggtcgcccccccgcttccccgcacgcgctctccagccgcggccgcccgcctgccgcggtcaccccggcctctgcctctgtcccccagtgatcggatcaaggcgctgagcgaggccctgcctgcggggcggccatgcggcggtgacaggagcgcgaccgacacgcacgggcccctcgccccctctcgcctcccgtccgctcgccagctcccctcagccgaggctgctccgcggcggccgcagcccgcgcgcggcccacactcgcctcccctcggcacccccggccccggagctgcctggaggcggccgcactcggggatcatggcccaagttgcaatgtccaccctccccgttgaagatgaggagtcctcggagagcaggatggtggtgacattcctcatgtcagctctcgagtccatgtgtaaagaactggccaagtccaaagccgaagtggcctgcattgcagtgtatgaaacagacgtgtttgtcgtcggaactgaaagaggacgtgcttttgtcaataccagaaaggattttcaaaaagattttgtaaaatattgtgttgaagaagaagaaaaagctgcagagatgcataaaatgaaatctacaacccaggcaaatcggatgagtgtagatgctgtagaaattgaaacactcagaaaaacagttgaggactatttctgcttttgctatgggaaagctttaggcaaatccacagtggtacctgtaccatatgagaagatgctgcgagaccagtcggctgtggtagtgcaggggcttccggaaggtgttgcctttaaacaccccgagaactatgatcttgcaaccctgaaatggattttggagaacaaagcagggatttcattcatcattaagagaccttttttagagccaaagaagcatgtaggtggtcgtgtgatggtaacagatgctgacaggtcaatactatctccaggtggaagttgtggccccatcaaagtgaaaactgaacccacagaagattctggcatttccctggaaatggcagctgtgacagtaaaggaagaatcagaagatcctgattattatcaatataacattcaaggaagccaccattcttcagagggcaatgaaggcacagaaatggaagtaccagcagaagatgatgattattctccaccgtctaagagaccaaaggccaatgagctaccgcagccaccagtcccggaacccgccaatgctgggaagcggaaagtgagggagttcaacttcgagaaatggaatgctcgcatcactgatctacgtaaacaagttgaagaattgtttgaaaggaaatatgctcaagccataaaagccaaaggtccggtgacgatcccgtaccctcttttccagtctcatgttgaagatctttatgtagaaggacttcctgaaggaattccttttagaaggccatctacttacggaattcctcgcctggagaggatattacttgcaaaggaaaggattcgttttgtgattaagaaacatgagcttctgaattcaacacgtgaagatttacagcttgataaaccagcttcaggagtaaaggaagaatggtatgccagaatcactaaattaagaaagatggtggatcagcttttctgcaaaaaatttgcggaacgcttggggagcactgaagccaaggctgtaccgtaccaaaaatttgaggcacacccgaatgatctgtacgtggaaggactgccagaaaacattcctttccgaagtccctcatggtatggaatcccaaggctggaaaaaatcattcaagtgggcaatcgaattaaatttgttattaaaagaccagaacttctgactcacagtaccactgaagttactcagccaagaacgaatacaccagtcaaagaagattggaatgtcagaattaccaagctacggaagcaagtggaagagatttttaatttgaaatttgctcaagctcttggactcaccgaggcagtaaaagtaccatatcctgtgtttgaatcaaacccggagttcttgtatgtggaaggcttgccagaggggattcccttccgaagccctacctggtttggaattccacgacttgaaaggatcgtccgcgggagtaataaaatcaagttcgttgttaaaaaacctgaactagttatttcctacttgcctcctgggatggctagtaaaataaacactaaagctttgcagtcccccaaaagaccacgaagtcctgggagtaattcaaaggttcctgaaattgaggtcaccgtggaaggccctaataacaacaatcctcaaacctcagctgttcgaaccccgacccagactaacggttctaacgttcccttcaagccacgagggagagagttttcctttgaggcctggaatgccaaaatcacggacctaaaacagaaagttgaaaatctcttcaatgagaaatgtggggaagctcttggccttaaacaagctgtgaaggtgccgttcgcgttatttgagtctttcccggaagacttttatgtggaaggcttacctgagggtgtgccattccgaagaccatcgacttttggcattccgagactggagaagatactcagaaacaaagccaaaattaagttcatcattaaaaagcccgaaatgtttgagacggcgattaaggagagcacctcctctaagagccctcccagaaaaataaattcatcacccaatgttaatactactgcatcaggtgttgaagaccttaacatcattcaggtgacaattccagatgatgataatgaaagactctcgaaagttgaaaaagctagacagctaagagaacaagtgaatgacctctttagtcggaaatttggtgaagctattggtatgggttttcctgtgaaagttccctacaggaaaatcacaattaaccctggctgtgtggtggttgatggcatgcccccgggggtgtccttcaaagcccccagctacctggaaatcagctccatgagaaggatcttagactctgccgagtttatcaaattcacggtcattagaccatttccaggacttgtgattaataaccagctggttgatcagagtgagtcagaaggccccgtgatacaagaatcagctgaaccaagccagttggaagttccagccacagaagaaataaaagagactgatggaagctctcagatcaagcaagaaccagaccccacgtggtagacctcttccctcctaggcttaaagtatcagtggttgagaagagcttttcggacctgttactaccccaagctgtgtaatataccttggtataacagaaataccttctatacaaacctttttttctacttttagatagaaatgtctactttttcagcagttctgtgaattaaagagcagagtgactgtgggtctggaatggctggtgtacttgggaatgtactatcaggattttacagcaatgctgggaaatgacagggaaaatgacaggaatgaatctcaccagattttttatgtactcagcagagccttgagttacggtgtttattttccaatcaagtgaagatatctcctacttctcctactggaacatctcagcttctgcagtgaagaaaaattcctgtgatagttcagttctttagtttttctatttgaaaaaaaaaaaatcatttaaatgatcctttgttcacggctctccttaatgactgagtgaacagttcctatctgtatatttgactaaaccttttcctaagctatctctcatggttcctatgtttttttatcataattaaaagcaaaaccatctggatcacctaacagtcagaggtcagtatctcagcgtgtgaattatagaggaatacagagagaacctctcccactttttacttttcgtccaaataaaatgcatggtgtaccagaagttgaagatcgggttgaggattggggctagctcgatgacactaaggccccaacatcgcgggacctgctgtggcgcggattcttaggaacgctgttctagccggccccctctccaggggtcgccgtggccggcattatttcctagttcttcttgtaaccctgaggtgccagcgcggggagtgaggaggggtcagggggctaaggatgcaacctctgacgttctgcgccttcctaggagagtcttacatgtgttgagatttcacaagcaatgcgagttgtaaaataccagctctacaagaaactaggctctgtgacggcatagttttcagtagctttatcacaatattcacaatggagaattatatgacatggtagcagaaataggcccttttatgtgttgcttctattttacctcaaattgtagatatagggtaatcaataaaatccatccatgcctttcacacactaaaaaaaaaaaaaaa

SEQ ID NO: 466 - protein, 957 aa, Homo sapiens
MAQVAMSTLPVEDEESSESRMVVTFLMSALESMCKELAKSKAEVACIAVYETDVFVVGTERGRAFVNTRKDFQKDFVKYCVEEEEKAAEMHKMKSTTQANRMSVDAVEIETLRKTVEDYFCFCYGKALGKSTVVPVPYEKMLRDQSAVVVQGLPEGVAFKHPENYDLATLKWILENKAGISFIIKRPFLEPKKHVGGRVMVTDADRSILSPGGSCGPIKVKTEPTEDSGISLEMAAVTVKEESEDPDYYQYNIQGSHHSSEGNEGTEMEVPAEDDDYSPPSKRPKANELPQPPVPEPANAGKRKVREFNFEKWNARITDLRKQVEELFERKYAQAIKAKGPVTIPYPLFQSHVEDLYVEGLPEGIPFRRPSTYGIPRLERILLAKERIRFVIKKHELLNSTREDLQLDKPASGVKEEWYARITKLRKMVDQLFCKKFAERLGSTEAKAVPYQKFEAHPNDLYVEGLPENIPFRSPSWYGIPRLEKIIQVGNRIKFVIKRPELLTHSTTEVTQPRTNTPVKEDWNVRITKLRKQVEEIFNLKFAQALGLTEAVKVPYPVFESNPEFLYVEGLPEGIPFRSPTWFGIPRLERIVRGSNKIKFVVKKPELVISYLPPGMASKINTKALQSPKRPRSPGSNSKVPEIEVTVEGPNNNNPQTSAVRTPTQTNGSNVPFKPRGREFSFEAWNAKITDLKQKVENLFNEKCGEALGLKQAVKVPFALFESFPEDFYVEGLPEGVPFRRPSTFGIPRLEKILRNKAKIKFIIKKPEMFETAIKESTSSKSPPRKINSSPNVNTTASGVEDLNIIQVTIPDDDNERLSKVEKARQLREQVNDLFSRKFGEAIGMGFPVKVPYRKITINPGCVVVDGMPPGVSFKAPSYLEISSMRRILDSAEFIKFTVIRPFPGLVINNQLVDQSESEGPVIQESAEPSQLEVPATEEIKETDGSSQIKQEPDPTW

SEQ ID NO: 467 - DNA, 4537 bp, Homo sapiens
aggaggaggagggtgagagagaagctgggagagcagagaaaaggggccaccggtcgcccccccgcttccccgcacgcgctctccagccgcggccgcccgcctgccgcggtcaccccggcctctgcctctgtcccccagtgatcggatcaaggcgctgagcgaggccctgcctgcggggcggccatgcggcggtgacaggagcgcgaccgacacgcacgggcccctcgccccctctcgcctcccgtccgctcgccagctcccctcagccgaggctgctccgcggcggccgcagcccgcgcgcggcccacactcgcctcccctcggcacccccggccccggagctgcctggaggcggccgcactcggggatcatggcccaagttgcaatgtccaccctccccgttgaagatgaggagtcctcggagagcaggatggtggtgacattcctcatgtcagctctcgagtccatgtgtaaagaactggccaagtccaaagccgaagtggcctgcattgcagtgtatgaaacagacgtgtttgtcgtcggaactgaaagaggacgtgcttttgtcaataccagaaaggattttcaaaaagattttgtaaaatattgtgttgaagaagaagaaaaagctgcagagatgcataaaatgaaatctacaacccaggcaaatcggatgagtgtagatgctgtagaaattgaaacactcagaaaaacagttgaggactatttctgcttttgctatgggaaagctttaggcaaatccacagtggtacctgtaccatatgagaagatgctgcgagaccagtcggctgtggtagtgcaggggcttccggaaggtgttgcctttaaacaccccgagaactatgatcttgcaaccctgaaatggattttggagaacaaagcagggatttcattcatcattaagagaccttttttagagccaaagaagcatgtaggtggtcgtgtgatggtaacagatgctgacaggtcaatactatctccaggtggaagttgtggccccatcaaagtgaaaactgaacccacagaagattctggcatttccctggaaatggcagctgtgacagtaaaggaagaatcagaagatcctgattattatcaatataacattcaagcaggcccttctgaaactgatgatgttgatgaaaaacagcccctatcgaagcctttgcaaggaagccaccattcttcagagggcaatgaaggcacagaaatggaagtaccagcagaagattctactcaacatgtcccttcagaaacaagtgaggaccctgaagttgaggtgactattgaagatgatgattattctccaccgtctaagagaccaaaggccaatgagctaccgcagccaccagtcccggaacccgccaatgctgggaagcggaaagtgagggagttcaacttcgagaaatggaatgctcgcatcactgatctacgtaaacaagttgaagaattgtttgaaaggaaatatgctcaagccataaaagccaaaggtccggtgacgatcccgtaccctcttttccagtctcatgttgaagatctttatgtagaaggacttcctgaaggaattccttttagaaggccatctacttacggaattcctcgcctggagaggatattacttgcaaaggaaaggattcgttttgtgattaagaaacatgagcttctgaattcaacacgtgaagatttacagcttgataagccagcttcaggagtaaaggaagaatggtatgccagaatcactaaattaagaaagatggtggatcagcttttctgcaaaaaatttgcggaagccttggggagcactgaagccaaggctgtaccgtaccaaaaatttgaggcacacccgaatgatctgtacgtggaaggactgccagaaaacattcctttccgaagtccctcatggtatggaatcccaaggctggaaaaaatcattcaagtgggcaatcgaattaaatttgttattaaaagaccagaacttctgactcacagtaccactgaagttactcagccaagaacgaatacaccagtcaaggaagattggaatgtcagaattaccaagctacggaagcaagtggaagagatttttaatttgaaatttgctcaagctcttggactcaccgaggcagtaaaagtaccatatcctgtgtttgaatcaaacccggagttcttgtatgtggaaggcttgccagaggggattcccttccgaagccctacctggtttggaattccacgacttgaaaggatcgtccgcgggagtaataaaatcaagttcgttgttaaaaaacctgaactagttatttcctacttgcctcctgggatggctagtaaaataaacactaaagctttgcagtcccccaaaagaccacgaagtcctgggagtaattcaaaggttcctgaaattgaggtcaccgtggaaggccctaataacaacaatcctcaaacctcagctgttcgaaccccgacccagactaacggttctaacgttcccttcaagccacgagggagagagttttcctttgaggcctggaatgccaaaatcacggacctaaaacagaaagttgaaaatctcttcaatgagaaatgtggggaagctcttggccttaaacaagctgtgaaggtgccgttcgcgttatttgagtctttcccggaagacttttatgtggaaggcttacctgagggtgtgccattccgaagaccatcgacttttggcattccgaggctggagaagatactcagaaacaaagccaaaattaagttcatcattaaaaagcccgaaatgtttgagacggcgattaaggagagcacctcctctaagagccctcccagaaaaataaattcatcacccaatgttaatactactgcatcaggtgttgaagaccttaacatcattcaggtgacaattccagatgatgataatgaaagactctcgaaagttgaaaaagctagacagctaagagaacaagtgaatgacctctttagtcggaaatttggtgaagctattggtatgggttttcctgtgaaagttccctacaggaaaatcacaattaaccctggctgtgtggtggttgatggcatgcccccgggggtgtccttcaaagcccccagctacctggaaatcagctccatgagaaggatcttagactctgccgagtttatcaaattcacggtcattagaccatttccaggacttgtgattaataaccagctggttgatcagagtgagtcagaaggccccgtgatacaagaatcagctgaaccaagccagttggaagttccagccacagaagaaataaaagagactgatggaagctctcagatcaagcaagaaccagaccccacgtggtagacctcttccctcctaggcttaaagtatcagtggttgagaagagcttttcggacctgttactaccccaagctgtgtaatatacttgtataacagaaataccttctatacaaacctttttttctacttttagatagaaatgtctactttttcagcagttctgtgaattaaagagcagagtgactgtgggtctggaatggctggtgtacttgggaatgtactatcaggattttacagcaatgctgggaaatgacagggaaaatgacaggaatgaatctcaccagattttttatgtactcagcagagccttgagttacggtgtttattttccaatcaagtgaagatatctcctacttctcctactggaacatctcagcttctgcagtgaagaaaaattcctgtgatagttcagttctttagtttttctatttgaaaaaaaaaaatcatttaaatgatcctttgttcacggctctccttaatgactgagtgaacagttcctatctgtatatttgactaaaccttttcctaagctatctctcatggttcctatgtttttttatcataattaaaagcaaaaccatctggatcacctaacagtcagaggtcagtatctcagcgtgtgaattatagaggaaatacagagagaacctcttccacttttacttttcgtccaaataaaatgcatggtgtaccagaagttgaagatcgggttgaggattggggctagctcgatgacactaaggccccaacatcgcgggacctgctgtggcgcggattcttaggaacgctgttctagccggccccctctccaggggtcgcgtggccggcattatttcctagttcttcttgtaaccctgaggtgccagcgcggggagtgaggaggggtcagggggctaaggatgcaacctctgacgttctgcgccttcctaggagagtcttacatgtgttgagatttcacaagcaatgcgagttgtaaaataccagctctacaagaagctaggctctgtgacggcatagttttcagtagctttatcacaatattcacaatggagaattatatgacatggtagcagaaataggcccttttatgtgttgcttctattttacctcaaattgtagatatagggtaatcaataaaatccatccatgcctttcacacactaaaaagtcgga

SEQ ID NO: 468 - protein, 998 aa, Homo sapiens
MAQVAMSTLPVEDEESSESRMVVTFLMSALESMCKELAKSKAEVACIAVYETDVFVVGTERGRAFVNTRKDFQKDFVKYCVEEEEKAAEMHKMKSTTQANRMSVDAVEIETLRKTVEDYFCFCYGKALGKSTVVPVPYEKMLRDQSAVVVQGLPEGVAFKHPENYDLATLKWILENKAGISFIIKRPFLEPKKHVGGRVMVTDADRSILSPGGSCGPIKVKTEPTEDSGISLEMAAVTVKEESEDPDYYQYNIQAGPSETDDVDEKQPLSKPLQGSHHSSEGNEGTEMEVPAEDSTQHVPSETSEDPEVEVTIEDDDYSPPSKRPKANELPQPPVPEPANAGKRKVREFNFEKWNARITDLRKQVEELFERKYAQAIKAKGPVTIPYPLFQSHVEDLYVEGLPEGIPFRRPSTYGIPRLERILLAKERIRFVIKKHELLNSTREDLQLDKPASGVKEEWYARITKLRKMVDQLFCKKFAEALGSTEAKAVPYQKFEAHPNDLYVEGLPENIPFRSPSWYGIPRLEKIIQVGNRIKFVIKRPELLTHSTTEVTQPRTNTPVKEDWNVRITKLRKQVEEIFNLKFAQALGLTEAVKVPYPVFESNPEFLYVEGLPEGIPFRSPTWFGIPRLERIVRGSNKIKFVVKKPELVISYLPPGMASKINTKALQSPKRPRSPGSNSKVPEIEVTVEGPNNNNPQTSAVRTPTQTNGSNVPFKPRGREFSFEAWNAKITDLKQKVENLFNEKCGEALGLKQAVKVPFALFESFPEDFYVEGLPEGVPFRRPSTFGIPRLEKILRNKAKIKFIIKKPEMFETAIKESTSSKSPPRKINSSPNVNTTASGVEDLNIIQVTIPDDDNERLSKVEKARQLREQVNDLFSRKFGEAIGMGFPVKVPYRKITINPGCVVVDGMPPGVSFKAPSYLEISSMRRILDSAEFIKFTVIRPFPGLVINNQLVDQSESEGPVIQESAEPSQLEVPATEEIKETDGSSQIKQEPDPTW

SEQ ID NO: 469 - DNA, 4477 bp, Homo sapiens
aggaggaggagggtgagagagaagctgggagagcagagaaaaggggccaccggtcgcccccccgcttccccgcacgcgctctccagccgcggccgcccgcctgccgcggtcaccccggcctctgcctctgtcccccagtgatcggatcaaggcgctgagcgaggccctgcctgcggggcggccatgcggcggtgacaggagcgcgaccgacacgcacgggcccctcgccccctctcgcctcccgtccgctcgccagctcccctcagccgaggctgctccgcggcggccgcagcccgcgcgcggcccacactcgcctcccctcggcacccccggccccggagctgcctggaggcggccgcactcggggatcatggcccaagttgcaatgtccaccctccccgttgaagatgaggagtcctcggagagcaggatggtggtgacattcctcatgtcagctctcgagtccatgtgtaaagaactggccaagtccaaagccgaagtggcctgcattgcagtgtatgaaacagacgtgtttgtcgtcggaactgaaagaggacgtgcttttgtcaataccagaaaggattttcaaaaagattttgtaaaatattgtgttgaagaagaagaaaaagctgcagagatgcataaaatgaaatctacaacccaggcaaatcggatgagtgtagatgctgtagaaattgaaacactcagaaaaacagttgaggactatttctgcttttgctatgggaaagctttaggcaaatccacagtggtacctgtaccatatgagaagatgctgcgagaccagtcggctgtggtagtgcaggggcttccggaaggtgttgcctttaaacaccccgagaactatgatcttgcaaccctgaaatggattttggagaacaaagcagggatttcattcatcattaagagaccttttttagagccaaagaagcatgtaggtggtcgtgtgatggtaacagatgctgacaggtcaatactatctccaggtggaagttgtggccccatcaaagtgaaaactgaacccacagaagattctggcatttccctggaaatggcagctgtgacagtaaaggaagaatcagaagatcctgattattatcaatataacattcaaggaagccaccattcttcagagggcaatgaaggcacagaaatggaagtaccagcagaagattctactcaacatgtcccttcagaaacaagtgaggaccctgaagttgaggtgactattgaagatgatgattattctccaccgtctaagagaccaaaggccaatgagctaccgcagccaccagtcccggaacccgccaatgctgggaagcggaaagtgagggagttcaacttcgagaaatggaatgctcgcatcactgatctacgtaaacaagttgaagaattgtttgaaaggaaatatgctcaagccataaaagccaaaggtccggtgacgatcccgtaccctcttttccagtctcatgttgaagatctttatgtagaaggacttcctgaaggaattccttttagaaggccatctacttacggaattcctcgcctggagaggatattacttgcaaaggaaaggattcgttttgtgattaagaaacatgagcttctgaattcaacacgtgaagatttacagcttgataagccagcttcaggagtaaaggaagaatggtatgccagaatcactaaattaagaaagatggtggatcagcttttctgcaaaaaatttgcggaagccttggggagcactgaagccaaggctgtaccgtaccaaaaatttgaggcacacccgaatgatctgtacgtggaaggactgccagaaaacattcctttccgaagtccctcatggtatggaatcccaaggctggaaaaaatcattcaagtgggcaatcgaattaaatttgttattaaaagaccagaacttctgactcacagtaccactgaagttactcagccaagaacgaatacaccagtcaaggaagattggaatgtcagaattaccaagctacggaagcaagtggaagagatttttaatttgaaatttgctcaagctcttggactcaccgaggcagtaaaagtaccatatcctgtgtttgaatcaaacccggagttcttgtatgtggaaggcttgccagaggggattcccttccgaagccctacctggtttggaattccacgacttgaaaggatcgtccgcgggagtaataaaatcaagttcgttgttaaaaaacctgaactagttatttcctacttgcctcctgggatggctagtaaaataaacactaaagctttgcagtcccccaaaagaccacgaagtcctgggagtaattcaaaggttcctgaaattgaggtcaccgtggaaggccctaataacaacaatcctcaaacctcagctgttcgaaccccgacccagactaacggttctaacgttcccttcaagccacgagggagagagttttcctttgaggcctggaatgccaaaatcacggacctaaaacagaaagttgaaaatctcttcaatgagaaatgtggggaagctcttggccttaaacaagctgtgaaggtgccgttcgcgttatttgagtctttcccggaagacttttatgtggaaggcttacctgagggtgtgccattccgaagaccatcgacttttggcattccgaggctggagaagatactcagaaacaaagccaaaattaagttcatcattaaaaagcccgaaatgtttgagacggcgattaaggagagcacctcctctaagagccctcccagaaaaataaattcatcacccaatgttaatactactgcatcaggtgttgaagaccttaacatcattcaggtgacaattccagatgatgataatgaaagactctcgaaagttgaaaaagctagacagctaagagaacaagtgaatgacctctttagtcggaaatttggtgaagctattggtatgggttttcctgtgaaagttccctacaggaaaatcacaattaaccctggctgtgtggtggttgatggcatgcccccgggggtgtccttcaaagcccccagctacctggaaatcagctccatgagaaggatcttagactctgccgagtttatcaaattcacggtcattagaccatttccaggacttgtgattaataaccagctggttgatcagagtgagtcagaaggccccgtgatacaagaatcagctgaaccaagccagttggaagttccagccacagaagaaataaaagagactgatggaagctctcagatcaagcaagaaccagaccccacgtggtagacctcttccctcctaggcttaaagtatcagtggttgagaagagcttttcggacctgttactaccccaagctgtgtaatatacttgtataacagaaataccttctatacaaacctttttttctacttttagatagaaatgtctactttttcagcagttctgtgaattaaagagcagagtgactgtgggtctggaatggctggtgtacttgggaatgtactatcaggattttacagcaatgctgggaaatgacagggaaaatgacaggaatgaatctcaccagattttttatgtactcagcagagccttgagttacggtgtttattttccaatcaagtgaagatatctcctacttctcctactggaacatctcagcttctgcagtgaagaaaaattcctgtgatagttcagttctttagtttttctatttgaaaaaaaaaaatcatttaaatgatcctttgttcacggctctccttaatgactgagtgaacagttcctatctgtatatttgactaaaccttttcctaagctatctctcatggttcctatgtttttttatcataattaaaagcaaaaccatctggatcacctaacagtcagaggtcagtatctcagcgtgtgaattatagaggaaatacagagagaacctcttccacttttacttttcgtccaaataaaatgcatggtgtaccagaagttgaagatcgggttgaggattggggctagctcgatgacactaaggccccaacatcgcgggacctgctgtggcgcggattcttaggaacgctgttctagccggccccctctccaggggtcgcgtggccggcattatttcctagttcttcttgtaaccctgaggtgccagcgcggggagtgaggaggggtcagggggctaaggatgcaacctctgacgttctgcgccttcctaggagagtcttacatgtgttgagatttcacaagcaatgcgagttgtaaaataccagctctacaagaagctaggctctgtgacggcatagttttcagtagctttatcacaatattcacaatggagaattatatgacatggtagcagaaataggcccttttatgtgttgcttctattttacctcaaattgtagatatagggtaatcaataaaatccatccatgcctttcacacactaaaaagtcgga

SEQ ID NO: 470 - protein, 978 aa, Homo sapiens
MAQVAMSTLPVEDEESSESRMVVTFLMSALESMCKELAKSKAEVACIAVYETDVFVVGTERGRAFVNTRKDFQKDFVKYCVEEEEKAAEMHKMKSTTQANRMSVDAVEIETLRKTVEDYFCFCYGKALGKSTVVPVPYEKMLRDQSAVVVQGLPEGVAFKHPENYDLATLKWILENKAGISFIIKRPFLEPKKHVGGRVMVTDADRSILSPGGSCGPIKVKTEPTEDSGISLEMAAVTVKEESEDPDYYQYNIQGSHHSSEGNEGTEMEVPAEDSTQHVPSETSEDPEVEVTIEDDDYSPPSKRPKANELPQPPVPEPANAGKRKVREFNFEKWNARITDLRKQVEELFERKYAQAIKAKGPVTIPYPLFQSHVEDLYVEGLPEGIPFRRPSTYGIPRLERILLAKERIRFVIKKHELLNSTREDLQLDKPASGVKEEWYARITKLRKMVDQLFCKKFAEALGSTEAKAVPYQKFEAHPNDLYVEGLPENIPFRSPSWYGIPRLEKIIQVGNRIKFVIKRPELLTHSTTEVTQPRTNTPVKEDWNVRITKLRKQVEEIFNLKFAQALGLTEAVKVPYPVFESNPEFLYVEGLPEGIPFRSPTWFGIPRLERIVRGSNKIKFVVKKPELVISYLPPGMASKINTKALQSPKRPRSPGSNSKVPEIEVTVEGPNNNNPQTSAVRTPTQTNGSNVPFKPRGREFSFEAWNAKITDLKQKVENLFNEKCGEALGLKQAVKVPFALFESFPEDFYVEGLPEGVPFRRPSTFGIPRLEKILRNKAKIKFIIKKPEMFETAIKESTSSKSPPRKINSSPNVNTTASGVEDLNIIQVTIPDDDNERLSKVEKARQLREQVNDLFSRKFGEAIGMGFPVKVPYRKITINPGCVVVDGMPPGVSFKAPSYLEISSMRRILDSAEFIKFTVIRPFPGLVINNQLVDQSESEGPVIQESAEPSQLEVPATEEIKETDGSSQIKQEPDPTW

SEQ ID NO: 471 - DNA, 4474 bp, Homo sapiens
aggaggaggagggtgagagagaagctgggagagcagagaaaaggggccaccggtcgcccccccgcttccccgcacgcgctctccagccgcggccgcccgcctgccgcggtcaccccggcctctgcctctgtcccccagtgatcggatcaaggcgctgagcgaggccctgcctgcggggcggccatgcggcggtgacaggagcgcgaccgacacgcacgggcccctcgccccctctcgcctcccgtccgctcgccagctcccctcagccgaggctgctccgcggcggccgcagcccgcgcgcggcccacactcgcctcccctcggcacccccggccccggagctgcctggaggcggccgcactcggggatcatggcccaagttgcaatgtccaccctccccgttgaagatgaggagtcctcggagagcaggatggtggtgacattcctcatgtcagctctcgagtccatgtgtaaagaactggccaagtccaaagccgaagtggcctgcattgcagtgtatgaaacagacgtgtttgtcgtcggaactgaaagaggacgtgcttttgtcaataccagaaaggattttcaaaaagattttgtaaaatattgtgttgaagaagaagaaaaagctgcagagatgcataaaatgaaatctacaacccaggcaaatcggatgagtgtagatgctgtagaaattgaaacactcagaaaaacagttgaggactatttctgcttttgctatgggaaagctttaggcaaatccacagtggtacctgtaccatatgagaagatgctgcgagaccagtcggctgtggtagtgcaggggcttccggaaggtgttgcctttaaacaccccgagaactatgatcttgcaaccctgaaatggattttggagaacaaagcagggatttcattcatcattaagagaccttttttagagccaaagaagcatgtaggtggtcgtgtgatggtaacagatgctgacaggtcaatactatctccaggtggaagttgtggccccatcaaagtgaaaactgaacccacagaagattctggcatttccctggaaatggcagctgtgacagtaaaggaagaatcagaagatcctgattattatcaatataacattcaagcaggcccttctgaaactgatgatgttgatgaaaaacagcccctatcgaagcctttgcaaggaagccaccattcttcagagggcaatgaaggcacagaaatggaagtaccagcagaagatgatgattattctccaccgtctaagagaccaaaggccaatgagctaccgcagccaccagtcccggaacccgccaatgctgggaagcggaaagtgagggagttcaacttcgagaaatggaatgctcgcatcactgatctacgtaaacaagttgaagaattgtttgaaaggaaatatgctcaagccataaaagccaaaggtccggtgacgatcccgtaccctcttttccagtctcatgttgaagatctttatgtagaaggacttcctgaaggaattccttttagaaggccatctacttacggaattcctcgcctggagaggatattacttgcaaaggaaaggattcgttttgtgattaagaaacatgagcttctgaattcaacacgtgaagatttacagcttgataagccagcttcaggagtaaaggaagaatggtatgccagaatcactaaattaagaaagatggtggatcagcttttctgcaaaaaatttgcggaagccttggggagcactgaagccaaggctgtaccgtaccaaaaatttgaggcacacccgaatgatctgtacgtggaaggactgccagaaaacattcctttccgaagtccctcatggtatggaatcccaaggctggaaaaaatcattcaagtgggcaatcgaattaaatttgttattaaaagaccagaacttctgactcacagtaccactgaagttactcagccaagaacgaatacaccagtcaaggaagattggaatgtcagaattaccaagctacggaagcaagtggaagagatttttaatttgaaatttgctcaagctcttggactcaccgaggcagtaaaagtaccatatcctgtgtttgaatcaaacccggagttcttgtatgtggaaggcttgccagaggggattcccttccgaagccctacctggtttggaattccacgacttgaaaggatcgtccgcgggagtaataaaatcaagttcgttgttaaaaaacctgaactagttatttcctacttgcctcctgggatggctagtaaaataaacactaaagctttgcagtcccccaaaagaccacgaagtcctgggagtaattcaaaggttcctgaaattgaggtcaccgtggaaggccctaataacaacaatcctcaaacctcagctgttcgaaccccgacccagactaacggttctaacgttcccttcaagccacgagggagagagttttcctttgaggcctggaatgccaaaatcacggacctaaaacagaaagttgaaaatctcttcaatgagaaatgtggggaagctcttggccttaaacaagctgtgaaggtgccgttcgcgttatttgagtctttcccggaagacttttatgtggaaggcttacctgagggtgtgccattccgaagaccatcgacttttggcattccgaggctggagaagatactcagaaacaaagccaaaattaagttcatcattaaaaagcccgaaatgtttgagacggcgattaaggagagcacctcctctaagagccctcccagaaaaataaattcatcacccaatgttaatactactgcatcaggtgttgaagaccttaacatcattcaggtgacaattccagatgatgataatgaaagactctcgaaagttgaaaaagctagacagctaagagaacaagtgaatgacctctttagtcggaaatttggtgaagctattggtatgggttttcctgtgaaagttccctacaggaaaatcacaattaaccctggctgtgtggtggttgatggcatgcccccgggggtgtccttcaaagcccccagctacctggaaatcagctccatgagaaggatcttagactctgccgagtttatcaaattcacggtcattagaccatttccaggacttgtgattaataaccagctggttgatcagagtgagtcagaaggccccgtgatacaagaatcagctgaaccaagccagttggaagttccagccacagaagaaataaaagagactgatggaagctctcagatcaagcaagaaccagaccccacgtggtagacctcttccctcctaggcttaaagtatcagtggttgagaagagcttttcggacctgttactaccccaagctgtgtaatatacttgtataacagaaataccttctatacaaacctttttttctacttttagatagaaatgtctactttttcagcagttctgtgaattaaagagcagagtgactgtgggtctggaatggctggtgtacttgggaatgtactatcaggattttacagcaatgctgggaaatgacagggaaaatgacaggaatgaatctcaccagattttttatgtactcagcagagccttgagttacggtgtttattttccaatcaagtgaagatatctcctacttctcctactggaacatctcagcttctgcagtgaagaaaaattcctgtgatagttcagttctttagtttttctatttgaaaaaaaaaaatcatttaaatgatcctttgttcacggctctccttaatgactgagtgaacagttcctatctgtatatttgactaaaccttttcctaagctatctctcatggttcctatgtttttttatcataattaaaagcaaaaccatctggatcacctaacagtcagaggtcagtatctcagcgtgtgaattatagaggaaatacagagagaacctcttccacttttacttttcgtccaaataaaatgcatggtgtaccagaagttgaagatcgggttgaggattggggctagctcgatgacactaaggccccaacatcgcgggacctgctgtggcgcggattcttaggaacgctgttctagccggccccctctccaggggtcgcgtggccggcattatttcctagttcttcttgtaaccctgaggtgccagcgcggggagtgaggaggggtcagggggctaaggatgcaacctctgacgttctgcgccttcctaggagagtcttacatgtgttgagatttcacaagcaatgcgagttgtaaaataccagctctacaagaagctaggctctgtgacggcatagttttcagtagctttatcacaatattcacaatggagaattatatgacatggtagcagaaataggcccttttatgtgttgcttctattttacctcaaattgtagatatagggtaatcaataaaatccatccatgcctttcacacactaaaaagtcgga

SEQ ID NO: 472 - protein, 977 aa, Homo sapiens
MAQVAMSTLPVEDEESSESRMVVTFLMSALESMCKELAKSKAEVACIAVYETDVFVVGTERGRAFVNTRKDFQKDFVKYCVEEEEKAAEMHKMKSTTQANRMSVDAVEIETLRKTVEDYFCFCYGKALGKSTVVPVPYEKMLRDQSAVVVQGLPEGVAFKHPENYDLATLKWILENKAGISFIIKRPFLEPKKHVGGRVMVTDADRSILSPGGSCGPIKVKTEPTEDSGISLEMAAVTVKEESEDPDYYQYNIQAGPSETDDVDEKQPLSKPLQGSHHSSEGNEGTEMEVPAEDDDYSPPSKRPKANELPQPPVPEPANAGKRKVREFNFEKWNARITDLRKQVEELFERKYAQAIKAKGPVTIPYPLFQSHVEDLYVEGLPEGIPFRRPSTYGIPRLERILLAKERIRFVIKKHELLNSTREDLQLDKPASGVKEEWYARITKLRKMVDQLFCKKFAEALGSTEAKAVPYQKFEAHPNDLYVEGLPENIPFRSPSWYGIPRLEKIIQVGNRIKFVIKRPELLTHSTTEVTQPRTNTPVKEDWNVRITKLRKQVEEIFNLKFAQALGLTEAVKVPYPVFESNPEFLYVEGLPEGIPFRSPTWFGIPRLERIVRGSNKIKFVVKKPELVISYLPPGMASKINTKALQSPKRPRSPGSNSKVPEIEVTVEGPNNNNPQTSAVRTPTQTNGSNVPFKPRGREFSFEAWNAKITDLKQKVENLFNEKCGEALGLKQAVKVPFALFESFPEDFYVEGLPEGVPFRRPSTFGIPRLEKILRNKAKIKFIIKKPEMFETAIKESTSSKSPPRKINSSPNVNTTASGVEDLNIIQVTIPDDDNERLSKVEKARQLREQVNDLFSRKFGEAIGMGFPVKVPYRKITINPGCVVVDGMPPGVSFKAPSYLEISSMRRILDSAEFIKFTVIRPFPGLVINNQLVDQSESEGPVIQESAEPSQLEVPATEEIKETDGSSQIKQEPDPTW

SEQ ID NO: 473 - DNA, 1062 bp, Homo sapiens
atggagggggcacggaagacactcaaatgtaagcagcattgctaccaccggcaaggcacgaggacgatgccaaactggagggggaagtggagggagaaagacataggaggaaaaggcttcttgtccctgcccctacgagctcaacacccaaacaggccccgcggggcaggcgcgccgggccggcccgggacaaagcccactgcggactccacctgggagcggggcggggcgggggacagcgctcccgctcccccgcccgccgcagttaccaggcaacgcgcggccccgcccccgcgccggttggccaatcccgcgcgtctgctgccccggcgcaggagccccagatacaccaggcgagcgcgaccccacgacggctcgggcctggcaccgcgcgcgcccccgcaccgcctagccggccaatcagcgcggcggggcatgcgcagcccgcagggccgctcgctcgctcgcgcgcgggatcgcacgcgcgaggcgcccccccaccgcacgccggtcggcgcgcgcgcccctcccccacgcgcactgaggcgcgcgcgtgccactgtcgtcccccgcgaccgcgtccgtgccgccccacccccatcgcctcgtttcggccactgccaaggccggcggggctcgagacccggcgaggcggtgggggtgggggtagggggaggcggcacgggcgccccccaaggccccacaccgcgcgcggcgggccgcggctcccaggcccctgtccctgcaggccccggcggggcaaagtctctaataaaggcccccgctcgcaatggcccccgaggcgggggcggggggcgcggggatgaggcgagagggactcacccgagtgcggccgcctccaggcagctccggggccgggggtgccgaggggaggcgagtgtgggccgcgcgcgggctgcggccgccgcggagcagcctcggctgaggggagctggcgagcggacgggaggcgagagggggcgaggggcccgtgcgtgtcggtcgcgctcctgtcaccgccgcatggccgccccgcaggcagggcctcgctcagcgccttga

SEQ ID NO: 474 - protein, 353 aa, Homo sapiens
MEGARKTLKCKQHCYHRQGTRTMPNWRGKWREKDIGGKGFLSLPLRAQHPNRPRGAGAPGRPGTKPTADSTWERGGAGDSAPAPPPAAVTRQRAAPPPRRLANPARLLPRRRSPRYTRRARPHDGSGLAPRAPPHRLAGQSARRGMRSPQGRSLARARDRTREAPPHRTPVGARAPPPRALRRARATVVPRDRVRAAPPPSPRFGHCQGRRGSRPGEAVGVGVGGGGTGAPQGPTPRAAGRGSQAPVPAGPGGAKSLIKAPARNGPRGGGGGRGDEARGTHPSAAASRQLRGRGCRGEASVGRARAAAAAEQPRLRGAGERTGGERGRGARACRSRSCHRRMAAPQAGPRSAP

SEQ ID NO: 475 - DNA, 3161 bp, Homo sapiens
agcgaccgcagccggggggacgcgggaggatggagcaagtggagatcctgaggaaattcatccagagggtccaggccatgaagagtcctgaccacaatggggaggacaacttcgcccgggacttcatgcggttaagaagattgtctaccaaatatagaacagaaaagatatatcccacagccactggagaaaaagaagaaaatgttaaaaagaacagatacaaggacatactgccatttgatcacagccgagttaaattgacattaaagactccttcacaagattcagactatatcaatgcaaattttataaagggcgtctatgggccaaaagcatatgtagcaactcaaggacctttagcaaatacagtaatagatttttggaggatgatatgggagtataatgttgtgatcattgtaatggcctgccgagaatttgagatgggaaggaaaaaatgtgagcgctattggcctttgtatggagaagaccccataacgtttgcaccatttaaaatttcttgtgaggatgaacaagcaagaacagactacttcatcaggacactcttacttgaatttcaaaatgaatctcgtaggctgtatcagtttcattatgtgaactggccagaccatgatgttccttcatcatttgattctattctggacatgataagcttaatgaggaaatatcaagaacatgaagatgttcctatttgtattcattgcagtgcaggctgtggaagaacaggtgccatttgtgccatagattatacgtggaatttactaaaagctgggaaaataccagaggaatttaatgtatttaatttaatacaagaaatgagaacacaaaggcattctgcagtacaaacaaaggagcaatatgaacttgttcatagagctattgcccaactgtttgaaaaacagctacaactatatgaaattcatggagctcagaaaattgctgatggagtgaatgaaattaacactgaaaacatgatcagctccatagagcctgaaaaacaagattctcctcctccaaaaccaccaaggacccgcagttgccttgttgaaggggatgctaaagaagaaatactgcagccaccggaacctcatccagtgccacccatcttgacaccttctcccccttcagcttttccaacagtcactactgtgtggcaggacaatgatagataccatccaaagccagtgttgcatatggtttcatcagaacaacattcagcagacctcaacagaaactatagtaaatcaacagaacttccagggaaaaatgaatcaacaattgaacagatagataaaaaattggaacgaaatttaagttttgagattaagaaggtccctctccaagagggaccaaaaagttttgatgggaacacacttttgaataggggacatgcaattaaaattaaatctgcttcaccttgtatagctgataaaatctctaagccacaggaattaagttcagatctaaatgtcggtgatacttcccagaattcttgtgtggactgcagtgtaacacaatcaaacaaagtttcagttactccaccagaagaatcccagaattcagacacacctccaaggccagaccgcttgcctcttgatgagaaaggacatgtaacgtggtcatttcatggacctgaaaatgccatacccatacctgatttatctgaaggcaattcctcagatatcaactatcaaactaggaaaactgtgagtttaacaccaagtcctacaacacaagttgaaacacctgatcttgtggatcatgataacacttcaccactcttcagaacacccctcagttttactaatccacttcactctgatgactcagactcagatgaaagaaactctgatggtgctgtgacccagaataaaactaatatttcaacagcaagtgccacagtttctgctgccactagtactgaaagcatttctactaggaaagtattgccaatgtccattgctagacataatatagcaggaacaacacattcaggtgctgaaaaagatgttgatgttagtgaagattcacctcctcccctacctgaaagaactcctgaatcgtttgtgttagcaagtgaacataatacacctgtaagatcggaatggagtgaacttcaaagtcaggaacgatctgaacaaaaaaagtctgaaggcttgataacctctgaaaatgagaaatgtgatcatccagcgggaggtattcactatgaaatgtgcatagaatgtccacctactttcagtgacaagagagaacaaatatcagaaaatccaacagaagccacagatattggttttggtaatcgatgtggaaaacccaaaggaccaagagatccaccttcagaatggacatgattcagggagctagaagacactttaagttatactggaaaattcaggtgccactgaaagccagatttatagtattccatctttaatatgtgggactaacagcagtgtagattgttaccttaatattttttgctgggaccatctacctgccttatactacacttaggaaaaagtattacatatggtttattttgaaacttcaagtattattgccttaatgtctcttaaccctgttacacgctgcttgtagacatgttaatatagtaatacctttatgatatattgagtttaaggactactctttttctgttttatcatgtatgcattattttgtatatgtacagggcaagtaggtatataatttgataaagttgcaattgaaatattattaacagaagatgtaagaaatttctgcatggtctaaatctttgtgtactttatttgtaaattatttgccctggagttttagaaaatagtttctgaattttaaacttgctggattcatgcagccagctttgcaggttatcagagatcaaagattgtaataataattttgtaaattgtaagcaaaaagttatttttatattatatacagtctaattgttcatcctaattgttcctgttttcatctagtcagagattcagtaagtgccttggaacaatattgaattctcttagcttgtgtgtgtttctttaatatttgaactcaagtgggattagaagactatcaaaatacatgtatgtttcaggatatttgacctgtcattaaaaaaaacaaacagttttacagtg

SEQ ID NO: 476 - protein, 780 aa, Homo sapiens
MEQVEILRKFIQRVQAMKSPDHNGEDNFARDFMRLRRLSTKYRTEKIYPTATGEKEENVKKNRYKDILPFDHSRVKLTLKTPSQDSDYINANFIKGVYGPKAYVATQGPLANTVIDFWRMIWEYNVVIIVMACREFEMGRKKCERYWPLYGEDPITFAPFKISCEDEQARTDYFIRTLLLEFQNESRRLYQFHYVNWPDHDVPSSFDSILDMISLMRKYQEHEDVPICIHCSAGCGRTGAICAIDYTWNLLKAGKIPEEFNVFNLIQEMRTQRHSAVQTKEQYELVHRAIAQLFEKQLQLYEIHGAQKIADGVNEINTENMISSIEPEKQDSPPPKPPRTRSCLVEGDAKEEILQPPEPHPVPPILTPSPPSAFPTVTTVWQDNDRYHPKPVLHMVSSEQHSADLNRNYSKSTELPGKNESTIEQIDKKLERNLSFEIKKVPLQEGPKSFDGNTLLNRGHAIKIKSASPCIADKISKPQELSSDLNVGDTSQNSCVDCSVTQSNKVSVTPPEESQNSDTPPRPDRLPLDEKGHVTWSFHGPENAIPIPDLSEGNSSDINYQTRKTVSLTPSPTTQVETPDLVDHDNTSPLFRTPLSFTNPLHSDDSDSDERNSDGAVTQNKTNISTASATVSAATSTESISTRKVLPMSIARHNIAGTTHSGAEKDVDVSEDSPPPLPERTPESFVLASEHNTPVRSEWSELQSQERSEQKKSEGLITSENEKCDHPAGGIHYEMCIECPPTFSDKREQISENPTEATDIGFGNRCGKPKGPRDPPSEWT

SEQ ID NO: 477 - DNA, 3220 bp, Homo sapiens
ccgcgccggctagcggaggagagtaaatacaacaggagcgcaaaatggcggaaccgccgagccccgtgcactgtgtcgctgccgcggcccccaccgccaccgtctcggagaaagaaccgtttggcaagctgcaactctcctcccgggaccctccgggttctctgtccgccaagaaggtccggactgaggagaagaaggcaccgcggagagtgaacggagaagggggcagcggcgggaacagcaggcagctgcagccgccggcagcaccttcgcctcagagctatggcagccccgcgtcttggagctttgcccctctgtctgctgctccctccccgtcctcttctcggagcagtttctctttctccgctggcacggccgttccctcctcagcctccgcttccttgtctcagccggtgccgcgcaaactgctggtccctcctacgctgctgcacgctcagcctcaccatctcctcctgcccgccgccgccgccgctgcctcggctaacgccaagtcgcgcagacctaaggagaagcgggagaaggagaggaggaggcacggtctcggtggggcccgagaggccggcggggcctcccgggaggagaacggggaggtgaagccgctgccccgagataaaatcaaagacaaaattaaagagagagacaaagaaaaagaaagagaaaaaaagaaacataaagtaatgaatgagatcaagaaagagaatggagaagtaaagattttgctgaaaagtgggaaggagaaaccaaaaacaaatatagaagacttacaaattaaaaaggtaaagaagaaaaagaaaaagaaacacaaagagaatgaaaaacggaagcgtccgaaaatgtatagcaaatctattcagaccatctgctcaggattgctaactgatgttgaagatcaagcagccaaaggcatcctaaatgataacataaaagattacgttgggaagaatttggataccaagaactatgattccaaaattccagagaacagtgagtttccatttgtctcattaaaggagccacgagttcagaataacctcaaaaggttggacactttggaatttaaacaactcattcatatagagcaccagcctaatggaggtgcatcggttatccatgcctacagtaacgaactctcccacctgtctcctatggagatggagaggtttgcagaagagtttgtgggtctagtgttcagtgaaaatgaaaactctgcagctttctacgtgatgggtattgttcatggggcagctacttatttacctgactttttagactatttttcatttaattttcccaattcaccagtgaaaatggagatattgggaaagaaagatatagagacaacgactatgtccaattttcatgctcaggtaaaaagaacgtattctcatggtacttacagagctggcccaatgagacaaataagcttggtgggagcagttgatgaagaagtaggagattatttccctgagttccttgacatgttggaagagtcaccatttttaaaatgtacactgccatgggggacgctatctagtctaaaattacagagtcgaaaagatagtgatgatggtcccatcatgtgggttcgtccaggagaacaaatgatccctgtggctgatatgccaaagtcacctttcaaaaggaaaagaactaccaatgaaataaaaaatcttcagtacctacctcgaacaagtgagccccgtgagatgctctttgaagacaggacaagagctcatgcagatcatataggacaaggttttgaacgacagactacagctgctgttggagtgctgaaggctgtgcactgtggagagtggcctgatcaaccccgtataaccaaagatgtaatttgttttcatgctgaagatttcttagaagtagttcaacgaatgcagttagatttacatgaacctccactgtcccagtgtgtccaatgggttgatgatgcaaaactgaatcaactgaggagggaaggcattcgctatgccaggattcagctatatgataatgacatttattttattccaaggaatgttgttcatcagttcaagacagtttcagctgtatgcagtttagcatggcatattcggctcaaattatatcactcagaggaggacacttctcagaatacagctactcatgaaacaggcacatcatcagattccacatcatctgttcttggacctcacactgacaacatgatttgtgctgtaagcaaagcctccttggattctgttttttcagataaacttcattctaaatatgaattacagcagattaaacatgaacctattgcatctgtaagaatcaaggaagaacctgtgaatgttaatattcctgaaaagactacagcactgaataatatggatggcaagaatgttaaagcaaaattggatcatgttcaatttgcagaatttaagattgacatggattctaaatttgaaaatagcaacaaagatttaaaggaagaattgtgccctggaaatctaagtctagttgatacaaggcaacacagttcagcacattcaaatcaagataaaaaagacgatgacattttgtgctaaatttgcatataccatctaaaatccttttttaaaaaaatttaatgtaataaagattcatgaattctgaaagcaagccaaggacttgctcctatgtctgttacaaaacatagtttatgtagctttgtaacattcctcagtgcctgtccataactgtgaagtattaagcacttagggccagatgcactgtaaacattgcaggtttaaacataaaggagtctttaaaaaaaaatcatttacgttggaattttaggttttagaatagagctgacattaacatatatatatatatataaatatatatatatattttgtaatatgagccagaattctttttcaacaatttaaagcttttccatagagcttatttatatccttttttttcattttaaatgtgtcagcactgtagtgtaaatagcttttaaatatctttttagtgtgatttatactgaaatgtgagccacttaataaaggttcatatgttcatattaataaatatgttttctgttgagtctgtaaagacaaactgacaattcatttaagtcatttgataatgattctctgctggtatatctatttagtgtggtattgtagtgcaaatgtacgtaattcaaatctagtaaatatttaagttcctc

SEQ ID NO: 478 - protein, 846 aa, Homo sapiens
MAEPPSPVHCVAAAAPTATVSEKEPFGKLQLSSRDPPGSLSAKKVRTEEKKAPRRVNGEGGSGGNSRQLQPPAAPSPQSYGSPASWSFAPLSAAPSPSSSRSSFSFSAGTAVPSSASASLSQPVPRKLLVPPTLLHAQPHHLLLPAAAAAASANAKSRRPKEKREKERRRHGLGGAREAGGASREENGEVKPLPRDKIKDKIKERDKEKEREKKKHKVMNEIKKENGEVKILLKSGKEKPKTNIEDLQIKKVKKKKKKKHKENEKRKRPKMYSKSIQTICSGLLTDVEDQAAKGILNDNIKDYVGKNLDTKNYDSKIPENSEFPFVSLKEPRVQNNLKRLDTLEFKQLIHIEHQPNGGASVIHAYSNELSHLSPMEMERFAEEFVGLVFSENENSAAFYVMGIVHGAATYLPDFLDYFSFNFPNSPVKMEILGKKDIETTTMSNFHAQVKRTYSHGTYRAGPMRQISLVGAVDEEVGDYFPEFLDMLEESPFLKCTLPWGTLSSLKLQSRKDSDDGPIMWVRPGEQMIPVADMPKSPFKRKRTTNEIKNLQYLPRTSEPREMLFEDRTRAHADHIGQGFERQTTAAVGVLKAVHCGEWPDQPRITKDVICFHAEDFLEVVQRMQLDLHEPPLSQCVQWVDDAKLNQLRREGIRYARIQLYDNDIYFIPRNVVHQFKTVSAVCSLAWHIRLKLYHSEEDTSQNTATHETGTSSDSTSSVLGPHTDNMICAVSKASLDSVFSDKLHSKYELQQIKHEPIASVRIKEEPVNVNIPEKTTALNNMDGKNVKAKLDHVQFAEFKIDMDSKFENSNKDLKEELCPGNLSLVDTRQHSSAHSNQDKKDDDILC

SEQ ID NO: 479 - DNA, 883 bp, Homo sapiens
ctgagagatcctctaccgcagtcgtttgaggaggcggaactgaagttttttcttaattatcatgtgacggggttctggatttaatggggggaaaagggcggaaaaggacaaggatccaaactggcgaatttgctgatcttcgcgtccctctccgctttccggccggcagcgctgccagggtatatttccttttttccgatcctgcaacagcctctttaaactgtttaaatgagaatgtccttggctcagagagtactactcacctggcttttcacactactcttcttgatcatgttggtgttgaaactggatgagaaagcaccttggaactggttcctcatattcattccagtctggatatttgatactatccttcttgtcctgctgattgtgaaaatggctgggcggtgtaagtctggctttgaccctcgacatggatcacacaatattaaaaaaaaagcctggtacctcattgcaatgttacttaaattagccttctgcctcgcactctgtgctaaactggaacagtttactaccatgaatctatcctatgtcttcattcctttatgggccttgctggctggggctttaacagaactcggatataatgtcttttttgtgagagactgacttctaagtacatcatctcctttctattgctgttcaacaagttaccattaaagtgttctgaatctgtcaagcttcaagaataccagagaactgagggaaaataccaaatgtagttttatactacttccataaaacaggattggtgaatcacggacttctagtcaacctacagcttaattattcagcatttgagttattgagatccttattatctctatgtaaataaagtttgttttggacctcaaaaaaaaaa

SEQ ID NO: 480 - protein, 133 aa, Homo sapiens
MRMSLAQRVLLTWLFTLLFLIMLVLKLDEKAPWNWFLIFIPVWIFDTILLVLLIVKMAGRCKSGFDPRHGSHNIKKKAWYLIAMLLKLAFCLALCAKLEQFTTMNLSYVFIPLWALLAGALTELGYNVFFVRD

SEQ ID NO: 481 - DNA, 6880 bp, Homo sapiens
agccttgagtgtcattcaagggacagcacaacctcatccaagctctcctacctctgcccagccgtccctctcatcctccccattcctcgtccacactccatccaaagaagagggaaagcaccgaatagaggggggcgaaggcaaagtctgctgttcttccccctgggcccccttgctcctccatcctcattctctcaccaccagcccccctaaccccaaggagcccaggaactgaggcgactcgccccactgccatgtccaaaagcttgaaaaagaaaagccactggactagcaaagtccatgagagtgtcattggcaggaacccggagggccagctgggctttgaactgaaggggggcgccgagaatggacagttcccctacctgggggaggtgaagcccggcaaggtggcctatgagagcggcagcaaattggtgtcggaggagctgctgctggaggtgaacgagacccccgtggcggggctcaccatcagggacgtgctggccgtgatcaaacactgcaaggaccccctccggctcaagtgtgtcaagcaaggaggaattgttgataaagaccttcgtcactacctcaacttacgatttcaaaagggttctgtggaccatgagcttcagcaaatcattcgtgacaacctctacctccgcacggtgccatgcaccacaaggccacataaggagggtgaggtccctggagtggattatattttcatcactgttgaagattttatggaattggagaaaagtggtgctctcctagaaagtgggacttatgaagacaattactacggtaccccaaagccgccagcagaaccagcaccattattgttaaatgtaacagaccagatacttccaggagccactccaagtgctgaaggaaaacggaagaggaataaatcagtgagcaacatggagaaagccagtatagagcctcctgaggaggaagaggaagagaggcctgtggtcaatggaaatggagtagtagtaacaccagaatccagtgaacatgaagacaaaagtgcaggtgcctcaggggagatgccctcccagccttatcctgcaccagtgtacagtcagcctgaggagctgaaggagcagatggatgacacaaagccaactaaacctgaagacaatgaggaaccagacccattgcctgataactgggaaatggcctatacagagaagggcgaagtctacttcattgaccataacacaaagacaacatcatggctggatccacgacttgcgaaaaaggctaaacctccagaagagtgcaaagaaaatgagcttccatatggctgggaaaaaatcgatgatcccatttatggcacttattatgttgaccacataaatagaagaacacagtttgaaaatcctgtcctggaagcaaaaaggaagctacagcaacataacatgccccacacagaacttggaacaaagcccctgcaggccccaggtttccgagaaaaaccactcttcacccgggatgcatcccagttgaagggaacattcctcagcaccaccctaaaaaagagcaacatgggctttggatttaccatcattggtggagacgagcctgatgagtttctgcaggtgaaaagtgtgattccggatgggcctgcagcacaggatggaaaaatggaaacaggtgatgtcattgtctatattaatgaagtttgtgtccttggacacactcatgcagatgttgtcaaacttttccagtctgttcctattggtcagagtgtcaacctggtgttgtgtcgtggctaccctttgccctttgatcctgaagaccctgctaacagcatggtgccaccccttgcaataatggagaggccacctccagtgatggtcaatggaagacacaactatgaaacatatttggagtacatttctcggacctcacagtcagttccagatataacagatcggccgcctcattctctgcactccatgccaactgatggtcagctagacggcacgtatccaccgcccgtccatgatgacaatgtgtctatggcttcatctggggccacccaagctgaacttatgaccttaaccattgtgaaaggtgcccagggcttcggcttcactattgccgacagtcctacaggacagcgggtgaaacaaatacttgacattcagggatgccctggcctgtgtgaaggcgacctcattgttgagatcaaccagcagaatgtacagaacctgagccatacagaagtagtggatatacttaaggactgtcccattggaagtgaaacttctttgattatccatcgaggaggtttcttttctccatggaaaactccaaagcctataatggaccgatgggagaatcaaggcagtcctcaaacgagtttatctgctccggccataccgcagaacctgcccttcccacctgcccttcacaggagctcctttcctgactcaacagaggcctttgacccacggaagcctgatccatatgagctctacgagaaatctagggccatttatgaaagtaggcaacaagtgccacccaggaccagttttcgaatggattcctctggtccagattataaggaattggatgttcatcttcggaggatggagtctggatttggcttcagaatcctcgggggagatgagcctggacagcctattttgattggagctgtcattgccatgggctcagccgacagagatggccgccttcacccaggagatgagcttgtgtatgttgatgggattccagtagccggcaaaacccaccgctatgtcatcgacctcatgcaccacgcagcccgcaatgggcaggtcaacctcactgtgagaagaaaggtgctatgtggaggggagccctgcccagagaacgggagaagtccaggctctgtatccacccaccacagctctccacgcagtgactacgcaacctacaccaacagcaaccacgctgcccccagtagcaatgcctctccccctgaaggcttcgcctcccacagcctgcagaccagtgatgtggtcattcaccgcaaagagaatgagggcttcggctttgtcatcatcagctccctgaacaggcctgagtctggatccactataactgtgccccataaaatcggacgcatcattgatgggagtcctgcagatcgctgtgcaaaactaaaagtgggagaccggatcctagcagtgaatggccagtctatcatcaacatgcctcacgctgacatcgtgaagctcatcaaggatgcaggtcttagtgtcacccttcgcatcattcctcaggaggagctcaacagccccacctcggcacccagctcagagaagcagagtcccatggcgcagcagagtcccctggcacagcagagtcccctggcccagccaagcccagccacccccaacagccccatcgcccagccagcaccacctcaaccacttcagctgcaaggacacgaaaatagttacaggtcggaagtgaaagcaaggcaagatgtgaaaccagacatccgacagcctccattcacagactacaggcagcccccgctggattacaggcaacccccaggaggggactaccagcagcccccacccttggactacaggcagcctcccctactggactacaggcagcactcccccgacaccaggcagtaccctctgtcggactacagacaaccccaggattttgattatttcactgtggacatggagaaaggagccaaaggatttggattcagcattcgtggaggaagggaatacaaaatggatttgtatgtgttgagactggcagaagatggaccagcaataaggaatgggaggatgagggtaggagatcaaatcattgaaatcaatggggaaagcacaagggacatgacacatgccagagcaatagaactcatcaaatctggaggaagacgagtgaggctgctgctcaagagaggcacgggacaggtcccagaatatgacgaacccgccccctggagttctcccgctgccgccgccccaggtctgccggaagtaggcgtctccctggacgacggcctcgctccattctctccatcacatccagccccaccctccgacccttcccaccagataagcccaggcccaacttgggatatcaaacgggaacacgacgttaggaaaccaaaggagctttcagcctgcggccagaagaagcagcgcctcggggagcagagggagcgctcggcgagtccgcagagggccgcgcggccgaggctcgaggaggcgcccggcggccaggggcggcccgaggccggcaggcccgcctcggaggccagggcgcccgggctcgcggcggcagacgcggcggacgcggcgcgggcgggcgggaaggaggcgccccgtgcggcggcgggctccgagctctgccggcgcgaaggcccgggggctgcgccggcgtttgccggcccgggcggcggcggcagcggcgcgctggaggccgagggcagggcgggtgcgcgcgcgggtccccggccgggcccgcgacccccggggggcgccccggcgcgcaaggccgccgtcgcgccggggccctggaaggtgccgggttctgacaagctgcccagcgtcctcaaacccggcgcctcggccgccagcagatgagccgcgcggccacggccaacccgcccgccccggcgcaggcagttcttcttaggttccgtctcacggcgttttaatttattttcactgtcacacgcatagatccacgaggcaccaaggcctgggagcatcgacgtgaagtcccacgtgtccggtgtgcttgggcggcatcgcatcaacgcgcagacctaaactgatcctaaagcccccggttcccttgtgggggctttggcagctatggaagaaccaaaataacgtgaagaacatcacagagagacagtgcagtgtagctttagtttaagaaaaaaaaatattcctccccactgcatgaaggacttggatgtcatccaaactttatatcaagaaacaggacaaagttaagagcaatcacaaactggaatatcgccttaaaaatcaaactgcacggagcaagctgaaactgagacaagattatatcttttaattgatctaaagcgttgtaaataaattgttctcgacatatctagacaggggttaaagggtttctttgacacattcggaaccgttcacccatgacatgtttccatggctcacccttggcatccatcctcggtgttagcagcagcgttccctgcctcctgcaggatgacttagaaatctagtgagtttcttggtgtgatgccatttttattgccctttctgtgatcaaatcatatttctgtacattttcagtggtagaaaaaaaaggttttaaaaattgtatcctagggaacagtttgccataagtcagaattttgcagtttagctcatagatcttaattggtttttctctaaaatatgaattttataattgaaggaccacaatttgtttaatcaagataggcaacgctgcagttcctttatgaagaggcttttctgtcgtcccaggctagcagagatggatagcttctttgtcagcaatgtgatttcacttattttattgtcttattttaaaccctgtctccatgacttcatttgcactttgacagagcagaggcagagtatttgtcttatatttctcagattataatattaaaaaattacaatcaatttattttcattaaagaacgtgagtctttttagcattcctttctgcttatccttctttccttaccctttgtccttttgtttccattagttttctttcgtcttgtattccttgccactttattttgttagcaacttctagatgtttatcttcatggatctatgattgacctcctagtaaaattctaagtcttgcctttcttccctgctgttttagcatttctttgtaaaatgttagcttcaattaattagccattggtacttactgtagctacacatattaaaaggcaaagtgtttctgaaggcaatttctttttaatatgcccgaatgaatgaggcttcatcctttccatattcttactctttacaggagttcaaatgcaaataagctccacctccctgcacttgtagtctaaaaagtaaaaggggcgatcaggtccatctcaaaggtcacacgtaatagcctccctgggctgatcattccctctccttgtaattgcagtatcctgagtagcagtttaattttcatcaaacatcggagtagtttagttgtttgacaggaggagaataaggctgaaagcctcaagtgaaggatcttgcagcttgtaaaagcaatttccaaaaatgaaacccattcatcgtaaacaaaagcacaaacacttgtagcagtttataatgcttttggtttaatctcaattagtctttctcccctggactagaaatccagtatagtttgccattaatttattgaatctggttttggacaatgcttctgtagtgtagctgcacgtcctggtactgtatcctctgactttattttccatgtattacaaaaggaaaaaaaaattgagattacactggcataaactctagtttgcacagttcacagctactacttgtgcagtaattgctttatgcggctgtaatccataacctgtgaagacagcacatcatctaaatcccattccaaataatatttgtgtagtgttagctgtgaatttaccctgtacagctgtatctctataaatataattccatgtattaatagtcacagaaagactgtaagtgagcaactatttttatgaaacgtaccactatggataaattaacttttacagaaatcttgtttactgtatgatattctaaaacactgtcaaataaaatatatatccaaaaatcttttctttttccaacta

SEQ ID NO: 482 - protein, 1455 aa, Homo sapiens
MSKSLKKKSHWTSKVHESVIGRNPEGQLGFELKGGAENGQFPYLGEVKPGKVAYESGSKLVSEELLLEVNETPVAGLTIRDVLAVIKHCKDPLRLKCVKQGGIVDKDLRHYLNLRFQKGSVDHELQQIIRDNLYLRTVPCTTRPHKEGEVPGVDYIFITVEDFMELEKSGALLESGTYEDNYYGTPKPPAEPAPLLLNVTDQILPGATPSAEGKRKRNKSVSNMEKASIEPPEEEEEERPVVNGNGVVVTPESSEHEDKSAGASGEMPSQPYPAPVYSQPEELKEQMDDTKPTKPEDNEEPDPLPDNWEMAYTEKGEVYFIDHNTKTTSWLDPRLAKKAKPPEECKENELPYGWEKIDDPIYGTYYVDHINRRTQFENPVLEAKRKLQQHNMPHTELGTKPLQAPGFREKPLFTRDASQLKGTFLSTTLKKSNMGFGFTIIGGDEPDEFLQVKSVIPDGPAAQDGKMETGDVIVYINEVCVLGHTHADVVKLFQSVPIGQSVNLVLCRGYPLPFDPEDPANSMVPPLAIMERPPPVMVNGRHNYETYLEYISRTSQSVPDITDRPPHSLHSMPTDGQLDGTYPPPVHDDNVSMASSGATQAELMTLTIVKGAQGFGFTIADSPTGQRVKQILDIQGCPGLCEGDLIVEINQQNVQNLSHTEVVDILKDCPIGSETSLIIHRGGFFSPWKTPKPIMDRWENQGSPQTSLSAPAIPQNLPFPPALHRSSFPDSTEAFDPRKPDPYELYEKSRAIYESRQQVPPRTSFRMDSSGPDYKELDVHLRRMESGFGFRILGGDEPGQPILIGAVIAMGSADRDGRLHPGDELVYVDGIPVAGKTHRYVIDLMHHAARNGQVNLTVRRKVLCGGEPCPENGRSPGSVSTHHSSPRSDYATYTNSNHAAPSSNASPPEGFASHSLQTSDVVIHRKENEGFGFVIISSLNRPESGSTITVPHKIGRIIDGSPADRCAKLKVGDRILAVNGQSIINMPHADIVKLIKDAGLSVTLRIIPQEELNSPTSAPSSEKQSPMAQQSPLAQQSPLAQPSPATPNSPIAQPAPPQPLQLQGHENSYRSEVKARQDVKPDIRQPPFTDYRQPPLDYRQPPGGDYQQPPPLDYRQPPLLDYRQHSPDTRQYPLSDYRQPQDFDYFTVDMEKGAKGFGFSIRGGREYKMDLYVLRLAEDGPAIRNGRMRVGDQIIEINGESTRDMTHARAIELIKSGGRRVRLLLKRGTGQVPEYDEPAPWSSPAAAAPGLPEVGVSLDDGLAPFSPSHPAPPSDPSHQISPGPTWDIKREHDVRKPKELSACGQKKQRLGEQRERSASPQRAARPRLEEAPGGQGRPEAGRPASEARAPGLAAADAADAARAGGKEAPRAAAGSELCRREGPGAAPAFAGPGGGGSGALEAEGRAGARAGPRPGPRPPGGAPARKAAVAPGPWKVPGSDKLPSVLKPGASAASR

SEQ ID NO: 483 - DNA, 4872 bp, Homo sapiens
tattcagatattctccagattcctaaagattagagatcatttctcattctcctaggagtactcacttcaggaagcaaccagataaaagagaggtgcaacggaagccagaacattcctcctggaaattcaacctgtttcgcagtttctcgaggaatcagcattcagtcaatccgggccgggagcagtcatctgtggtgaggctgattggctgggcaggaacagcgccggggcgtgggctgagcacagccgcttcgctctctttgccacaggaagcctgagctcattcgagtagcggctcttccaagctcaaagaagcagaggccgctgttcgtttcctttaggtctttccactaaagtcggagtatcttcttccaaaatttcacgtcttggtggccgttccaaggagcgcgaggtcggaatggatcttgaaggggaccgcaatggaggagcaaagaagaagaacttttttaaactgaacaataaaagtgaaaaagataagaaggaaaagaaaccaactgtcagtgtattttcaatgtttcgctattcaaattggcttgacaagttgtatatggtggtgggaactttggctgccatcatccatggggctggacttcctctcatgatgctggtgtttggagaaatgacagatatctttgcaaatgcaggaaatttagaagatctgatgtcaaacatcactaatagaagtgatatcaatgatacagggttcttcatgaatctggaggaagacatgaccaggtatgcctattattacagtggaattggtgctggggtgctggttgctgcttacattcaggtttcattttggtgcctggcagctggaagacaaatacacaaaattagaaaacagttttttcatgctataatgcgacaggagataggctggtttgatgtgcacgatgttggggagcttaacacccgacttacagatgatgtctccaagattaatgaaggaattggtgacaaaattggaatgttctttcagtcaatggcaacatttttcactgggtttatagtaggatttacacgtggttggaagctaacccttgtgattttggccatcagtcctgttcttggactgtcagctgctgtctgggcaaagatactatcttcatttactgataaagaactcttagcgtatgcaaaagctggagcagtagctgaagaggtcttggcagcaattagaactgtgattgcatttggaggacaaaagaaagaacttgaaaggtacaacaaaaatttagaagaagctaaaagaattgggataaagaaagctattacagccaatatttctataggtgctgctttcctgctgatctatgcatcttatgctctggccttctggtatgggaccaccttggtcctctcaggggaatattctattggacaagtactcactgtattcttttctgtattaattggggcttttagtgttggacaggcatctccaagcattgaagcatttgcaaatgcaagaggagcagcttatgaaatcttcaagataattgataataagccaagtattgacagctattcgaagagtgggcacaaaccagataatattaagggaaatttggaattcagaaatgttcacttcagttacccatctcgaaaagaagttaagatcttgaagggtctgaacctgaaggtgcagagtgggcagacggtggccctggttggaaacagtggctgtgggaagagcacaacagtccagctgatgcagaggctctatgaccccacagaggggatggtcagtgttgatggacaggatattaggaccataaatgtaaggtttctacgggaaatcattggtgtggtgagtcaggaacctgtattgtttgccaccacgatagctgaaaacattcgctatggccgtgaaaatgtcaccatggatgagattgagaaagctgtcaaggaagccaatgcctatgactttatcatgaaactgcctcataaatttgacaccctggttggagagagaggggcccagttgagtggtgggcagaagcagaggatcgccattgcacgtgccctggttcgcaaccccaagatcctcctgctggatgaggccacgtcagccttggacacagaaagcgaagcagtggttcaggtggctctggataaggccagaaaaggtcggaccaccattgtgatagctcatcgtttgtctacagttcgtaatgctgacgtcatcgctggtttcgatgatggagtcattgtggagaaaggaaatcatgatgaactcatgaaagagaaaggcatttacttcaaacttgtcacaatgcagacagcaggaaatgaagttgaattagaaaatgcagctgatgaatccaaaagtgaaattgatgccttggaaatgtcttcaaatgattcaagatccagtctaataagaaaaagatcaactcgtaggagtgtccgtggatcacaagcccaagacagaaagcttagtaccaaagaggctctggatgaaagtatacctccagtttccttttggaggattatgaagctaaatttaactgaatggccttattttgttgttggtgtattttgtgccattataaatggaggcctgcaaccagcatttgcaataatattttcaaagattataggggtttttacaagaattgatgatcctgaaacaaaacgacagaatagtaacttgttttcactattgtttctagcccttggaattatttcttttattacatttttccttcagggtttcacatttggcaaagctggagagatcctcaccaagcggctccgatacatggttttccgatccatgctcagacaggatgtgagttggtttgatgaccctaaaaacaccactggagcattgactaccaggctcgccaatgatgctgctcaagttaaaggggctataggttccaggcttgctgtaattacccagaatatagcaaatcttgggacaggaataattatatccttcatctatggttggcaactaacactgttactcttagcaattgtacccatcattgcaatagcaggagttgttgaaatgaaaatgttgtctggacaagcactgaaagataagaaagaactagaaggttctgggaagatcgctactgaagcaatagaaaacttccgaaccgttgtttctttgactcaggagcagaagtttgaacatatgtatgctcagagtttgcaggtaccatacagaaactctttgaggaaagcacacatctttggaattacattttccttcacccaggcaatgatgtatttttcctatgctggatgtttccggtttggagcctacttggtggcacataaactcatgagctttgaggatgttctgttagtattttcagctgttgtctttggtgccatggccgtggggcaagtcagttcatttgctcctgactatgccaaagccaaaatatcagcagcccacatcatcatgatcattgaaaaaacccctttgattgacagctacagcacggaaggcctaatgccgaacacattggaaggaaatgtcacatttggtgaagttgtattcaactatcccacccgaccggacatcccagtgcttcagggactgagcctggaggtgaagaagggccagacgctggctctggtgggcagcagtggctgtgggaagagcacagtggtccagctcctggagcggttctacgaccccttggcagggaaagtgctgcttgatggcaaagaaataaagcgactgaatgttcagtggctccgagcacacctgggcatcgtgtcccaggagcccatcctgtttgactgcagcattgctgagaacattgcctatggagacaacagccgggtggtgtcacaggaagagattgtgagggcagcaaaggaggccaacatacatgccttcatcgagtcactgcctaataaatatagcactaaagtaggagacaaaggaactcagctctctggtggccagaaacaacgcattgccatagctcgtgcccttgttagacagcctcatattttgcttttggatgaagccacgtcagctctggatacagaaagtgaaaaggttgtccaagaagccctggacaaagccagagaaggccgcacctgcattgtgattgctcaccgcctgtccaccatccagaatgcagacttaatagtggtgtttcagaatggcagagtcaaggagcatggcacgcatcagcagctgctggcacagaaaggcatctatttttcaatggtcagtgtccaggctggaacaaagcgccagtgaactctgactgtatgagatgttaaatactttttaatatttgtttagatatgacatttattcaaagttaaaagcaaacacttacagaattatgaagaggtatctgtttaacatttcctcagtcaagttcagagtcttcagagacttcgtaattaaaggaacagagtgagagacatcatcaagtggagagaaatcatagtttaaactgcattataaattttataacagaattaaagtagattttaaaagataaaatgtgtaattttgtttatattttcccatttggactgtaactgactgccttgctaaaagattatagaagtagcaaaaagtattgaaatgtttgcataaagtgtctataataaaactaaactttcatgtgactggagtcatcttgtccaaactgcctgtgaatatatcttctctcaattggaatattgtagataacttctgctttaaaaaagttttctttaaatatacctactcatttttgtgggaatggttaagcagtttaaataattcctgttgtatatgtctattcacattgggtcttacagaaccatctggcttcattcttcttggacttgatcctgctgattcttgcatttccacat

SEQ ID NO: 484 - protein, 1280 aa, Homo sapiens
MDLEGDRNGGAKKKNFFKLNNKSEKDKKEKKPTVSVFSMFRYSNWLDKLYMVVGTLAAIIHGAGLPLMMLVFGEMTDIFANAGNLEDLMSNITNRSDINDTGFFMNLEEDMTRYAYYYSGIGAGVLVAAYIQVSFWCLAAGRQIHKIRKQFFHAIMRQEIGWFDVHDVGELNTRLTDDVSKINEGIGDKIGMFFQSMATFFTGFIVGFTRGWKLTLVILAISPVLGLSAAVWAKILSSFTDKELLAYAKAGAVAEEVLAAIRTVIAFGGQKKELERYNKNLEEAKRIGIKKAITANISIGAAFLLIYASYALAFWYGTTLVLSGEYSIGQVLTVFFSVLIGAFSVGQASPSIEAFANARGAAYEIFKIIDNKPSIDSYSKSGHKPDNIKGNLEFRNVHFSYPSRKEVKILKGLNLKVQSGQTVALVGNSGCGKSTTVQLMQRLYDPTEGMVSVDGQDIRTINVRFLREIIGVVSQEPVLFATTIAENIRYGRENVTMDEIEKAVKEANAYDFIMKLPHKFDTLVGERGAQLSGGQKQRIAIARALVRNPKILLLDEATSALDTESEAVVQVALDKARKGRTTIVIAHRLSTVRNADVIAGFDDGVIVEKGNHDELMKEKGIYFKLVTMQTAGNEVELENAADESKSEIDALEMSSNDSRSSLIRKRSTRRSVRGSQAQDRKLSTKEALDESIPPVSFWRIMKLNLTEWPYFVVGVFCAIINGGLQPAFAIIFSKIIGVFTRIDDPETKRQNSNLFSLLFLALGIISFITFFLQGFTFGKAGEILTKRLRYMVFRSMLRQDVSWFDDPKNTTGALTTRLANDAAQVKGAIGSRLAVITQNIANLGTGIIISFIYGWQLTLLLLAIVPIIAIAGVVEMKMLSGQALKDKKELEGSGKIATEAIENFRTVVSLTQEQKFEHMYAQSLQVPYRNSLRKAHIFGITFSFTQAMMYFSYAGCFRFGAYLVAHKLMSFEDVLLVFSAVVFGAMAVGQVSSFAPDYAKAKISAAHIIMIIEKTPLIDSYSTEGLMPNTLEGNVTFGEVVFNYPTRPDIPVLQGLSLEVKKGQTLALVGSSGCGKSTVVQLLERFYDPLAGKVLLDGKEIKRLNVQWLRAHLGIVSQEPILFDCSIAENIAYGDNSRVVSQEEIVRAAKEANIHAFIESLPNKYSTKVGDKGTQLSGGQKQRIAIARALVRQPHILLLDEATSALDTESEKVVQEALDKAREGRTCIVIAHRLSTIQNADLIVVFQNGRVKEHGTHQQLLAQKGIYFSMVSVQAGTKRQ

SEQ ID NO: 485 - DNA, 2241 bp, Homo sapiens
gctggggcacgagtggctgcggagtgtgggtggttgggcgtgaggggccgacgggctcgcgcgcgcgccgtctgctgaggtccctcgggaaggaggagagcgcctgacgccgacccgcaggcgcagcccggcagtcggcggcgcgccgagggcggaggtggtgcgtgcgtgcgtgtgtgtgtgtgtgtgtgtgtgtgtgtgtgtgtgtgtggagctcgggtgccaagggcgagccgtcagtccccgggtgcgagtccctgctgtcttccacacccttcctccctccaggctcctttcctacatccttcccgcgcccccacggttgcggaccgagcgagaacccccttaagcaggtgtggggggcgtgcggggtggcacgagacaaaaggggcacgggggtaagcccgccatggcctcccggagcctggggggcctgagcgggatccgcggcggtggcggcggaggcggcaagaaaagcctgagcgcccgcaatgctgcggtggagaggaggaacctgatcaccgtgtgcaggttttctgtgaagaccctgattgatcggtcttgctttgagacaattgatgattcttctcctgaatttaacaattttgcagctattttggaacagattttaagccaccggctaaaagagatttcccaaagttgcagatggctggctcatctccaaatacctcttcaaggtcaagtaacctggtttggttatgaaagtcctcgtagcttctgggactatatcagagtggcttgccggaaagtttcacagaattgtatctgcagcattgaaaatatggaaaatgtcagttcttctagagctaagggtagagcctggatcagagtagcactcatggaaaaacatttatctgaatacatctctacagctctgagagacttcaaaacaaccaggagattttatgaagatggagcaattgtcttgggtgaagaagcaaatatgcttgctggcatgcttctaggactcaatgctattgatttcagtttctgcctaaagggagaggggctggatggcagttttcctgctgtaatagactatacaccatatttgaagtatatccaaagttctgatagtatcagcagtgatgaggaggagctaaggactttgggaagcagtggtagcgaaagcagtactccagagaatgtcggacctcctttcctcatggatgagaacagttggttcaacaagtgtaagagagttaaacaaaagtatcagcttaccctggaacagaagggttaccttgaagaactcttacgacttcgagagaaccaactatctgaatctgtctcccagaataaaatactacttcaaaggattgaagattccgatctggctcataaactggagaaggaacaattagaatatataattgtggagcttcaagatcagctgactgtgctaaagaataatgatttaagatcgagacaagagttaactgcccatctcaccaaccagtggccttctccaggagctctggatgtcaatgctgttgccttggatacgttgctttaccgaaaacacaataaacagtggtatgagaaaagttatcaaagtcttgaccagttatcagcagaagttagcctttctcagacttcactagatccaggccagtcacaagaaggagatggaaaacaagacacattaaatgtaatgagtgaaggtaaggaagatactccctcattacttggcctctgtggatctctaacgtcagtggcaagttacaagtctctaacaagcttaaaatctaatgactaccttgcaagtcctacaacagagatgacaagtccaggcctaactccatcctgaaaatttttgtgtaaaagccaaaactttttatgttgtaaatgtttaatttacatgtttgactgctgggaagacctttgaaattttatattgttctggtacatgtctgaaattctattgcttggagagaatcccctccagataagagattttgagtgaaaaacataatgatcctgccatttttcatttttaaaattcttacatttgtcattgagaaagttcaaaatggaataggctttaaaaaaaaaaaaactttcaaagatccgccaaatcattcatagcaaattgtacatattgttcagctgatttttatatatttaaatacaccttagtggccagagactgacttcaaggttttattccagagactccagagacttaagctaagtattttttcattctttcagattttc

SEQ ID NO: 486 - protein, 473 aa, Homo sapiens
MASRSLGGLSGIRGGGGGGGKKSLSARNAAVERRNLITVCRFSVKTLIDRSCFETIDDSSPEFNNFAAILEQILSHRLKEISQSCRWLAHLQIPLQGQVTWFGYESPRSFWDYIRVACRKVSQNCICSIENMENVSSSRAKGRAWIRVALMEKHLSEYISTALRDFKTTRRFYEDGAIVLGEEANMLAGMLLGLNAIDFSFCLKGEGLDGSFPAVIDYTPYLKYIQSSDSISSDEEELRTLGSSGSESSTPENVGPPFLMDENSWFNKCKRVKQKYQLTLEQKGYLEELLRLRENQLSESVSQNKILLQRIEDSDLAHKLEKEQLEYIIVELQDQLTVLKNNDLRSRQELTAHLTNQWPSPGALDVNAVALDTLLYRKHNKQWYEKSYQSLDQLSAEVSLSQTSLDPGQSQEGDGKQDTLNVMSEGKEDTPSLLGLCGSLTSVASYKSLTSLKSNDYLASPTTEMTSPGLTPS

SEQ ID NO: 487 - DNA, 1515 bp, Homo sapiens
tcgcgcctcgctctggccctgcaggttgtgtttccgcctctaccccgcctccattccgttgctctctcagtctcagacccgggctctcggtccgccgcttcaggtcttggcgcagcctcagagagttggcgcggctctgtgttgaccaaacctagtggatgcagttagcgccggagcccggccccgcccgtcaccagggttattcccgccttctaggtttgccaggactgccggccctgcagctgccttctgccccaggtttttggctactgatgttacaaacaataaaatattggagcatagagttgaagaacagactcaaaccaggtttttatttaattagttaaaaatatggatcctgagacaaggggacaagagattatcaaagtgacacctcttcaacaaatgcttgcctcatgtactggagctatactgacatcagtaatagtgacacccctggatgttgttaaaattagactccaagcccaaaacaacccactccccaaaggaaaatgttttgtatatagtaatggactcatggatcatctatgtgtctgtgaagagggaggcaacaaactatggtataagaagccaggaaatttccagggaacattggatgcattttttaaaatcattcgaaatgagggcattaaatctctatggagtggccttcctcctaccctagtgatggcagttcctgccacagttatttattttacctgctatgatcaattaagtgctcttctgagatctaagttaggagaaaatgaaacctgcataccaattgttgctggaattgtagccagatttggtgcagtaactgtgataagtccactagaattgattagaaccaagatgcagtccaagaagttttcttacgtggaactgcatcgatttgtcagcaagaaagtatctgaagatggttggatttccctttggaggggctgggctcctactgttcttagagatgtacctttctcagcaatgtactggtataactatgaaattttaaagaagtggttatgtgagaaatctggtttatatgagccaacatttatgatcaactttacttcaggggcattgtctggttcttttgctgctgttgcaactttaccatttgatgtagtaaaaacacaaaagcagacacaactttggacatatgaaagtcataaaatttctatgcctttgcatatgtcaacctggattataatgaagaacattgttgctaaaaatggattttccggattattttcaggcctaattcctcgcttaattaaaattgctcctgcttgtgccattatgatcagtacatatgaatttggaaaggcttttttccagaaacaaaatgttcgaaggcagcaatactagtgatgctgtttcaacttgaaacaacaactatagccaaagaagatggagactcttaggcaagaatgtttttcaccattattctctcacaatgattttatgtctttctttcctataatttaaataaataatttcagctctacctctaaa

SEQ ID NO: 488 - protein, 338 aa, Homo sapiens
MDPETRGQEIIKVTPLQQMLASCTGAILTSVIVTPLDVVKIRLQAQNNPLPKGKCFVYSNGLMDHLCVCEEGGNKLWYKKPGNFQGTLDAFFKIIRNEGIKSLWSGLPPTLVMAVPATVIYFTCYDQLSALLRSKLGENETCIPIVAGIVARFGAVTVISPLELIRTKMQSKKFSYVELHRFVSKKVSEDGWISLWRGWAPTVLRDVPFSAMYWYNYEILKKWLCEKSGLYEPTFMINFTSGALSGSFAAVATLPFDVVKTQKQTQLWTYESHKISMPLHMSTWIIMKNIVAKNGFSGLFSGLIPRLIKIAPACAIMISTYEFGKAFFQKQNVRRQQY

SEQ ID NO: 489 - DNA, 3923 bp, Homo sapiens
ctctctgaggctgcgccaagacctgaagcggcggaccgagagcccgggtctgagactgagagagcaacggaatggaggcggggtagaggcggaaacacaacctgcagggccagagcgaggcgcgagaaggacggcggcgtgagggggcggggcgcgcagcgcgagaaggcaggcacgaggggcgagcgcgaggcggggcacggcgcgtggcgtgagacggggcggggcgcgcgtatcggcgccgcggccgcgtgacgcgttttcaaatcttcaaccgccgcagcccactcgtttgtgctttgcgccttcctcctccgcgccttggagccggatccggccccggaaacccgacctgcagacgcggtacctctactgcgtagaggccgtagctggcggaaggagagaggcggccgtcctgtcaacaggccgggggaagccgtgctttcgcggctgcccggtgcgacactttctccggacccagcatgtaggtgccgggcgactgccatgaactccggagccatgaggatccacagtaaaggacatttccagggtggaatccaagtcaaaaatgaaaaaaacagaccatctctgaaatctctgaaaactgataacaggccagaaaaatccaaatgtaagccactttggggaaaagtattttaccttgacttaccttctgtcaccatatctgaaaaacttcaaaaggacattaaggatctgggagggcgagttgaagaatttctcagcaaagatatcagttatcttatttcaaataagaaggaagctaaatttgcacaaaccttgggtcgaatttctcctgtaccaagtccagaatctgcatatactgcagaaaccacttcacctcatcccagccatgatggaagttcatttaagtcaccagacacagtgtgtttaagcagaggaaaattattagttgaaaaagctatcaaggaccatgattttattccttcaaatagtatattatcaaatgccttgtcatggggagtaaaaattcttcatattgatgacattagatactacattgaacaaaagaaaaaagagttgtatttactcaagaaatcaagtacttcagtaagagatgggggcaaaagagttggtagtggtgcacaaaaaacaagaacaggaagactcaaaaagccttttgtaaaggtggaagatatgagccaactttataggccattttatcttcagctgaccaatatgccttttataaattattctattcagaagccctgcagtccatttgatgtagacaagccatctagtatgcaaaagcaaactcaggttaaactaagaatccaaacagatggcgataagtatggtggaacctcaattcaactccagttgaaagagaagaagaaaaaaggatattgtgaatgttgcttgcagaaatatgaagatctagaaactcaccttctaagtgagcaacacagaaactttgcacagagtaaccagtatcaagttgttgatgatattgtatctaagttagtttttgactttgtggaatatgaaaaggacacacctaaaaagaaaagaataaaatacagtgttggatccctttctcctgtttctgcaagtgtcctgaaaaagactgaacaaaaggaaaaagtggaattgcaacatatttctcagaaagattgccaggaagatgatacaacagtgaaggagcagaatttcctgtataaagagacccaggaaactgaaaaaaagctcctgtttatttcagagcccatcccccacccttcaaatgaattgagagggcttaatgagaaaatgagtaataaatgttccatgttaagtacagctgaagatgacataagacagaattttacacagctacctctacataaaaacaaacaggaatgcattcttgacatttccgaacacacattaagtgaaaatgacttagaagaactaagggtagatcactataaatgtaacatacaggcatctgtacatgtttctgatttcagtacagataatagtggatctcaaccaaaacagaagtcagatactgtgctttttccagcaaaggatctcaaggaaaaggaccttcattcaatatttactcatgattctggtctgataacaataaacagttcacaagagcacctaactgttcaggcaaaggctccattccatactcctcctgaggaacccaatgaatgtgacttcaagaatatggatagtttaccttctggtaaaatacatcgaaaagtgaaaataatattaggacgaaatagaaaagaaaatctggaaccaaatgctgaatttgataaaagaactgaatttattacacaagaagaaaacagaatttgtagttcaccggtacagtctttactagacttgtttcagactagtgaagagaaatcagaatttttgggtttcacaagctacacagaaaagagtggtatatgcaatgttttagatatttgggaagaggaaaattcagataatctgttaacagcgtttttctcgtccccttcaacttctacatttactggcttttagaatttaaaaaatgcatacttttcagaagtgataaggatcatattcttgaaatttttataaatatgtatggaaattcttaggatttttttaccagctttgtttacagacccaaatgtaaatattaaaaataaatatttgcaattttctacagaattgaatacctgttaaagaaaaattacagaataaacttgtgactggtcttgttttacattatatatatgttcgtaattgtttcctgagaattacaatgaataataatttgctttgtcactgaaaaccaccagtgaagtgcaatttggggaatatcaaacttagcattatacatttggatattctagttgtattgtaaattttaaaagattatcaggataacatgaccttgccttgaaaaacctaaatttcatacagaaaggaaaaatacatttctatgcttgaattctggaaatcatcagaaatattgacacttgagggtcactggtggaccatgctagtattttggtgctgagtaattagattatgtataggggtaactggaagccatgaaggaaggacttaaccaggctaccaagtggaatataatttatctgctatttttaattacttaccttgtaaataactttaataatattcaaaagttgactctcctgtggctcatgccacaggatcccagcactttgggaggccgaggcaggctgatcacgaggtcagaagatcaagaccatcctggccaacatggtgaaaccttgtctactaaaaatacaaaaaattagctgggcatggcggcatgcgcctgtagtcccagctactccctccagaggctgagaattgcttgaacctgggaagtgcaggttgcagtgagccaagattgtgccactgtattccagactgggtgacagagtgagactccatctcaaaaaaaaaaaagttgactctaccccctaatttggtaggagatgaaggagaaaaggatggcattgaattatagatacagttttgggatatatacaaggattgccttgatctggcacttactgatacaagcatttggagaagagaaaattcaaatataagaaatttcaatttgaatctgtggatataaggcatttgcctttgagtatgttcttgtaggagtaagactaccaccagtgacattcaattggttctattgcatagtacatgaatctattgtcactaaaaattaggttactaatcttaatttttttgaaatatatgattctcagtacaggactaattcatatgcttttcctgcatacattattttgatcatttggataacatcaatgaacactggctttttaacacctttgtttttcataccagtacctgaagtaggctcaataaaagagtctttacagtgaaaaaaaaaaaaaaaa

SEQ ID NO: 490 - protein, 674 aa, Homo sapiens
MNSGAMRIHSKGHFQGGIQVKNEKNRPSLKSLKTDNRPEKSKCKPLWGKVFYLDLPSVTISEKLQKDIKDLGGRVEEFLSKDISYLISNKKEAKFAQTLGRISPVPSPESAYTAETTSPHPSHDGSSFKSPDTVCLSRGKLLVEKAIKDHDFIPSNSILSNALSWGVKILHIDDIRYYIEQKKKELYLLKKSSTSVRDGGKRVGSGAQKTRTGRLKKPFVKVEDMSQLYRPFYLQLTNMPFINYSIQKPCSPFDVDKPSSMQKQTQVKLRIQTDGDKYGGTSIQLQLKEKKKKGYCECCLQKYEDLETHLLSEQHRNFAQSNQYQVVDDIVSKLVFDFVEYEKDTPKKKRIKYSVGSLSPVSASVLKKTEQKEKVELQHISQKDCQEDDTTVKEQNFLYKETQETEKKLLFISEPIPHPSNELRGLNEKMSNKCSMLSTAEDDIRQNFTQLPLHKNKQECILDISEHTLSENDLEELRVDHYKCNIQASVHVSDFSTDNSGSQPKQKSDTVLFPAKDLKEKDLHSIFTHDSGLITINSSQEHLTVQAKAPFHTPPEEPNECDFKNMDSLPSGKIHRKVKIILGRNRKENLEPNAEFDKRTEFITQEENRICSSPVQSLLDLFQTSEEKSEFLGFTSYTEKSGICNVLDIWEEENSDNLLTAFFSSPSTSTFTGF

SEQ ID NO: 491 - DNA, 2744 bp, Homo sapiens
gcggagcgagggaaacggactcggcggcgccggcatgaggagctgagcgtctcgggcgaggcgggctgacggcagcaccatgcaggcggcagtggctgtgtccgtgcccttcttgctgctctgtgtcctggggacctgccctccggcgcgctgcggccaggcaggagacgcctcattgatggagctagagaagaggaaggaaaaccgcttcgtggagcgccagagcatcgtgccactgcgcctcatctaccgctcgggcggcgaagacgaaagtcggcacgacgcgctcgacacgcgggtgcggggcgacctcggtggcccgcagttgactcatgttgaccaagcaagcttccaggttgatgcctttggaacgtcattcattctcgatgtcgtgctaaatcatgatttgctgtcctctgaatacatagagagacacattgaacatggaggcaagactgtggaagttaaaggaggagagcactgttactaccagggccatatccgaggaaaccctgactcatttgttgcattgtcaacatgccacggacttcatgggatgttctatgacgggaaccacacatatctcattgagccagaagaaaatgacactactcaagaggatttccattttcattcagtttacaaatccagactgtttgaattttccttggatgatcttccatctgaatttcagcaagtaaacattactccatcaaaatttattttgaagccaagaccaaaaaggagtaaacggcagcttcgtcgatatcctcgtaatgtagaagaagaaaccaaatacattgaactgatgattgtgaatgatcaccttatgtttaaaaaacatcggctttccgttgtacataccaatacctatgcgaaatctgtggtgaacatggcagatttaatatataaagaccaacttaagaccaggatagtattggttgctatggaaacctgggcgactgacaacaagtttgccatatctgaaaatccattgatcaccctacgtgagtttatgaaatacaggagggattttatcaaagagaaaagtgatgcagttcaccttttttcgggaagtcaatttgagagtagccggagcggggcagcttatattggtgggatttgctcgttgctgaaaggaggaggcgtgaatgaatttgggaaaactgatttaatggctgttacacttgcccagtcattagcccataatattggtattatctcagacaaaagaaagttagcaagtggtgaatgtaaatgcgaggacacgtggtccgggtgcataatgggagacactggctattatcttcctaaaaagttcacccagtgtaatattgaagagtatcatgacttcctgaatagtggaggtggtgcctgccttttcaacaaaccttctaagcttcttgatcctcctgagtgtggcaatggcttcattgaaactggagaggagtgtgattgtggaaccccggccgaatgtgtccttgaaggagcagagtgttgtaagaaatgcaccttgactcaagactctcaatgcagtgacggtctttgctgtaaaaagtgcaagtttcagcctatgggcactgtgtgccgagaagcagtaaatgattgtgatattcgtgaaacgtgctcaggaaattcaagccagtgtgcccctaatattcataaaatggatggatattcatgtgatggtgttcagggaatttgctttggaggaagatgcaaaaccagagatagacaatgcaaatacatttgggggcaaaaggtgacagcatcagacaaatattgctatgagaaactgaatattgaagggacggagaagggtaactgtgggaaagacaaagacacatggatacagtgcaacaaacgggatgtgctttgtggttaccttttgtgtaccaatattggcaatatcccaaggcttggagaactcgatggtgaaatcacatctactttagttgtgcagcaaggaagaacattaaactgcagtggtgggcatgttaagcttgaagaagatgtagatcttggctatgtggaagatgggacaccttgtggtccccaaatgatgtgcttagaacacaggtgtcttcctgtggcttctttcaactttagtacttgcttgagcagtaaagaaggcactatttgctcaggaaatggagtttgcagtaatgagctgaagtgtgtgtgtaacagacactggataggttctgattgcaacacttacttccctcacaatgatgatgcaaagactggtatcactctgtctggcaatggtgttgctggcaccaatatcataataggcataattgctggcaccattttagtgctggccctcatattaggaataactgcgtggggttataaaaactatcgagaacagagacagttaccccagggagattatgtaaaaaagcctggagatggtgactctttttatagcgacattcctcccggagtcagcacaaactcagcatctagttctaagaagaggtcaaatgggctctctcattcttggagtgaaaggattccagacacaaaacatatttcagacatctgtgaaaatgggcgacctcgaagtaactcttggcaaggtaacctgggaggcaacaaaaagaaaatcagaggcaaaagatttagacctcggtctaattcaactgagtaagtctgaacctctaatggaaaaaggcactccaaggtcctgtgcaaatagtgtcaaaagtaaattaagcagatagtcaaagaactgt

SEQ ID NO: 492 - protein, 859 aa, Homo sapiens
MQAAVAVSVPFLLLCVLGTCPPARCGQAGDASLMELEKRKENRFVERQSIVPLRLIYRSGGEDESRHDALDTRVRGDLGGPQLTHVDQASFQVDAFGTSFILDVVLNHDLLSSEYIERHIEHGGKTVEVKGGEHCYYQGHIRGNPDSFVALSTCHGLHGMFYDGNHTYLIEPEENDTTQEDFHFHSVYKSRLFEFSLDDLPSEFQQVNITPSKFILKPRPKRSKRQLRRYPRNVEEETKYIELMIVNDHLMFKKHRLSVVHTNTYAKSVVNMADLIYKDQLKTRIVLVAMETWATDNKFAISENPLITLREFMKYRRDFIKEKSDAVHLFSGSQFESSRSGAAYIGGICSLLKGGGVNEFGKTDLMAVTLAQSLAHNIGIISDKRKLASGECKCEDTWSGCIMGDTGYYLPKKFTQCNIEEYHDFLNSGGGACLFNKPSKLLDPPECGNGFIETGEECDCGTPAECVLEGAECCKKCTLTQDSQCSDGLCCKKCKFQPMGTVCREAVNDCDIRETCSGNSSQCAPNIHKMDGYSCDGVQGICFGGRCKTRDRQCKYIWGQKVTASDKYCYEKLNIEGTEKGNCGKDKDTWIQCNKRDVLCGYLLCTNIGNIPRLGELDGEITSTLVVQQGRTLNCSGGHVKLEEDVDLGYVEDGTPCGPQMMCLEHRCLPVASFNFSTCLSSKEGTICSGNGVCSNELKCVCNRHWIGSDCNTYFPHNDDAKTGITLSGNGVAGTNIIIGIIAGTILVLALILGITAWGYKNYREQRQLPQGDYVKKPGDGDSFYSDIPPGVSTNSASSSKKRSNGLSHSWSERIPDTKHISDICENGRPRSNSWQGNLGGNKKKIRGKRFRPRSNSTE

SEQ ID NO: 493 - DNA, 3347 bp, Homo sapiens
gcggagcgagggaaacggactcggcggcgccggcatgaggagctgagcgtctcgggcgaggcgggctgacggcagcaccatgcaggcggcagtggctgtgtccgtgcccttcttgctgctctgtgtcctggggacctgccctccggcgcgctgcggccaggcaggagacgcctcattgatggagctagagaagaggaaggaaaaccgcttcgtggagcgccagagcatcgtgccactgcgcctcatctaccgctcgggcggcgaagacgaaagtcggcacgacgcgctcgacacgcgggtgcggggcgacctcggtggcccgcagttgactcatgttgaccaagcaagcttccaggttgatgcctttggaacgtcattcattctcgatgtcgtgctaaatcatgatttgctgtcctctgaatacatagagagacacattgaacatggaggcaagactgtggaagttaaaggaggagagcactgttactaccagggccatatccgaggaaaccctgactcatttgttgcattgtcaacatgccacggacttcatgggatgttctatgacgggaaccacacatatctcattgagccagaagaaaatgacactactcaagaggatttccattttcattcagtttacaaatccagactgtttgaattttccttggatgatcttccatctgaatttcagcaagtaaacattactccatcaaaatttattttgaagccaagaccaaaaaggagtaaacggcagcttcgtcgatatcctcgtaatgtagaagaagaaaccaaatacattgaactgatgattgtgaatgatcaccttatgtttaaaaaacatcggctttccgttgtacataccaatacctatgcgaaatctgtggtgaacatggcagatttaatatataaagaccaacttaagaccaggatagtattggttgctatggaaacctgggcgactgacaacaagtttgccatatctgaaaatccattgatcaccctacgtgagtttatgaaatacaggagggattttatcaaagagaaaagtgatgcagttcaccttttttcgggaagtcaatttgagagtagccggagcggggcagcttatattggtgggatttgctcgttgctgaaaggaggaggcgtgaatgaatttgggaaaactgatttaatggctgttacacttgcccagtcattagcccataatattggtattatctcagacaaaagaaagttagcaagtggtgaatgtaaatgcgaggacacgtggtccgggtgcataatgggagacactggctattatcttcctaaaaagttcacccagtgtaatattgaagagtatcatgacttcctgaatagtggaggtggtgcctgccttttcaacaaaccttctaagcttcttgatcctcctgagtgtggcaatggcttcattgaaactggagaggagtgtgattgtggaaccccggccgaatgtgtccttgaaggagcagagtgttgtaagaaatgcaccttgactcaagactctcaatgcagtgacggtctttgctgtaaaaagtgcaagtttcagcctatgggcactgtgtgccgagaagcagtaaatgattgtgatattcgtgaaacgtgctcaggaaattcaagccagtgtgcccctaatattcataaaatggatggatattcatgtgatggtgttcagggaatttgctttggaggaagatgcaaaaccagagatagacaatgcaaatacatttgggggcaaaaggtgacagcatcagacaaatattgctatgagaaactgaatattgaagggacggagaagggtaactgtgggaaagacaaagacacatggatacagtgcaacaaacgggatgtgctttgtggttaccttttgtgtaccaatattggcaatatcccaaggcttggagaactcgatggtgaaatcacatctactttagttgtgcagcaaggaagaacattaaactgcagtggtgggcatgttaagcttgaagaagatgtagatcttggctatgtggaagatgggacaccttgtggtccccaaatgatgtgcttagaacacaggtgtcttcctgtggcttctttcaactttagtacttgcttgagcagtaaagaaggcactatttgctcaggaaatggagtttgcagtaatgagctgaagtgtgtgtgtaacagacactggataggttctgattgcaacacttacttccctcacaatgatgatgcaaagactggtatcactctgtctggcaatggtgttgctggcaccaatatcataataggcataattgctggcaccattttagtgctggccctcatattaggaataactgcgtggggttataaaaactatcgagaacagaggtcaaatgggctctctcattcttggagtgaaaggattccagacacaaaacatatttcagacatctgtgaaaatgggcgacctcgaagtaactcttggcaaggtaacctgggaggcaacaaaaagaaaatcagaggcaaaagatttagacctcggtctaattcaactgagactttatctcctgccaagtctccttcttcatcaactgggtctattgcctccagcagaaaatacccttacccaatgcctccacttcctgatgaggacaagaaagtgaaccgacaaagtgccaggctatgggagacatccatttaagatcaactgtttacatgtgatacatcgaaaactgtttacttcaacttttatagaaacccaggctcatggaatcactgcaaatctatctgctcttcagacaatacgaagaccctctgagatgctacagaggagaggaagcggagtttcacatctggttaccattttctttttgtcattggcttaggatttaactaaccatgaaaagaactactgaaatattacactataacatggaacaataaaggtactggtatgttaatggataatccgcatgacagataatatgtagaaatattcataaagttaactcacatgacccaaatgtagcaagtttcctaaggtacaatagtggattcagaacttgacgttctgaggcacatcctcactgtaaacagtaatgctatatgcatgaagcttctgtttattgttttccatatttaaggaaacaacatcccataatagaaatgagcatgcagggctaaggcatataggatttttctgcaggactttaaagctttgaaaggccaatatcccataggctaactttaaacatgtatttttatttttgttttgttttttacttttcatatttatattagcatacaaggacaattgtatatatgtaacatttttaaaattttaaaaaaaaaaaaaa

SEQ ID NO: 494 - protein, 870 aa, Homo sapiens
MQAAVAVSVPFLLLCVLGTCPPARCGQAGDASLMELEKRKENRFVERQSIVPLRLIYRSGGEDESRHDALDTRVRGDLGGPQLTHVDQASFQVDAFGTSFILDVVLNHDLLSSEYIERHIEHGGKTVEVKGGEHCYYQGHIRGNPDSFVALSTCHGLHGMFYDGNHTYLIEPEENDTTQEDFHFHSVYKSRLFEFSLDDLPSEFQQVNITPSKFILKPRPKRSKRQLRRYPRNVEEETKYIELMIVNDHLMFKKHRLSVVHTNTYAKSVVNMADLIYKDQLKTRIVLVAMETWATDNKFAISENPLITLREFMKYRRDFIKEKSDAVHLFSGSQFESSRSGAAYIGGICSLLKGGGVNEFGKTDLMAVTLAQSLAHNIGIISDKRKLASGECKCEDTWSGCIMGDTGYYLPKKFTQCNIEEYHDFLNSGGGACLFNKPSKLLDPPECGNGFIETGEECDCGTPAECVLEGAECCKKCTLTQDSQCSDGLCCKKCKFQPMGTVCREAVNDCDIRETCSGNSSQCAPNIHKMDGYSCDGVQGICFGGRCKTRDRQCKYIWGQKVTASDKYCYEKLNIEGTEKGNCGKDKDTWIQCNKRDVLCGYLLCTNIGNIPRLGELDGEITSTLVVQQGRTLNCSGGHVKLEEDVDLGYVEDGTPCGPQMMCLEHRCLPVASFNFSTCLSSKEGTICSGNGVCSNELKCVCNRHWIGSDCNTYFPHNDDAKTGITLSGNGVAGTNIIIGIIAGTILVLALILGITAWGYKNYREQRSNGLSHSWSERIPDTKHISDICENGRPRSNSWQGNLGGNKKKIRGKRFRPRSNSTETLSPAKSPSSSTGSIASSRKYPYPMPPLPDEDKKVNRQSARLWETSI

SEQ ID NO: 495 - DNA, 2636 bp, Homo sapiens
gcggagcgagggaaacggactcggcggcgccggcatgaggagctgagcgtctcgggcgaggcgggctgacggcagcaccatgcaggcggcagtggctgtgtccgtgcccttcttgctgctctgtgtcctggggacctgccctccggcgcgctgcggccaggcaggagacgcctcattgatggagctagagaagaggaaggaaaaccgcttcgtggagcgccagagcatcgtgccactgcgcctcatctaccgctcgggcggcgaagacgaaagtcggcacgacgcgctcgacacgcgggtgcggggcgacctcggtggcccgcagttgactcatgttgaccaagcaagcttccaggttgatgcctttggaacgtcattcattctcgatgtcgtgctaaatcatgatttgctgtcctctgaatacatagagagacacattgaacatggaggcaagactgtggaagttaaaggaggagagcactgttactaccagggccatatccgaggaaaccctgactcatttgttgcattgtcaacatgccacggacttcatgggatgttctatgacgggaaccacacatatctcattgagccagaagaaaatgacactactcaagaggatttccattttcattcagtttacaaatccagactgtttgaattttccttggatgatcttccatctgaatttcagcaagtaaacattactccatcaaaatttattttgaagccaagaccaaaaaggagtaaacggcagcttcgtcgatatcctcgtaatgtagaagaagaaaccaaatacattgaactgatgattgtgaatgatcaccttatgtttaaaaaacatcggctttccgttgtacataccaatacctatgcgaaatctgtggtgaacatggcagatttaatatataaagaccaacttaagaccaggatagtattggttgctatggaaacctgggcgactgacaacaagtttgccatatctgaaaatccattgatcaccctacgtgagtttatgaaatacaggagggattttatcaaagagaaaagtgatgcagttcaccttttttcgggaagtcaatttgagagtagccggagcggggcagcttatattggtgggatttgctcgttgctgaaaggaggaggcgtgaatgaatttgggaaaactgatttaatggctgttacacttgcccagtcattagcccataatattggtattatctcagacaaaagaaagttagcaagtggtgaatgtaaatgcgaggacacgtggtccgggtgcataatgggagacactggctattatcttcctaaaaagttcacccagtgtaatattgaagagtatcatgacttcctgaatagtggaggtggtgcctgccttttcaacaaaccttctaagcttcttgatcctcctgagtgtggcaatggcttcattgaaactggagaggagtgtgattgtggaaccccggccgaatgtgtccttgaaggagcagagtgttgtaagaaatgcaccttgactcaagactctcaatgcagtgacggtctttgctgtaaaaagtgcaagtttcagcctatgggcactgtgtgccgagaagcagtaaatgattgtgatattcgtgaaacgtgctcaggaaattcaagccagtgtgcccctaatattcataaaatggatggatattcatgtgatggtgttcagggaatttgctttggaggaagatgcaaaaccagagatagacaatgcaaatacatttgggggcaaaaggtgacagcatcagacaaatattgctatgagaaactgaatattgaagggacggagaagggtaactgtgggaaagacaaagacacatggatacagtgcaacaaacgggatgtgctttgtggttaccttttgtgtaccaatattggcaatatcccaaggcttggagaactcgatggtgaaatcacatctactttagttgtgcagcaaggaagaacattaaactgcagtggtgggcatgttaagcttgaagaagatgtagatcttggctatgtggaagatgggacaccttgtggtccccaaatgatgtgcttagaacacaggtgtcttcctgtggcttctttcaactttagtacttgcttgagcagtaaagaaggcactatttgctcaggaaatggagtttgcagtaatgagctgaagtgtgtgtgtaacagacactggataggttctgattgcaacacttacttccctcacaatgatgatgcaaagactggtatcactctgtctggcaatggtgttgctggcaccaatatcataataggcataattgctggcaccattttagtgctggccctcatattaggaataactgcgtggggttataaaaactatcgagaacagaggtcaaatgggctctctcattcttggagtgaaaggattccagacacaaaacatatttcagacatctgtgaaaatgggcgacctcgaagtaactcttggcaaggtaacctgggaggcaacaaaaagaaaatcagaggcaaaagatttagacctcggtctaattcaactgagtaagtctgaacctctaatggaaaaaggcactccaaggtcctgtgcaaatagtgtcaaaagtaaattaagcagatagtcaaagaactgt

SEQ ID NO: 496 - protein, 823 aa, Homo sapiens
MQAAVAVSVPFLLLCVLGTCPPARCGQAGDASLMELEKRKENRFVERQSIVPLRLIYRSGGEDESRHDALDTRVRGDLGGPQLTHVDQASFQVDAFGTSFILDVVLNHDLLSSEYIERHIEHGGKTVEVKGGEHCYYQGHIRGNPDSFVALSTCHGLHGMFYDGNHTYLIEPEENDTTQEDFHFHSVYKSRLFEFSLDDLPSEFQQVNITPSKFILKPRPKRSKRQLRRYPRNVEEETKYIELMIVNDHLMFKKHRLSVVHTNTYAKSVVNMADLIYKDQLKTRIVLVAMETWATDNKFAISENPLITLREFMKYRRDFIKEKSDAVHLFSGSQFESSRSGAAYIGGICSLLKGGGVNEFGKTDLMAVTLAQSLAHNIGIISDKRKLASGECKCEDTWSGCIMGDTGYYLPKKFTQCNIEEYHDFLNSGGGACLFNKPSKLLDPPECGNGFIETGEECDCGTPAECVLEGAECCKKCTLTQDSQCSDGLCCKKCKFQPMGTVCREAVNDCDIRETCSGNSSQCAPNIHKMDGYSCDGVQGICFGGRCKTRDRQCKYIWGQKVTASDKYCYEKLNIEGTEKGNCGKDKDTWIQCNKRDVLCGYLLCTNIGNIPRLGELDGEITSTLVVQQGRTLNCSGGHVKLEEDVDLGYVEDGTPCGPQMMCLEHRCLPVASFNFSTCLSSKEGTICSGNGVCSNELKCVCNRHWIGSDCNTYFPHNDDAKTGITLSGNGVAGTNIIIGIIAGTILVLALILGITAWGYKNYREQRSNGLSHSWSERIPDTKHISDICENGRPRSNSWQGNLGGNKKKIRGKRFRPRSNSTE

SEQ ID NO: 497 - DNA, 3393 bp, Homo sapiens
gcggagcgagggaaacggactcggcggcgccggcatgaggagctgagcgtctcgggcgaggcgggctgacggcagcaccatgcaggcggcagtggctgtgtccgtgcccttcttgctgctctgtgtcctggggacctgccctccggcgcgctgcggccaggcaggagacgcctcattgatggagctagagaagaggaaggaaaaccgcttcgtggagcgccagagcatcgtgccactgcgcctcatctaccgctcgggcggcgaagacgaaagtcggcacgacgcgctcgacacgcgggtgcggggcgacctcggtggcccgcagttgactcatgttgaccaagcaagcttccaggttgatgcctttggaacgtcattcattctcgatgtcgtgctaaatcatgatttgctgtcctctgaatacatagagagacacattgaacatggaggcaagactgtggaagttaaaggaggagagcactgttactaccagggccatatccgaggaaaccctgactcatttgttgcattgtcaacatgccacggacttcatgggatgttctatgacgggaaccacacatatctcattgagccagaagaaaatgacactactcaagaggatttccattttcattcagtttacaaatccagactgtttgaattttccttggatgatcttccatctgaatttcagcaagtaaacattactccatcaaaatttattttgaagccaagaccaaaaaggagtaaacggcagcttcgtcgatatcctcgtaatgtagaagaagaaaccaaatacattgaactgatgattgtgaatgatcaccttatgtttaaaaaacatcggctttccgttgtacataccaatacctatgcgaaatctgtggtgaacatggcagatttaatatataaagaccaacttaagaccaggatagtattggttgctatggaaacctgggcgactgacaacaagtttgccatatctgaaaatccattgatcaccctacgtgagtttatgaaatacaggagggattttatcaaagagaaaagtgatgcagttcaccttttttcgggaagtcaatttgagagtagccggagcggggcagcttatattggtgggatttgctcgttgctgaaaggaggaggcgtgaatgaatttgggaaaactgatttaatggctgttacacttgcccagtcattagcccataatattggtattatctcagacaaaagaaagttagcaagtggtgaatgtaaatgcgaggacacgtggtccgggtgcataatgggagacactggctattatcttcctaaaaagttcacccagtgtaatattgaagagtatcatgacttcctgaatagtggaggtggtgcctgccttttcaacaaaccttctaagcttcttgatcctcctgagtgtggcaatggcttcattgaaactggagaggagtgtgattgtggaaccccggccgaatgtgtccttgaaggagcagagtgttgtaagaaatgcaccttgactcaagactctcaatgcagtgacggtctttgctgtaaaaagtgcaagtttcagcctatgggcactgtgtgccgagaagcagtaaatgattgtgatattcgtgaaacgtgctcaggaaattcaagccagtgtgcccctaatattcataaaatggatggatattcatgtgatggtgttcagggaatttgctttggaggaagatgcaaaaccagagatagacaatgcaaatacatttgggggcaaaaggtgacagcatcagacaaatattgctatgagaaactgaatattgaagggacggagaagggtaactgtgggaaagacaaagacacatggatacagtgcaacaaacgggatgtgctttgtggttaccttttgtgtaccaatattggcaatatcccaaggcttggagaactcgatggtgaaatcacatctactttagttgtgcagcaaggaagaacattaaactgcagtggtgggcatgttaagcttgaagaagatgtagatcttggctatgtggaagatgggacaccttgtggtccccaaatgatgtgcttagaacacaggtgtcttcctgtggcttctttcaactttagtacttgcttgagcagtaaagaaggcactatttgctcaggaaatggagtttgcagtaatgagctgaagtgtgtgtgtaacagacactggataggttctgattgcaacacttacttccctcacaatgatgatgcaaagactggtatcactctgtctggcaatggtgttgctggcaccaatatcataataggcataattgctggcaccattttagtgctggccctcatattaggaataactgcgtggggttataaaaactatcgagaacagaggtcaaatgggctctctcattcttggagtgaaaggattccagacacaaaacatatttcagacatctgtgaaaatgggcgacctcgaagtaactcttggcaaggtaacctgggaggcaacaaaaagaaaatcagaggcaaaagatttagacctcggtctaattcaactgagtatttaaacccatggttcaaaagagactataatgtagctaagtgggtagaagatgtgaataaaaacactgaaggaccatactttaggactttatctcctgccaagtctccttcttcatcaactgggtctattgcctccagcagaaaatacccttacccaatgcctccacttcctgatgaggacaagaaagtgaaccgacaaagtgccaggctatgggagacatccatttaagatcaactgtttacatgtgatacatcgaaaactgtttacttcaacttttacttcagacaatacgaagaccctctgagatgctacagaggagaggaagcggagtttcacatctggttaccattttctttttgtcattggcttaggatttaactaaccatgaaaagaactactgaaatattacactataacatggaacaataaaggtactggtatgttaatggataatccgcatgacagataatatgtagaaatattcataaagttaactcacatgacccaaatgtagcaagtttcctaaggtacaatagtggattcagaacttgacgttctgaggcacatcctcactgtaaacagtaatgctatatgcatgaagcttctgtttattgttttccatatttaaggaaacaacatcccataatagaaatgagcatgcagggctaaggcatataggatttttctgcaggactttaaagctttgaaaggccaatatcccataggctaactttaaacatgtatttttatttttgttttgttttttacttttcatatttatattagcatacaaggacaattgtatatatgtaacatttttaaaattttaaaaaaaaaaaaaa

SEQ ID NO: 498 - protein, 899 aa, Homo sapiens
MQAAVAVSVPFLLLCVLGTCPPARCGQAGDASLMELEKRKENRFVERQSIVPLRLIYRSGGEDESRHDALDTRVRGDLGGPQLTHVDQASFQVDAFGTSFILDVVLNHDLLSSEYIERHIEHGGKTVEVKGGEHCYYQGHIRGNPDSFVALSTCHGLHGMFYDGNHTYLIEPEENDTTQEDFHFHSVYKSRLFEFSLDDLPSEFQQVNITPSKFILKPRPKRSKRQLRRYPRNVEEETKYIELMIVNDHLMFKKHRLSVVHTNTYAKSVVNMADLIYKDQLKTRIVLVAMETWATDNKFAISENPLITLREFMKYRRDFIKEKSDAVHLFSGSQFESSRSGAAYIGGICSLLKGGGVNEFGKTDLMAVTLAQSLAHNIGIISDKRKLASGECKCEDTWSGCIMGDTGYYLPKKFTQCNIEEYHDFLNSGGGACLFNKPSKLLDPPECGNGFIETGEECDCGTPAECVLEGAECCKKCTLTQDSQCSDGLCCKKCKFQPMGTVCREAVNDCDIRETCSGNSSQCAPNIHKMDGYSCDGVQGICFGGRCKTRDRQCKYIWGQKVTASDKYCYEKLNIEGTEKGNCGKDKDTWIQCNKRDVLCGYLLCTNIGNIPRLGELDGEITSTLVVQQGRTLNCSGGHVKLEEDVDLGYVEDGTPCGPQMMCLEHRCLPVASFNFSTCLSSKEGTICSGNGVCSNELKCVCNRHWIGSDCNTYFPHNDDAKTGITLSGNGVAGTNIIIGIIAGTILVLALILGITAWGYKNYREQRSNGLSHSWSERIPDTKHISDICENGRPRSNSWQGNLGGNKKKIRGKRFRPRSNSTEYLNPWFKRDYNVAKWVEDVNKNTEGPYFRTLSPAKSPSSSTGSIASSRKYPYPMPPLPDEDKKVNRQSARLWETSI

SEQ ID NO: 499 - DNA, 3455 bp, Homo sapiens
gcggagcgagggaaacggactcggcggcgccggcatgaggagctgagcgtctcgggcgaggcgggctgacggcagcaccatgcaggcggcagtggctgtgtccgtgcccttcttgctgctctgtgtcctggggacctgccctccggcgcgctgcggccaggcaggagacgcctcattgatggagctagagaagaggaaggaaaaccgcttcgtggagcgccagagcatcgtgccactgcgcctcatctaccgctcgggcggcgaagacgaaagtcggcacgacgcgctcgacacgcgggtgcggggcgacctcggtggcccgcagttgactcatgttgaccaagcaagcttccaggttgatgcctttggaacgtcattcattctcgatgtcgtgctaaatcatgatttgctgtcctctgaatacatagagagacacattgaacatggaggcaagactgtggaagttaaaggaggagagcactgttactaccagggccatatccgaggaaaccctgactcatttgttgcattgtcaacatgccacggacttcatgggatgttctatgacgggaaccacacatatctcattgagccagaagaaaatgacactactcaagaggatttccattttcattcagtttacaaatccagactgtttgaattttccttggatgatcttccatctgaatttcagcaagtaaacattactccatcaaaatttattttgaagccaagaccaaaaaggagtaaacggcagcttcgtcgatatcctcgtaatgtagaagaagaaaccaaatacattgaactgatgattgtgaatgatcaccttatgtttaaaaaacatcggctttccgttgtacataccaatacctatgcgaaatctgtggtgaacatggcagatttaatatataaagaccaacttaagaccaggatagtattggttgctatggaaacctgggcgactgacaacaagtttgccatatctgaaaatccattgatcaccctacgtgagtttatgaaatacaggagggattttatcaaagagaaaagtgatgcagttcaccttttttcgggaagtcaatttgagagtagccggagcggggcagcttatattggtgggatttgctcgttgctgaaaggaggaggcgtgaatgaatttgggaaaactgatttaatggctgttacacttgcccagtcattagcccataatattggtattatctcagacaaaagaaagttagcaagtggtgaatgtaaatgcgaggacacgtggtccgggtgcataatgggagacactggctattatcttcctaaaaagttcacccagtgtaatattgaagagtatcatgacttcctgaatagtggaggtggtgcctgccttttcaacaaaccttctaagcttcttgatcctcctgagtgtggcaatggcttcattgaaactggagaggagtgtgattgtggaaccccggccgaatgtgtccttgaaggagcagagtgttgtaagaaatgcaccttgactcaagactctcaatgcagtgacggtctttgctgtaaaaagtgcaagtttcagcctatgggcactgtgtgccgagaagcagtaaatgattgtgatattcgtgaaacgtgctcaggaaattcaagccagtgtgcccctaatattcataaaatggatggatattcatgtgatggtgttcagggaatttgctttggaggaagatgcaaaaccagagatagacaatgcaaatacatttgggggcaaaaggtgacagcatcagacaaatattgctatgagaaactgaatattgaagggacggagaagggtaactgtgggaaagacaaagacacatggatacagtgcaacaaacgggatgtgctttgtggttaccttttgtgtaccaatattggcaatatcccaaggcttggagaactcgatggtgaaatcacatctactttagttgtgcagcaaggaagaacattaaactgcagtggtgggcatgttaagcttgaagaagatgtagatcttggctatgtggaagatgggacaccttgtggtccccaaatgatgtgcttagaacacaggtgtcttcctgtggcttctttcaactttagtacttgcttgagcagtaaagaaggcactatttgctcaggaaatggagtttgcagtaatgagctgaagtgtgtgtgtaacagacactggataggttctgattgcaacacttacttccctcacaatgatgatgcaaagactggtatcactctgtctggcaatggtgttgctggcaccaatatcataataggcataattgctggcaccattttagtgctggccctcatattaggaataactgcgtggggttataaaaactatcgagaacagagacagttaccccagggagattatgtaaaaaagcctggagatggtgactctttttatagcgacattcctcccggagtcagcacaaactcagcatctagttctaagaagaggtcaaatgggctctctcattcttggagtgaaaggattccagacacaaaacatatttcagacatctgtgaaaatgggcgacctcgaagtaactcttggcaaggtaacctgggaggcaacaaaaagaaaatcagaggcaaaagatttagacctcggtctaattcaactgagactttatctcctgccaagtctccttcttcatcaactgggtctattgcctccagcagaaaatacccttacccaatgcctccacttcctgatgaggacaagaaagtgaaccgacaaagtgccaggctatgggagacatccatttaagatcaactgtttacatgtgatacatcgaaaactgtttacttcaacttttatagaaacccaggctcatggaatcactgcaaatctatctgctcttcagacaatacgaagaccctctgagatgctacagaggagaggaagcggagtttcacatctggttaccattttctttttgtcattggcttaggatttaactaaccatgaaaagaactactgaaatattacactataacatggaacaataaaggtactggtatgttaatggataatccgcatgacagataatatgtagaaatattcataaagttaactcacatgacccaaatgtagcaagtttcctaaggtacaatagtggattcagaacttgacgttctgaggcacatcctcactgtaaacagtaatgctatatgcatgaagcttctgtttattgttttccatatttaaggaaacaacatcccataatagaaatgagcatgcagggctaaggcatataggatttttctgcaggactttaaagctttgaaaggccaatatcccataggctaactttaaacatgtatttttatttttgttttgttttttacttttcatatttatattagcatacaaggacaattgtatatatgtaacatttttaaaattttaaaaaaaaaaaaaa

SEQ ID NO: 500 - protein, 906 aa, Homo sapiens
MQAAVAVSVPFLLLCVLGTCPPARCGQAGDASLMELEKRKENRFVERQSIVPLRLIYRSGGEDESRHDALDTRVRGDLGGPQLTHVDQASFQVDAFGTSFILDVVLNHDLLSSEYIERHIEHGGKTVEVKGGEHCYYQGHIRGNPDSFVALSTCHGLHGMFYDGNHTYLIEPEENDTTQEDFHFHSVYKSRLFEFSLDDLPSEFQQVNITPSKFILKPRPKRSKRQLRRYPRNVEEETKYIELMIVNDHLMFKKHRLSVVHTNTYAKSVVNMADLIYKDQLKTRIVLVAMETWATDNKFAISENPLITLREFMKYRRDFIKEKSDAVHLFSGSQFESSRSGAAYIGGICSLLKGGGVNEFGKTDLMAVTLAQSLAHNIGIISDKRKLASGECKCEDTWSGCIMGDTGYYLPKKFTQCNIEEYHDFLNSGGGACLFNKPSKLLDPPECGNGFIETGEECDCGTPAECVLEGAECCKKCTLTQDSQCSDGLCCKKCKFQPMGTVCREAVNDCDIRETCSGNSSQCAPNIHKMDGYSCDGVQGICFGGRCKTRDRQCKYIWGQKVTASDKYCYEKLNIEGTEKGNCGKDKDTWIQCNKRDVLCGYLLCTNIGNIPRLGELDGEITSTLVVQQGRTLNCSGGHVKLEEDVDLGYVEDGTPCGPQMMCLEHRCLPVASFNFSTCLSSKEGTICSGNGVCSNELKCVCNRHWIGSDCNTYFPHNDDAKTGITLSGNGVAGTNIIIGIIAGTILVLALILGITAWGYKNYREQRQLPQGDYVKKPGDGDSFYSDIPPGVSTNSASSSKKRSNGLSHSWSERIPDTKHISDICENGRPRSNSWQGNLGGNKKKIRGKRFRPRSNSTETLSPAKSPSSSTGSIASSRKYPYPMPPLPDEDKKVNRQSARLWETSI

SEQ ID NO: 501 - DNA, 422 bp, Homo sapiens
catatgttgatcccaaacatgcaatgacatccatataaaccttgcaaaatgatggctgtgatgacacccagtgatggtctttctcaactctctgtacctcatctcactcatcagagactttggagcctcagttgccttgcaatgctgtttcaggctgtactcattctttctgcaccacaaatgtcatgccttctcaagtgtttttatgccctggacccattgcatccagtgatgtcagaggaattctcagctcaatatcgtcacatgatggatcagagatacagaactagaattcatgagggatacatatctcaagtgaaaggtgcatatctacggattgtccacaagaaaccaatcagttatgcaaaatcttttccaaaggaaatgggaaattaaggaaaaaagtgaataaaactttacaa

SEQ ID NO: 502 - protein, 115 aa, Homo sapiens
MMAVMTPSDGLSQLSVPHLTHQRLWSLSCLAMLFQAVLILSAPQMSCLLKCFYALDPLHPVMSEEFSAQYRHMMDQRYRTRIHEGYISQVKGAYLRIVHKKPISYAKSFPKEMGN

SEQ ID NO: 503 - DNA, 3811 bp, Homo sapiens
ctattgaagccacctgctcaggacaatgaaattcttcagttacattctggtttatcgccgatttctcttcgtggttttcactgtgttggttttactacctctgcccatcgtcctccacaccaaggaagcagaatgtgcctacacactctttgtggtcgccacattttggctcacagaagcattgcctctgtcggtaacagctttgctacctagtttaatgttacccatgtttgggatcatgccttctaagaaggtggcatctgcttatttcaaggattttcacttactgctaattggagttatctgtttagcaacatccatagaaaaatggaatttgcacaagagaattgctctgaaaatggtgatgatggttggtgtaaatcctgcatggctgacgctggggttcatgagcagcactgcctttttgtctatgtggctcagcaacacctcgacggctgccatggtgatgcccattgcggaggctgtagtgcagcagatcatcaatgcagaagcagaggtcgaggccactcagatgacttacttcaacggatcaaccaaccacggactagaaattgatgaaagtgttaatggacatgaaataaatgagaggaaagagaaaacaaaaccagttccaggatacaataatgatacagggaaaatttcaagcaaggtggagttggaaaagaactcaggcatgagaaccaaatatcgaacaaagaagggccacgtgacacgtaaacttacgtgtttgtgcattgcctactcttctaccattggtggactgacaacaatcactggtacctccaccaacttgatctttgcagagtatttcaatacacgctatcctgactgtcgttgcctcaactttggatcatggtttacgttttccttcccagctgcccttatcattctactcttatcctggatctggcttcagtggcttttcctaggattcaattttaaggagatgttcaaatgtggcaaaaccaaaacagtccaacaaaaagcttgtgctgaggtgattaagcaagaataccaaaagcttgggccaataaggtatcaagaaattgtgaccttggtcctcttcattataatggctctgctatggtttagtcgagaccccggatttgttcctggttggtctgcacttttttcagagtaccctggttttgctacagattcaactgttgctttacttatagggctgctattctttcttatcccagctaagacactgactaaaactacacctacaggagaaattgttgcttttgattactctccactgattacttggaaagaattccagtcattcatgccctgggatatagccattcttgttggtggagggtttgccctggcagatggttgtgaggagtctggattatctaagtggataggaaataaattatctcctctgggttcattaccagcatggctaataattctgatatcttctttgatggtgacatctttaactgaggtagccagcaatccagctaccattacactctttctcccaatattatctccattggccgaagccattcatgtgaaccctctttatattctgataccttctactctgtgtacttcatttgcattcctcctaccagtagcaaatccacccaatgctattgtcttttcatatggtcatctgaaagtcattgacatggttaaagctggacttggtgtcaacattgttggtgttgctgtggttatgcttggcatatgtacttggattgtacccatgtttgacctctacacttacccttcgtgggctcctgctatgagtaatgagaccatgccataataagcacaaaatttctgactatcttgcggtaatttctggaagacattaatgattgactgtaaaatgtggctctaaataactaatgacacacatttaaatcagttatggtgtagctgctgcaattcccgtgaatacccgaaacctgctgttataactcagagtccatatttgttattgcagtgcaactaaagagcatctatgtgccttcatcaagaagcccatgttttgagattttgctcatgaaccatctgcaacttgcttcatcataagaataatttataacttgaccttcaaagagattagagcatttgtttcatcttacagttggagttcaatgtaacattttaaatgcaatttattatttcagaaatttcccatgaaactaaaaatagaaaataagatatacaagttaattcggtacttggataaatcatttctgcattgttgttccagagaatttgctgagaaatcaaagccatggtcatctggtgatgaagagaaaagtttaatctaaatgatatgtgcatttcctcatttaaaaaatccaattggattattcttaatatatacatgtaatatgaaaattgagattgaagcactaattccaaaattatggctgaatatactaaataacagaaaagttacagataagaatttatttctactgaactctatagttagtgtaatataattcatatttttatgatattggcacactgagaaattcattttgtagagctatggataaggcttgctatgatttgcactattagtacagtatagttagaaaggaaagctgaacactataaaactattaacatattttcgtatatgagtaacaactttgcttaagtgtttatcttagttcagaaatacataatgtcatatgttaaaaataaagagatgtagaaatctaaatgaattatcactgtgtatacagacagaaaaatcacataactctggtgtgttaacattgcaatgaaaaaatgaaaaaaagaaggaaaaaagaataagaatgaaaactgctgacgtattacaaaacagaaaaataaatgatttaaaatcaaatcaaaaagaaaaaactaaacatttaaacaaaaatgggataagaatagtcttctagaagtgaggatgcgaaaaagaatgagtttccaattaccctgatgtgacaattacacattgtagacaggtagcaaaatatcacatacacccccaaaatatgtacaaatattatatatcaataaataaatttttaaagagtaagtgctattggcattccaaaattcagctaaaggaaaaatgatcaaaaacaaagtaaggtgcacagttagcaaaagatgcagatgttatatcacagcaattctcatgctaaaaatacaacaaaagacaaagcaaaaaataaacctttgcttttttttttttttttttttttttgagacggagtctcgctctgtcgcccaggctggagtgcagtggcgggatctcggctcactgcaagctccgcctcccaggttcacgccattctcctgcctcagccaaacctttgctatttttaatcttcgttggcactttccagctgttactgaccttgtcattttttattcaaataagattatttacaaacttattcttgaaactaaatatagtaaagagggtttttaaaataatatttaacatacgaattattaattggccatgttcattatttatctatgtttattaatgggccaatgcaaaaaatcattttttcaaagaaaaatttgtccatgtaaagcttaaattataatattgctgctttgtataactcttctatgtttattctattcatttgttcctttccctaccatattttacacatgtatttataatctgtagtatttattacatttctgcttttttctagtcattcaatttatcactgctgaattgcatcagatcatggatgcatttttattatgaaaaaataaaatgacttttcaaattaaaaaaaaaaaaaaa

SEQ ID NO: 504 - protein, 595 aa, Homo sapiens
MKFFSYILVYRRFLFVVFTVLVLLPLPIVLHTKEAECAYTLFVVATFWLTEALPLSVTALLPSLMLPMFGIMPSKKVASAYFKDFHLLLIGVICLATSIEKWNLHKRIALKMVMMVGVNPAWLTLGFMSSTAFLSMWLSNTSTAAMVMPIAEAVVQQIINAEAEVEATQMTYFNGSTNHGLEIDESVNGHEINERKEKTKPVPGYNNDTGKISSKVELEKNSGMRTKYRTKKGHVTRKLTCLCIAYSSTIGGLTTITGTSTNLIFAEYFNTRYPDCRCLNFGSWFTFSFPAALIILLLSWIWLQWLFLGFNFKEMFKCGKTKTVQQKACAEVIKQEYQKLGPIRYQEIVTLVLFIIMALLWFSRDPGFVPGWSALFSEYPGFATDSTVALLIGLLFFLIPAKTLTKTTPTGEIVAFDYSPLITWKEFQSFMPWDIAILVGGGFALADGCEESGLSKWIGNKLSPLGSLPAWLIILISSLMVTSLTEVASNPATITLFLPILSPLAEAIHVNPLYILIPSTLCTSFAFLLPVANPPNAIVFSYGHLKVIDMVKAGLGVNIVGVAVVMLGICTWIVPMFDLYTYPSWAPAMSNETMP

SEQ ID NO: 505 - DNA, 3522 bp, Homo sapiens
acgcttgcgcggcgagtagaacgtgtggcggcggcggagatcgcgtctctttcgctccgtgtcccgctgctgctcctgtgagcgcccggcgagtccgtcccgtccaccgtccgcagctggtagccagcctgcccctcgcctcgactccctttcaccaacaccgacacccacattgacacctccagtccggccagccgctccactcgttgcctttgcatctccacacatggcgtcctccgcgcagagcggcggctcctccgggggacccgcggtccccaccgtgcagcggggcatcatcaagatggtcctctcagggtgcgccatcattgtccgaggtcagcctcgtggtgggcctcctcctgagcggcagatcaacctcagcaacattcgtgctggaaatcttgctcgccgggcagccgccacacaacctgatgcaaaggatacccctgatgagccctgggcatttccagctcgagagttccttcgaaagaagctgattgggaaggaagtctgtttcacgatagaaaacaagactccccaggggcgagagtatggcatgatctaccttggaaaagataccaatggggaaaacattgcagaatcactggttgcagagggcttagccacccggagagaaggcatgagagctaataatcctgagcagaaccggctttcagaatgtgaagaacaagcaaaggcagccaagaaagggatgtggagtgaggggaacggttcacatactatccgggatctcaagtataccattgaaaacccaaggcactttgtggactcacaccaccagaagcctgttaatgctatcatcgagcatgtgcgggacggcagtgtggtcagggccctgctcctcccagattactacctggttacagtcatgctgtcaggcatcaagtgcccaacttttcgacgggaagcagatggcagtgaaactccagagccttttgctgcagaagccaaatttttcactgagtcgcgactgcttcagagagatgttcagatcattctggagagctgccacaaccagaacattctgggtaccatccttcatccaaatggcaacatcacagagctcctcctgaaggaaggtttcgcacgctgtgtggactggtcgattgcagtttacacccggggcgcagaaaagctgagggcggcagagaggtttgccaaagagcgcaggctgagaatatggagagactatgtggctcccacagctaatttggaccaaaaggacaagcagtttgttgccaaggtgatgcaggttctgaatgctgatgccattgttgtgaagctgaactcaggcgattacaagacgattcacctgtccagcatccgaccaccgaggctggagggggagaacacccaggataagaacaagaaactgcgtcccctgtatgacattccttacatgtttgaggcccgggaatttcttcgaaaaaagcttattgggaagaaggtcaatgtgacggtggactacattagaccagccagcccagccacagagacagtgcctgccttttcagagcgtacctgtgccactgtcaccattggaggaataaacattgctgaggctcttgtcagcaaaggtctagccacagtgatcagataccggcaggatgatgaccagagatcatcacactacgatgaactgcttgctgcagaggccagagctattaagaatggcaaaggattgcatagcaagaaggaagtgcctatccaccgtgttgcagatatatctggggatacccaaaaagcaaagcagttcctgccttttcttcagcgggcaggtcgttctgaagctgtggtggaatacgtcttcagtggttctcgtctcaaactctatttgccaaaggaaacttgccttatcaccttcttgcttgcaggcattgaatgccccagaggagcccgaaacctcccaggcttggtgcaggaaggagagcccttcagcgaggaagctacacttttcaccaaggaactggtgctgcagcgagaggtggaggtggaggtggagagcatggacaaggccggcaactttatcggctggctgcacatcgacggtgccaacctgtccgtcctgctggtggagcacgcgctctccaaggtccacttcaccgccgaacgcagctcctactacaagtccctgctgtctgccgaggaggccgcaaagcagaagaaagagaaggtctgggcccactatgaggagcagcccgtggaggaggtgatgccagtgctggaggagaaggagcgatctgctagctacaagcccgtgtttgtgactgagatcactgatgacctgcacttctacgtgcaggatgtggagaccggcacccagttggagaagctgatggagaacatgcgcaatgacattgccagtcacccccctgtagagggctcctatgccccccgcaggggagagttctgcattgccaaatttgtagatggagaatggtaccgtgcccgagtagagaaagtcgagtctcctgccaaaatacatgtcttctacattgactacggcaacagagaggtcctgccatccacccgcctgggtaccctatcacctgccttcagcactcgggtgctgccagctcaagccacggagtatgccttcgccttcatccaggtgccccaagatgatgatgcccgcacggacgccgtggacagcgtagttcgggatatccagaacactcagtgcctgctcaacgtggaacacctgagtgccggctgcccccatgtcaccctgcagtttgcagattccaagggcgatgtggggctgggcttggtgaaggaagggctggtcatggtggaggtgcgcaaggagaaacagttccagaaagtgatcacagaatacctgaatgcccaagagtcagccaagagcgccaggctgaacctgtggcgctatggagactttcgagctgatgatgcagacgaatttggctacagccgctaaggaggggatcgggtttggcccccagccccgctcacgccagtccctcttcctctgccgggagggtgttttcaactccaaaccccagagaggggttgtagattgggtccagctttgcttcagtgtgtggaaatgtctcgtggggtggcatcggggctgcggggtggggaccccaaggctttctggggcagacccttgtcctctgggatgatgggcactgctatccacagtctctgccagttggttttatttggaggtttgtgggctttttttaaaaaaaaaaagtcctcaaatcaggaagaaacatcaaagactatgtcctagtggagggagtaatcctaacacccaggctggccgccagctggcacctgcctctatcccagactgccctcgtcccagctctctgtccaactgttgattatgtgatttttctgatacgtccattctcaaatgccagtgtgttcacatcttcgctctggccagcccattctgtatttaaagcttttgaggcccaataaaatagtacgtgctgtctgcagcccttattgatcaaaaaaaaaaaaaaa

SEQ ID NO: 506 - protein, 910 aa, Homo sapiens
MASSAQSGGSSGGPAVPTVQRGIIKMVLSGCAIIVRGQPRGGPPPERQINLSNIRAGNLARRAAATQPDAKDTPDEPWAFPAREFLRKKLIGKEVCFTIENKTPQGREYGMIYLGKDTNGENIAESLVAEGLATRREGMRANNPEQNRLSECEEQAKAAKKGMWSEGNGSHTIRDLKYTIENPRHFVDSHHQKPVNAIIEHVRDGSVVRALLLPDYYLVTVMLSGIKCPTFRREADGSETPEPFAAEAKFFTESRLLQRDVQIILESCHNQNILGTILHPNGNITELLLKEGFARCVDWSIAVYTRGAEKLRAAERFAKERRLRIWRDYVAPTANLDQKDKQFVAKVMQVLNADAIVVKLNSGDYKTIHLSSIRPPRLEGENTQDKNKKLRPLYDIPYMFEAREFLRKKLIGKKVNVTVDYIRPASPATETVPAFSERTCATVTIGGINIAEALVSKGLATVIRYRQDDDQRSSHYDELLAAEARAIKNGKGLHSKKEVPIHRVADISGDTQKAKQFLPFLQRAGRSEAVVEYVFSGSRLKLYLPKETCLITFLLAGIECPRGARNLPGLVQEGEPFSEEATLFTKELVLQREVEVEVESMDKAGNFIGWLHIDGANLSVLLVEHALSKVHFTAERSSYYKSLLSAEEAAKQKKEKVWAHYEEQPVEEVMPVLEEKERSASYKPVFVTEITDDLHFYVQDVETGTQLEKLMENMRNDIASHPPVEGSYAPRRGEFCIAKFVDGEWYRARVEKVESPAKIHVFYIDYGNREVLPSTRLGTLSPAFSTRVLPAQATEYAFAFIQVPQDDDARTDAVDSVVRDIQNTQCLLNVEHLSAGCPHVTLQFADSKGDVGLGLVKEGLVMVEVRKEKQFQKVITEYLNAQESAKSARLNLWRYGDFRADDADEFGYSR

SEQ ID NO: 507 - DNA, 3226 bp, Homo sapiens
aggaggagggccgggcgggcaggggaggaggaggaggcgggcgccgtgtcgcacgcagctccaggcggggcagccccggtagctgagggacgcagctagaccttggcgggacggggctttcgccggggcccaggcccagggaccaggcggaggcgtcgcgggagcctttggggcaccacagagatgcgggtttgcctgcaatgagatttcattctctacatttaaaggacatcctttctgagctgctgtgaataaatttggaatggtactgtatattttcatctaatggagaactagctgtactttgaataaggattgctgcactggacgactttagaacatccctcacaatgtcgtcaacccggagccagaacccccacggcctgaagcagattggcctggaccagatctgggacgacctcagagccggcatccagcaggtgtacacacggcagagcatggccaagtccagatatatggagctctacactcatgtttataactactgtactagtgttcaccagtcaaaccaagcacgaggagctggagttcctccttctaagtcgaaaaaggggcagacacctggaggagctcagtttgttggcctggaattatataaacgacttaaggaatttttgaagaattacttgacaaatcttcttaaggatggagaagatttgatggatgagagtgtactgaaattctacactcaacaatgggaagattatcgattttcaagcaaagtgctgaatggaatttgtgcctacctcaatagacattgggttcgccgtgaatgtgacgaaggacgaaaaggaatatatgaaatctattcgcttgcattggtgacttggagagactgtctgttcaggccactgaataaacaggtaacaaatgctgttttaaagctgattgaaaaggaaaggaatggtgaaaccatcaatacaagattgattagtggagttgtacagtcttacgtggaattggggctgaatgaagatgatgcatttgcaaagggccctacgttaacagtgtataaagaatcctttgaatctcaatttttggctgacacagagagattttataccagagagagtactgaattcttgcagcagaacccagttactgaatatatgaaaaaggcagaggctcgtctgcttgaggaacaacgaagagttcaggtttaccttcatgaaagcacacaagatgaattagcaaggaaatgtgaacaagtcctcattgaaaaacacttggaaattttccacacagaatttcagaatttattggatgctgacaaaaatgaagatttgggacgcatgtataatcttgtatctagaatccaggatggcctaggagaattgaaaaaactgttggagacacacattcataatcagggtcttgcagccattgaaaagtgtggagaagctgctttaaatgaccccaaaatgtatgtacagacagtgcttgatgttcataaaaaatacaatgccctggtaatgtctgcattcaacaatgacgctggctttgtggctgctcttgataaggcttgtggtcgcttcataaacaacaacgcggttaccaagatggcccaatcatccagtaaatcccctgagttgctggctcgatactgtgactccttgttgaagaaaagttccaagaacccagaggaggcagaactagaagacacactcaatcaagtgatggttgtcttcaagtacatagaagacaaagacgtatttcagaagttctatgcgaagatgctcgccaagaggctcgtccaccagaacagtgcaagtgacgatgccgaagccagcatgatctccaagttaaagcaagcttgcgggttcgagtacacctctaaacttcagcgcatgtttcaagacattggcgtgagcaaagatctgaacgagcaattcaaaaagcacttgacaaactcagaacccctagacttggatttcagcattcaagtgctgagctccgggtcctggcccttccagcagtcttgtacatttgccttgccgtcagagttggaacgtagttatcagcgattcacagctttctacgccagccgccacagtggccgaaaattgacgtggttatatcagttgtctaaaggagaattggtaactaactgcttcaaaaacagatatactttgcaggcgtcgacattccagatggctatcctgcttcagtacaacacggaagatgcctacactgtgcagcagctgaccgacagcactcaaattaaaatggacattttggcgcaagttttacagattttattaaagtcgaagctattggtcttggaagatgaaaatgcaaatgttgatgaggtggaattgaagccagataccttaataaaattatatcttggttataaaaataagaaattaagggttaacatcaatgtgccaatgaaaaccgaacagaagcaggaacaagaaaccacacacaaaaacatcgaggaagaccgcaaactactgattcaggcggccatcgtgagaatcatgaagatgaggaaggttctgaaacaccagcagttacttggcgaggtcctcactcagctgtcctccaggttcaaacctcgagtccctgtgatcaagaaatgcattgacattctaattgagaaagaatatttggagcgagtggatggtgaaaaggacacctacagttacttggcttaacccttctggaagggtctgactgtgtgacccgcagcaaatagttcatgttggaaagaatgaaaacaactcaagttcatagcagccagcctgccgccattggacctcccttttaaaaactgagaccaagactcccatcagctggtctcggatttacatcggaactgctcaggattgatacatttcaagtctgtaaatacggacaccaacgccatttaccctaatttaagaacagcggggactgaccctccgtgccgagggctgcatgctaccgcactaagtcaatacatgggctccccgattcgcagctgtcgtcttggcagcacttgtcacgttggcagcactttgagagcaagtctgagtggacccacatgtaacctgctatgaaaaccatttgtatagtgtgtttcattttttaatgtgtgaaaataaagaaaattaaaggatttctgtacaagtcgcattgggttttgttttaagttttactaatttctatatgtaaataaaagatataatgattgtgcaaatttaaaaaaaaaaaaaaaaaa

SEQ ID NO: 508 - protein, 776 aa, Homo sapiens
MSSTRSQNPHGLKQIGLDQIWDDLRAGIQQVYTRQSMAKSRYMELYTHVYNYCTSVHQSNQARGAGVPPSKSKKGQTPGGAQFVGLELYKRLKEFLKNYLTNLLKDGEDLMDESVLKFYTQQWEDYRFSSKVLNGICAYLNRHWVRRECDEGRKGIYEIYSLALVTWRDCLFRPLNKQVTNAVLKLIEKERNGETINTRLISGVVQSYVELGLNEDDAFAKGPTLTVYKESFESQFLADTERFYTRESTEFLQQNPVTEYMKKAEARLLEEQRRVQVYLHESTQDELARKCEQVLIEKHLEIFHTEFQNLLDADKNEDLGRMYNLVSRIQDGLGELKKLLETHIHNQGLAAIEKCGEAALNDPKMYVQTVLDVHKKYNALVMSAFNNDAGFVAALDKACGRFINNNAVTKMAQSSSKSPELLARYCDSLLKKSSKNPEEAELEDTLNQVMVVFKYIEDKDVFQKFYAKMLAKRLVHQNSASDDAEASMISKLKQACGFEYTSKLQRMFQDIGVSKDLNEQFKKHLTNSEPLDLDFSIQVLSSGSWPFQQSCTFALPSELERSYQRFTAFYASRHSGRKLTWLYQLSKGELVTNCFKNRYTLQASTFQMAILLQYNTEDAYTVQQLTDSTQIKMDILAQVLQILLKSKLLVLEDENANVDEVELKPDTLIKLYLGYKNKKLRVNINVPMKTEQKQEQETTHKNIEEDRKLLIQAAIVRIMKMRKVLKHQQLLGEVLTQLSSRFKPRVPVIKKCIDILIEKEYLERVDGEKDTYSYLA

SEQ ID NO: 509 - DNA, 2695 bp, Homo sapiens
caaataaaagcgatggcgattgggctgccgcgtttggcgctcggtccggtcgcgtccgacacccggtgggactcagaaggcagtggagccccggcggcggcggcggcggcgcgcgggggcgacgcgcgggaacaacgcgagtcggcgcgcgggacgaagaataatcatgggccagactgggaagaaatctgagaagggaccagtttgttggcggaagcgtgtaaaatcagagtacatgcgactgagacagctcaagaggttcagacgagctgatgaagtaaagagtatgtttagttccaatcgtcagaaaattttggaaagaacggaaatcttaaaccaagaatggaaacagcgaaggatacagcctgtgcacatcctgacttctgtgagctcattgcgcgggactagggagtgttcggtgaccagtgacttggattttccaacacaagtcatcccattaaagactctgaatgcagttgcttcagtacccataatgtattcttggtctcccctacagcagaattttatggtggaagatgaaactgttttacataacattccttatatgggagatgaagttttagatcaggatggtactttcattgaagaactaataaaaaattatgatgggaaagtacacggggatagagaatgtgggtttataaatgatgaaatttttgtggagttggtgaatgcccttggtcaatataatgatgatgacgatgatgatgatggagacgatcctgaagaaagagaagaaaagcagaaagatctggaggatcaccgagatgataaagaaagccgcccacctcggaaatttccttctgataaaatttttgaagccatttcctcaatgtttccagataagggcacagcagaagaactaaaggaaaaatataaagaactcaccgaacagcagctcccaggcgcacttcctcctgaatgtacccccaacatagatggaccaaatgctaaatctgttcagagagagcaaagcttacactcctttcatacgcttttctgtaggcgatgttttaaatatgactgcttcctacatcgtaagtgcaattattcttttcatgcaacacccaacacttataagcggaagaacacagaaacagctctagacaacaaaccttgtggaccacagtgttaccagcatttggagggagcaaaggagtttgctgctgctctcaccgctgagcggataaagaccccaccaaaacgtccaggaggccgcagaagaggacggcttcccaataacagtagcaggcccagcacccccaccattaatgtgctggaatcaaaggatacagacagtgatagggaagcagggactgaaacggggggagagaacaatgataaagaagaagaagagaagaaagatgaaacttcgagctcctctgaagcaaattctcggtgtcaaacaccaataaagatgaagccaaatattgaacctcctgagaatgtggagtggagtggtgctgaagcctcaatgtttagagtcctcattggcacttactatgacaatttctgtgccattgctaggttaattgggaccaaaacatgtagacaggtgtatgagtttagagtcaaagaatctagcatcatagctccagctcccgctgaggatgtggatactcctccaaggaaaaagaagaggaaacaccggttgtgggctgcacactgcagaaagatacagctgaaaaaggacggctcctctaaccatgtttacaactatcaaccctgtgatcatccacggcagccttgtgacagttcgtgcccttgtgtgatagcacaaaatttttgtgaaaagttttgtcaatgtagttcagagtgtcaaaaccgctttccgggatgccgctgcaaagcacagtgcaacaccaagcagtgcccgtgctacctggctgtccgagagtgtgaccctgacctctgtcttacttgtggagccgctgaccattgggacagtaaaaatgtgtcctgcaagaactgcagtattcagcggggctccaaaaagcatctattgctggcaccatctgacgtggcaggctgggggatttttatcaaagatcctgtgcagaaaaatgaattcatctcagaatactgtggagagattatttctcaagatgaagctgacagaagagggaaagtgtatgataaatacatgtgcagctttctgttcaacttgaacaatgattttgtggtggatgcaacccgcaagggtaacaaaattcgttttgcaaatcattcggtaaatccaaactgctatgcaaaagttatgatggttaacggtgatcacaggataggtatttttgccaagagagccatccagactggcgaagagctgttttttgattacagatacagccaggctgatgccctgaagtatgtcggcatcgaaagagaaatggaaatcccttgacatctgctacctcctcccccctcctctgaaacagctgccttagcttcaggaacctcgagtactgtgggcaatttagaaaaagaacatgcagtttgaaattctgaatttgcaaagtactgtaagaataatttatagtaatgagtttaaaaatcaactttttattgccttctcaccagctgcaaagtgttttgtaccagtgaatttttgcaataatgcagtatggtacatttttcaactttgaataaagaatacttgaacttgtcaaaaaaaaaa

SEQ ID NO: 510 - protein, 751 aa, Homo sapiens
MGQTGKKSEKGPVCWRKRVKSEYMRLRQLKRFRRADEVKSMFSSNRQKILERTEILNQEWKQRRIQPVHILTSVSSLRGTRECSVTSDLDFPTQVIPLKTLNAVASVPIMYSWSPLQQNFMVEDETVLHNIPYMGDEVLDQDGTFIEELIKNYDGKVHGDRECGFINDEIFVELVNALGQYNDDDDDDDGDDPEEREEKQKDLEDHRDDKESRPPRKFPSDKIFEAISSMFPDKGTAEELKEKYKELTEQQLPGALPPECTPNIDGPNAKSVQREQSLHSFHTLFCRRCFKYDCFLHRKCNYSFHATPNTYKRKNTETALDNKPCGPQCYQHLEGAKEFAAALTAERIKTPPKRPGGRRRGRLPNNSSRPSTPTINVLESKDTDSDREAGTETGGENNDKEEEEKKDETSSSSEANSRCQTPIKMKPNIEPPENVEWSGAEASMFRVLIGTYYDNFCAIARLIGTKTCRQVYEFRVKESSIIAPAPAEDVDTPPRKKKRKHRLWAAHCRKIQLKKDGSSNHVYNYQPCDHPRQPCDSSCPCVIAQNFCEKFCQCSSECQNRFPGCRCKAQCNTKQCPCYLAVRECDPDLCLTCGAADHWDSKNVSCKNCSIQRGSKKHLLLAPSDVAGWGIFIKDPVQKNEFISEYCGEIISQDEADRRGKVYDKYMCSFLFNLNNDFVVDATRKGNKIRFANHSVNPNCYAKVMMVNGDHRIGIFAKRAIQTGEELFFDYRYSQADALKYVGIEREMEIP

SEQ ID NO: 511 - DNA, 2563 bp, Homo sapiens
caaataaaagcgatggcgattgggctgccgcgtttggcgctcggtccggtcgcgtccgacacccggtgggactcagaaggcagtggagccccggcggcggcggcggcggcgcgcgggggcgacgcgcgggaacaacgcgagtcggcgcgcgggacgaagaataatcatgggccagactgggaagaaatctgagaagggaccagtttgttggcggaagcgtgtaaaatcagagtacatgcgactgagacagctcaagaggttcagacgagctgatgaagtaaagagtatgtttagttccaatcgtcagaaaattttggaaagaacggaaatcttaaaccaagaatggaaacagcgaaggatacagcctgtgcacatcctgacttctgtgagctcattgcgcgggactagggaggtggaagatgaaactgttttacataacattccttatatgggagatgaagttttagatcaggatggtactttcattgaagaactaataaaaaattatgatgggaaagtacacggggatagagaatgtgggtttataaatgatgaaatttttgtggagttggtgaatgcccttggtcaatataatgatgatgacgatgatgatgatggagacgatcctgaagaaagagaagaaaagcagaaagatctggaggatcaccgagatgataaagaaagccgcccacctcggaaatttccttctgataaaatttttgaagccatttcctcaatgtttccagataagggcacagcagaagaactaaaggaaaaatataaagaactcaccgaacagcagctcccaggcgcacttcctcctgaatgtacccccaacatagatggaccaaatgctaaatctgttcagagagagcaaagcttacactcctttcatacgcttttctgtaggcgatgttttaaatatgactgcttcctacatccttttcatgcaacacccaacacttataagcggaagaacacagaaacagctctagacaacaaaccttgtggaccacagtgttaccagcatttggagggagcaaaggagtttgctgctgctctcaccgctgagcggataaagaccccaccaaaacgtccaggaggccgcagaagaggacggcttcccaataacagtagcaggcccagcacccccaccattaatgtgctggaatcaaaggatacagacagtgatagggaagcagggactgaaacggggggagagaacaatgataaagaagaagaagagaagaaagatgaaacttcgagctcctctgaagcaaattctcggtgtcaaacaccaataaagatgaagccaaatattgaacctcctgagaatgtggagtggagtggtgctgaagcctcaatgtttagagtcctcattggcacttactatgacaatttctgtgccattgctaggttaattgggaccaaaacatgtagacaggtgtatgagtttagagtcaaagaatctagcatcatagctccagctcccgctgaggatgtggatactcctccaaggaaaaagaagaggaaacaccggttgtgggctgcacactgcagaaagatacagctgaaaaaggacggctcctctaaccatgtttacaactatcaaccctgtgatcatccacggcagccttgtgacagttcgtgcccttgtgtgatagcacaaaatttttgtgaaaagttttgtcaatgtagttcagagtgtcaaaaccgctttccgggatgccgctgcaaagcacagtgcaacaccaagcagtgcccgtgctacctggctgtccgagagtgtgaccctgacctctgtcttacttgtggagccgctgaccattgggacagtaaaaatgtgtcctgcaagaactgcagtattcagcggggctccaaaaagcatctattgctggcaccatctgacgtggcaggctgggggatttttatcaaagatcctgtgcagaaaaatgaattcatctcagaatactgtggagagattatttctcaagatgaagctgacagaagagggaaagtgtatgataaatacatgtgcagctttctgttcaacttgaacaatgattttgtggtggatgcaacccgcaagggtaacaaaattcgttttgcaaatcattcggtaaatccaaactgctatgcaaaagttatgatggttaacggtgatcacaggataggtatttttgccaagagagccatccagactggcgaagagctgttttttgattacagatacagccaggctgatgccctgaagtatgtcggcatcgaaagagaaatggaaatcccttgacatctgctacctcctcccccctcctctgaaacagctgccttagcttcaggaacctcgagtactgtgggcaatttagaaaaagaacatgcagtttgaaattctgaatttgcaaagtactgtaagaataatttatagtaatgagtttaaaaatcaactttttattgccttctcaccagctgcaaagtgttttgtaccagtgaatttttgcaataatgcagtatggtacatttttcaactttgaataaagaatacttgaacttgtcaaaaaaaaaa

SEQ ID NO: 512 - protein, 707 aa, Homo sapiens
MGQTGKKSEKGPVCWRKRVKSEYMRLRQLKRFRRADEVKSMFSSNRQKILERTEILNQEWKQRRIQPVHILTSVSSLRGTREVEDETVLHNIPYMGDEVLDQDGTFIEELIKNYDGKVHGDRECGFINDEIFVELVNALGQYNDDDDDDDGDDPEEREEKQKDLEDHRDDKESRPPRKFPSDKIFEAISSMFPDKGTAEELKEKYKELTEQQLPGALPPECTPNIDGPNAKSVQREQSLHSFHTLFCRRCFKYDCFLHPFHATPNTYKRKNTETALDNKPCGPQCYQHLEGAKEFAAALTAERIKTPPKRPGGRRRGRLPNNSSRPSTPTINVLESKDTDSDREAGTETGGENNDKEEEEKKDETSSSSEANSRCQTPIKMKPNIEPPENVEWSGAEASMFRVLIGTYYDNFCAIARLIGTKTCRQVYEFRVKESSIIAPAPAEDVDTPPRKKKRKHRLWAAHCRKIQLKKDGSSNHVYNYQPCDHPRQPCDSSCPCVIAQNFCEKFCQCSSECQNRFPGCRCKAQCNTKQCPCYLAVRECDPDLCLTCGAADHWDSKNVSCKNCSIQRGSKKHLLLAPSDVAGWGIFIKDPVQKNEFISEYCGEIISQDEADRRGKVYDKYMCSFLFNLNNDFVVDATRKGNKIRFANHSVNPNCYAKVMMVNGDHRIGIFAKRAIQTGEELFFDYRYSQADALKYVGIEREMEIP

SEQ ID NO: 513 - DNA, 901 bp, Homo sapiens
cccaaagtacttgtgtccgggtggtggactggattagctgcggagccctggaagctgcctgtccttctccctgtgcttaaccagaggtgcccatgggttggacaatgaggctggtcacagcagcactgttactgggtctcatgatggtggtcactggagacgaggatgagaacagcccgtgtgcccatgaggccctcttggacgaggacaccctcttttgccagggccttgaagttttctacccagagttggggaacattggctgcaaggttgttcctgattgtaacaactacagacagaagatcacctcctggatggagccgatagtcaagttcccgggggccgtggacggcgcaacctatatcctggtgatggtggatccagatgcccctagcagagcagaacccagacagagattctggagacattggctggtaacagatatcaagggcgccgacctgaagaaagggaagattcagggccaggagttatcagcctaccaggctccctccccaccggcacacagtggcttccatcgctaccagttctttgtctatcttcaggaaggaaaagtcatctctctccttcccaaggaaaacaaaactcgaggctcttggaaaatggacagatttctgaaccgtttccacctgggcgaacctgaagcaagcacccagttcatgacccagaactaccaggactcaccaaccctccaggctcccagagaaagggccagcgagcccaagcacaaaaaccaggcggagatagctgcctgctagatagccggctttgccatccgggcatgtggccacactgcccaccaccgacgatgtgggtatggaaccccctctggatacagaaccccttcttttccaaataaaaaaaaaatcatccaggaaaaaaa

SEQ ID NO: 514 - protein, 227 aa, Homo sapiens
MGWTMRLVTAALLLGLMMVVTGDEDENSPCAHEALLDEDTLFCQGLEVFYPELGNIGCKVVPDCNNYRQKITSWMEPIVKFPGAVDGATYILVMVDPDAPSRAEPRQRFWRHWLVTDIKGADLKKGKIQGQELSAYQAPSPPAHSGFHRYQFFVYLQEGKVISLLPKENKTRGSWKMDRFLNRFHLGEPEASTQFMTQNYQDSPTLQAPRERASEPKHKNQAEIAAC

SEQ ID NO: 515 - DNA, 2709 bp, Homo sapiens
ctttctcgcggcgctgcaaccctcccaccacagcccatccagccccgcccagcgcgccgcggtgcgcatgcgtggaggccctcgctgccgctgagcacctcgggaagtgtagtctcttcgcaggtgcggctgggcagctagagtcctgcatcccggtggaatccggagaagtgagaacattcccgccgcccggtcctcattcccatcttcccacctgtccagtcccctcgcactcccgctgcaccccacgcgccgggcttcagtcagagagtgcactgaggaagagcggagaccccctcttcccctcagcaggctgtgccgggggaggcggggtccaccgcccgccccccgccgtcgctctccccgcctccccttccctcccctcctggcgggtgcggggccggtgtccgaagtcaggcggcggcccccgcagcggccgcaggaggggcggctgcggtgggcgccgcgggcgatgcccctgcccggctgctccggcggggggcagtgcgagcggcggcggcgggggaggaggcggggggcggcggctgcggcggctgcagcagaggggccgagagctggcggtggcggcggcggtggtcgtgaagggcatcggcggcggcggtgatggcagagatgatgtgagtgcccgccggctggagacctggggccgcggagcgcgggacgggcggcggcggcgtgcgggagcggccccgggggcggcggagggatgcggggagcgcgggcagagccggagcggcggccgccaaccggccggcagtggctggagccccgcgctgcggcgccgggggagccgggcccggcgtgggggtcgcgggcggcggcggggcggtcaggccgaggggcgtctgcgattgttctcaacacccctcccccaccccatcccgtgtgtctgtttgttacttgcagctgaagatggaaagagccaggcgaaggggaggcggcggcggccgcggccgcggaggcaagaatgtagggggctctggcctaagcaagagtagactctatccccaggcccagcactcccactacccccactacgcggcctcagccacccctaatcaggccgggggcgcagccgaaatccaggagctggcctccaaacgagtggacatccagaaaaagaggttttacctagacgtgaagcaaagctcccggggccgcttcctaaagatagccgaagtctggatagggagaggccggcaggacaacatcagaaagagtaaactgaccctctccctgtctgtggcagcggagctgaaggactgtctaggggacttcatcgagcactatgcccacctgggcctgaaaggccaccggcaagagcatggccacagcaaagagcaaggctccagaaggaggcagaagcactcggcaccctccccaccagtctcggtggggtccgaagagcatcctcacagtgtcctgaaaacagactatatcgagagggacaataggaaatattacctagacctaaaggaaaatcagcggggtcgcttcctacggattagacaaaccatgatgcgggggactggcatgataggttattttggccacagtttgggccaagaacagactattgtcctcccagcacaaggaatgattgagtttcgtgatgccttggttcagctgattgaagactatggcgaaggagacatagaagaacgaagaggtggagacgatgacccgcttgaactcccagaggggacttctttcagagtggacaataaaaggttctactttgatgtgggctctaataaatatggaattttcctgaagctcacaaattaccccaaatccagagagaatatcaacctttttcactgttgtcaaatcaagcataaggaacagccccatgatactacaaaaacagttgaggaataaggaataaatctcttatgttacacctcagaataaaggcattcggtgaaagaaatgaactgaagttcatcatgaatgcaaggcctcagtacttgacattcctccacggaagggaagacaagtatcaacaccactggcatcatttccaaactgatcttatgttgaataatttccaccacattgaagtacctttcgactctatccagtttttgggttttgttttttttaattcatcaagcctttcgttttcaaaccaccatttgtcagccttgaggtagagagacatatagatttgaaaatactttcttaagagatcatgtaactatataactctgaatttaaaaattgaggggggagggataatttcaacccactgcctcttaccagaaacatttttttaaatctgtaactgctttagtgttaacagggtgcaaggtggtttttgtcccgtattgttcttaaaaggttctcatttattgtgattgtattgtactgtatgagaacaaatcataaattgccttgtattgtttataatagaccataccacgtactacttcagtttttatgttccaagtttttcagtgatgcatgttaacagttaggtcctaaaattctgtggtgctaattctcccatacccaatggtgcttttgtggatgctaactgcacacatgctgaacaaagcttgaagtttaaaactttcctcccttcctctgtttatatgaagtaaaatgaaataacttgaatttgtctcaaagtatcactgacaatctaataaacttgtttatatgtgaaaaaaaaaaaaaaaaaaa

SEQ ID NO: 516 - protein, 322 aa, Homo sapiens
MERARRRGGGGGRGRGGKNVGGSGLSKSRLYPQAQHSHYPHYAASATPNQAGGAAEIQELASKRVDIQKKRFYLDVKQSSRGRFLKIAEVWIGRGRQDNIRKSKLTLSLSVAAELKDCLGDFIEHYAHLGLKGHRQEHGHSKEQGSRRRQKHSAPSPPVSVGSEEHPHSVLKTDYIERDNRKYYLDLKENQRGRFLRIRQTMMRGTGMIGYFGHSLGQEQTIVLPAQGMIEFRDALVQLIEDYGEGDIEERRGGDDDPLELPEGTSFRVDNKRFYFDVGSNKYGIFLKLTNYPKSRENINLFHCCQIKHKEQPHDTTKTVEE

SEQ ID NO: 517 - DNA, 1972 bp, Homo sapiens
ttgttacttgcagctgaagatggaaagagccaggcgaaggggaggcggcggcggccgcggccgcggaggcaagaatgtagggggctctggcctaagcaagagtagactctatccccaggcccagcactcccactacccccactacgcggcctcagccacccctaatcaggccgggggcgcagccgaaatccaggagctggcctccaaacgagtggacatccagaaaaagaggttttacctagacgtgaagcaaagctcccggggccgcttcctaaagatagccgaagtctggatagggagaggccggcaggacaacatcagaaagagtaaactgaccctctccctgtctgtggcagcggagctgaaggactgtctaggggacttcatcgagcactatgcccacctgggcctgaaaggccaccggcaagagcatggccacagcaaagagcaaggctccagaaggaggcagaagcactcggcaccctccccaccagtctcggtggggtccgaagagcatcctcacagtgtcctgaaaacagactatatcgagagggacaataggaaatattacctagacctaaaggaaaatcagcggggtcgcttcctacggattagacaaaccatgatgcgggggactggcatgataggttattttggccacagtttgggccaagaacagactattgtcctcccagcacaaggaatgattgagtttcgtgatgccttggttcagctgattgaagactatggcgaaggagacatagaagaacgaagaggtggagacgatgacccgcttgaactcccagaggggacttctttcagagtggacaataaaaggttctactttgatgtgggctctaataaatatggaattttcctgaaggtaagtgaggtgagaccaccttaccgtaatactattactgttccattcaaagcttggacaaggtttggggagaattttatcaagtatgaagaagagatgaggaaaatttgcaacagccataaagaaaagagaatggatggcagaaaggccagtggtgaagaacaagaatgcctcgactagagtgaaattgaactccatcaggcaaaatttaaaatcacaaattggctaaaagtactgatccattatcctttgaagaagtttttcctcttttttggcccgttgttattagtaatacctctagtagttgatacttcaggaagtctgattctcatgttatgttacacatagatcactataattcttacgggaattccaaccttcccagagctaaatagtttagctgcttcaactgctccagactattgaagtatgcaaatcagcacaaaatgtgacattctgacattctaaataccataactaagatttacattgcactatgacataatcccgaaaaaagatacatatacttaaatagaagtgtgactttcccccaaaagtatttcaattctacttcattaaaagctgctaagcttacctgtagggcagttaccacagaaacagaaattgacctccggtatatataaatatttacttataaaagtacaagtagacgtatattgtccgttgaataactgaatataccatcaaaggatcaaatcttattacctaattaaaccttaaaaatataatgtcataatatttcttaagaatactatagtattctataatttcaaactttgtggtaaccctacattttatagttgccatatcaaagccatgggagagttttaattcgttattctaagtttagttacaatcccttctttacctctacttaatgttccatatatttttattgactttccaaagtttcaggaattacttttatgtcacattgagtgggaggcttcatccaatggctttgctatggaaatcttggtggtgtagcttttcatgctaatttaaagattgcaagaggtttcttccccaaaatatatcatggactcaaggtgttataaaaaaaaaaaa

SEQ ID NO: 518 - protein, 347 aa, Homo sapiens
MERARRRGGGGGRGRGGKNVGGSGLSKSRLYPQAQHSHYPHYAASATPNQAGGAAEIQELASKRVDIQKKRFYLDVKQSSRGRFLKIAEVWIGRGRQDNIRKSKLTLSLSVAAELKDCLGDFIEHYAHLGLKGHRQEHGHSKEQGSRRRQKHSAPSPPVSVGSEEHPHSVLKTDYIERDNRKYYLDLKENQRGRFLRIRQTMMRGTGMIGYFGHSLGQEQTIVLPAQGMIEFRDALVQLIEDYGEGDIEERRGGDDDPLELPEGTSFRVDNKRFYFDVGSNKYGIFLKVSEVRPPYRNTITVPFKAWTRFGENFIKYEEEMRKICNSHKEKRMDGRKASGEEQECLD

SEQ ID NO: 519 - DNA, 5745 bp, Homo sapiens
cagccgcccctcctgcggccgctgcgggggccgccgcctgacttcggacaccggccccgcacccgccaggaggggagggaaggggaggcggggagagcgacggcggggggcgggcggtggaccccgcctcccccggcacagcctgctgaggggaagagggggtctccgctcttcctcagtgcactctctgactgaagcccggcgcgtggggtgcagcgggagtgcgaggggactggacaggtgggaagatgggaatgaggaccgggcggcgggaatgttctcacttctccggattccaccgggatgcaggactctagctgcccagccgcacctgcgaagagactacacttcccgaggtgctcagcggcagcgagggcctccacgcatgcgcaccgcggcgcgctgggcggggctggatgggctgtggtgggagggttgcagcgccgcgagaaaggcgagccgggccgggggcggggaaaggggtggggcaggaacgggggcggggacggcgctggaggggcgggtcgggtaggtctcccggagctgatgtgtactgtgtgcgccggggaggcgccggcttgtactcggcagcgcgggaataaagtttgctgatttggtgtctagcctggatgcctgggttgcaggccctgcttgtggtggcgctccacagtcatccggctgaagaagacctgttggactggatcttctcgggttttctttcagatattgttttgtatttacccatgaagacattgttttttggactctgcaaataggacatttcaaagatgagtgaaaaaaaattggaaacaactgcacagcagcggaaatgtcctgaatggatgaatgtgcagaataaaagatgtgctgtagaagaaagaaaggcatgtgttcggaagagtgtttttgaagatgacctccccttcttagaattcactggatccattgtgtatagttacgatgctagtgattgctctttcctgtcagaagatattagcatgagtctatcagatggggatgtggtgggatttgacatggagtggccaccattatacaatagagggaaacttggcaaagttgcactaattcagttgtgtgtttctgagagcaaatgttacttgttccacgtttcttccatgtcagtttttccccagggattaaaaatgttgcttgaaaataaagcagttaaaaaggcaggtgtaggaattgaaggagatcagtggaaacttctacgtgactttgatatcaaattgaagaattttgtggagttgacagatgttgccaataaaaagctgaaatgtacagagacctggagccttaacagtctggttaaacacctcttaggtaaacagctcctgaaagacaagtctatccgctgtagcaattggagtaaatttcctctcactgaggaccagaaactgtatgcagccactgatgcttatgctggttttattatttaccgaaatttagagattttggatgatactgtgcaaaggtttgctataaataaagaggaagaaatcctacttagcgacatgaacaaacagttgacttcaatctctgaggaagtgatggatctggctaagcatcttcctcatgctttcagtaaattggaaaacccacggagggtttctatcttactaaaggatatttcagaaaatctatattcactgaggaggatgataattgggtctactaacattgagactgaactgaggcccagcaataatttaaacttattatcctttgaagattcaactactgggggagtacaacagaaacaaattagagaacatgaagttttaattcacgttgaagatgaaacatgggacccaacacttgatcatttagctaaacatgatggagaagatgtacttggaaataaagtggaacgaaaagaagatggatttgaagatggagtagaagacaacaaattgaaagagaatatggaaagagcttgtttgatgtcgttagatattacagaacatgaactccaaattttggaacagcagtctcaggaagaatatcttagtgatattgcttataaatctactgagcatttatctcccaatgataatgaaaacgatacgtcctatgtaattgagagtgatgaagatttagaaatggagatgcttaagcatttatctcccaatgataatgaaaacgatacgtcctatgtaattgagagtgatgaagatttagaaatggagatgcttaagtctttagaaaacctcaatagtggcacggtagaaccaactcattctaaatgcttaaaaatggaaagaaatctgggtcttcctactaaagaagaagaagaagatgatgaaaatgaagctaatgaaggggaagaagatgatgataaggactttttgtggccagcacccaatgaagagcaagttacttgcctcaagatgtactttggccattccagttttaaaccagttcagtggaaagtgattcattcagtattagaagaaagaagagataatgttgctgtcatggcaactggatatggaaagagtttgtgcttccagtatccacctgtttatgtaggcaagattggccttgttatctctccccttatttctctgatggaagaccaagtgctacagcttaaaatgtccaacatcccagcttgcttccttggatcagcacagtcagaaaatgttctaacagatattaaattaggtaaataccggattgtatacgtaactccagaatactgttcaggtaacatgggcctgctccagcaacttgaggctgatattggtatcacgctcattgctgtggatgaggctcactgtatttctgagtgggggcatgattttagggattcattcaggaagttgggctccctaaagacagcactgccaatggttccaatcgttgcacttactgctactgcaagttcttcaatccgggaagacattgtacgttgcttaaatctgagaaatcctcagatcacctgtactggttttgatcgaccaaacctgtatttagaagttaggcgaaaaacagggaatatccttcaggatctgcagccatttcttgtcaaaacaagttcccactgggaatttgaaggtccaacaatcatctactgtccttctagaaaaatgacacaacaagttacaggtgaacttaggaaactgaatctatcctgtggaacataccatgcgggcatgagttttagcacaaggaaagacattcatcataggtttgtaagagatgaaattcagtgtgtcatagctaccatagcttttggaatgggcattaataaagctgacattcgccaagtcattcattacggtgctcctaaggacatggaatcatattatcaggagattggtagagctggtcgtgatggacttcaaagttcttgtcacgtcctctgggctcctgcagacattaacttaaataggcaccttcttactgagatacgtaatgagaagtttcgattatacaaattaaagatgatggcaaagatggaaaaatatcttcattctagcagatgtaggagacaaatcatcttgtctcattttgaggacaaacaagtacaaaaagcctccttgggaattatgggaactgaaaaatgctgtgataattgcaggtccagattggatcattgctattccatggatgactcagaggatacatcctgggactttggtccacaagcatttaagcttttgtctgctgtggacatcttaggcgaaaaatttggaattgggcttccaattttatttctccgaggatctaattctcagcgtcttgccgatcaatatcgcaggcacagtttatttggcactggcaaggatcaaacagagagttggtggaaggctttttcccgtcagctgatcactgagggattcttggtagaagtttctcggtataacaaatttatgaagatttgcgcccttacgaaaaagggtagaaattggcttcataaagctaatacagaatctcagagcctcatccttcaagctaatgaagaattgtgtccaaagaagttgcttctgcctagttcgaaaactgtatcttcgggcaccaaagagcattgttataatcaagtaccagttgaattaagtacagagaagaagtctaacttggagaagttatattcttataaaccatgtgataagatttcttctgggagtaacatttctaaaaaaagtatcatggtacagtcaccagaaaaagcttacagttcctcacagcctgttatttcggcacaagagcaggagactcagattgtgttatatggcaaattggtagaagctaggcagaaacatgccaataaaatggatgttcccccagctattctggcaacaaacaagatactggtggatatggccaaaatgagaccaactacggttgaaaacgtaaaaaggattgatggtgtttctgaaggcaaagctgccatgttggcccctctgttggaagtcatcaaacatttctgccaaacaaatagtgttcagacagacctcttttcaagtacaaaacctcaagaagaacagaagacgagtctggtagcaaaaaataaaatatgcacactttcacagtctatggccatcacatactctttattccaagaaaagaagatgcctttgaagagcatagctgagagcaggattctgcctctcatgacaattggcatgcacttatcccaagcggtgaaagctggctgcccccttgatttggagcgagcaggcctgactccagaggttcagaagattattgctgatgttatccgaaaccctcccgtcaactcagatatgagtaaaattagcctaatcagaatgttagttcctgaaaacattgacacgtaccttatccacatggcaattgagatccttaaacatggtcctgacagcggacttcaaccttcatgtgatgtcaacaaaaggagatgttttcccggttctgaagagatctgttcaagttctaagagaagcaaggaagaagtaggcatcaatactgagacttcatctgcagagagaaagagacgattacctgtgtggtttgccaaaggaagtgataccagcaagaaattaatggacaaaacgaaaaggggaggtctttttagttaagctggcaattaccagaacaattatgtttcttgctgtattataagaggatagctatattttatttctgaagagtaaggagtagtattttggcttaaaaatcattctaattacaaagttcactgtttattgaagaactggcatcttaaatcagccttccgcaattcatgtagtttctgggtcttctgggagcctacgtgagtacatcacctaacagaatattaaattagacttcctgtaagattgctttaagaaactgttactgtcctgttttctaatctctttattaaaacagtgtatttggaaaatgttatgtgctctgatttgatatagataacagattagtagttacatggtaattatgtgatataaaatattcatatattatcaaaattctgttttgtaaatgtaagaaagcatagttattttacaaattgtttttactgtcttttgaagaagttcttaaatacgttgttaaatggtattagttgaccagggcagtgaaaatgaaaccgcattttgggtgccattaaatagggaaaaaacatgtaaaaaatgtaaaatggagaccaattgcactaggcaagtgtatattttgtattttatatacaatttctattatttttcaagtaataaaacaatgtttttcatactgaatatt

SEQ ID NO: 520 - protein, 1432 aa, Homo sapiens
MSEKKLETTAQQRKCPEWMNVQNKRCAVEERKACVRKSVFEDDLPFLEFTGSIVYSYDASDCSFLSEDISMSLSDGDVVGFDMEWPPLYNRGKLGKVALIQLCVSESKCYLFHVSSMSVFPQGLKMLLENKAVKKAGVGIEGDQWKLLRDFDIKLKNFVELTDVANKKLKCTETWSLNSLVKHLLGKQLLKDKSIRCSNWSKFPLTEDQKLYAATDAYAGFIIYRNLEILDDTVQRFAINKEEEILLSDMNKQLTSISEEVMDLAKHLPHAFSKLENPRRVSILLKDISENLYSLRRMIIGSTNIETELRPSNNLNLLSFEDSTTGGVQQKQIREHEVLIHVEDETWDPTLDHLAKHDGEDVLGNKVERKEDGFEDGVEDNKLKENMERACLMSLDITEHELQILEQQSQEEYLSDIAYKSTEHLSPNDNENDTSYVIESDEDLEMEMLKHLSPNDNENDTSYVIESDEDLEMEMLKSLENLNSGTVEPTHSKCLKMERNLGLPTKEEEEDDENEANEGEEDDDKDFLWPAPNEEQVTCLKMYFGHSSFKPVQWKVIHSVLEERRDNVAVMATGYGKSLCFQYPPVYVGKIGLVISPLISLMEDQVLQLKMSNIPACFLGSAQSENVLTDIKLGKYRIVYVTPEYCSGNMGLLQQLEADIGITLIAVDEAHCISEWGHDFRDSFRKLGSLKTALPMVPIVALTATASSSIREDIVRCLNLRNPQITCTGFDRPNLYLEVRRKTGNILQDLQPFLVKTSSHWEFEGPTIIYCPSRKMTQQVTGELRKLNLSCGTYHAGMSFSTRKDIHHRFVRDEIQCVIATIAFGMGINKADIRQVIHYGAPKDMESYYQEIGRAGRDGLQSSCHVLWAPADINLNRHLLTEIRNEKFRLYKLKMMAKMEKYLHSSRCRRQIILSHFEDKQVQKASLGIMGTEKCCDNCRSRLDHCYSMDDSEDTSWDFGPQAFKLLSAVDILGEKFGIGLPILFLRGSNSQRLADQYRRHSLFGTGKDQTESWWKAFSRQLITEGFLVEVSRYNKFMKICALTKKGRNWLHKANTESQSLILQANEELCPKKLLLPSSKTVSSGTKEHCYNQVPVELSTEKKSNLEKLYSYKPCDKISSGSNISKKSIMVQSPEKAYSSSQPVISAQEQETQIVLYGKLVEARQKHANKMDVPPAILATNKILVDMAKMRPTTVENVKRIDGVSEGKAAMLAPLLEVIKHFCQTNSVQTDLFSSTKPQEEQKTSLVAKNKICTLSQSMAITYSLFQEKKMPLKSIAESRILPLMTIGMHLSQAVKAGCPLDLERAGLTPEVQKIIADVIRNPPVNSDMSKISLIRMLVPENIDTYLIHMAIEILKHGPDSGLQPSCDVNKRRCFPGSEEICSSSKRSKEEVGINTETSSAERKRRLPVWFAKGSDTSKKLMDKTKRGGLFS

SEQ ID NO: 521 - DNA, 3549 bp, Homo sapiens
gtcttcccggcgcccaggcttgggctcatagggagaaaggaagctgcgctgcattctgcgggacgaaccctgctccgcgcgagaatttttttgattccttcttatttggagaaatctccagctgctctgatgatagcctaagaagactgcatgctgcttcctctcgatgccaagccagaccctctcacaacctcggatctcagtccttcatggagacctggtcccagcaggaatggcagtgcaggaaattggcgcccagatggttcttccatgtgaagttgtctcgggctctgggctgacgagagaacacctggtaaccaggttagccctctgtcagtcacccagggcagggcagcatggtgcggattcagaggaggaagcttttggcatcttgcctgtgcgtcacagccaccgtctttctgcttgtcacactccaggtcatggttgagctggggaagtttgaaaggaaggagtttaaaagttccagtttgcaagatggacatacaaaaatggaggaagcacctacgcatcttaattcatttcttaagaaagaaggattgaccttcaacaggaaaagaaaatgggaattggacagctaccccattatgctctggtggtccccgctgacgggggagactgggaggttaggccaatgtggagcagatgcttgtttcttcaccatcaaccggacctacctccatcatcacatgaccaaagcattcctcttctatggtactgactttaacatagatagcttacctctgcctcggaaagcccatcatgactgggctgtttttcatgaagagtccccgaaaaacaattataagctctttcataaaccagtgatcaccttgttcaactacactgccacgttcagcaggcattcccacttgccactaactacccaatacttggagagcattgaagtcctgaagtcactccgatacctagttcctttgcagtccaaaaacaagcttagaaaaagacttgctccgctggtgtatgtacagtcagactgtgacccaccatcagacagggacagctatgttcgcgagctgatgacttacatcgaggtcgattcctatggtgaatgtttacgaaacaaagacctccctcagcagctgaaaaatccagcctctatggatgccgatggcttttataggatcattgcacagtataagtttatcctagcttttgagaatgcagtttgtgatgactacatcactgagaagttctggaggccactgaaactgggggtagtccctgtatattacggatcccccagcatcacagactggcttccaagtaacaaaagtgctattcttgtatcagaattttctcaccccagggaactggcaagttacatcagacgactggattctgatgacagattgtatgaggcctatgtagaatggaagctgaagggtgagatctctaaccagcgacttctgacagctctcagggaacggaaatggggagtgcaagacgtcaaccaggacaattacatcgatgcatttgagtgtatggtgtgcaccaaggtgtgggctaatatcaggcttcaggaaaagggcttaccacccaaaagatgggaggcagaagatacccacctgagttgcccagagcccacagtgtttgctttctcaccactccggactccacctttgagctctttgcgagagatgtggatttccagctttgaacaatccaagaaagaagcccaggcactaaggtggctggttgataggaatcaaaacttttcatctcaagagttttggggcctagtattcaaggactgatttcaaaaatgatcagaatgaaacagactagagccttcttgaggtttattttctaggttgccttaatatttgaacataatagctattctgttgactatccatcaggataataattagttgctgcagtactcataatgagccctttcaaggaatagatgtaaattacccttaggggtagccactatattttttatactaaaaaaggaaatatttcttatggacactggttatcttccatgtccgtgtctgtggacccacatacttactgccttttgtggaaattcacctagagtgagtactttccttgtgcaatggagggagacgatctagctatagattcttgatactcacctcactctcaacagcttattggtatttggcaaacctggtatcctgcagccgagcatgaacatgaaatacattagaacttggcaatgagagatcccatctgttggtttccagggatgtaagtgagtaataaaagctgtttcaagtttatccactatccactcttcaagtgaaaagaacttatgtgtgtctaccttcttctccataccctgagccacctctctcactttctttagttgtgccttgccctatcgcctcccattttcccttcaaagtagaatgtcttgtaaagacacagtaactcctgtgtgttttgattagtgagatgttaccacttaccccttctgctgcgcagaataatattaagaattgctatgcttatgattcaggctggacagcctggacattttgagcagcgcgagagtagaagtgaatacccccaggaactccaattgtgctgaagctgatttgtctgttcgtaggatgatgtgcagcctgtcacagtggcagccacaggcattcagtttgtgggcatttcctgtcatttcggatcctgctatagggaaggttcagctctcctgtctggggcatctactggagcacctcagaagacaaggaggaaaacactggctcatgttttctttccatgtgagggaggggaggtttctagatgatactaaaagcctgttgccactgttgtgtcatgatttccattcttcatcatggaaagccacaagcctcagaaggcagccagaggacaggaagagtctgtgatgctcatgtctgtgtcatggcatgagggggaattgacgagtgcttgcttagcatcagctctcattgtattgaaggctgtgcccttggtgtgcttagcagtgagcagcgtcttcattaggtagctctggctgggctttgtcagccagcgtgtgagaaaggagaaccaaaaccaatacctccttatagaagccagaaggatcacattggatgagagaaggtgtctataactgggttcttcccaatcccagctctttcattaactaaatatgatcttggacatatctcttaacctccatcggccttagtttttgcatccaaaaagaagtgattgggctggtcttggaaggtttttttcttttttttcccctgtgtaacattcttcattgttcatcaacatttaagaaatttaattttgtagatgtttttactaaagagggtaacaaactattttggaactgctgtatgttattcaagggaagcacgctgtttggaggaaggagcatacttaatgggtagtattgaggatgaaagggaatttctctctctgccattttatttgataatattaaagaaataaagactggaaagggggattccttgttaaaggtcagattttaaattgcatataaaa

SEQ ID NO: 522 - protein, 479 aa, Homo sapiens
MVRIQRRKLLASCLCVTATVFLLVTLQVMVELGKFERKEFKSSSLQDGHTKMEEAPTHLNSFLKKEGLTFNRKRKWELDSYPIMLWWSPLTGETGRLGQCGADACFFTINRTYLHHHMTKAFLFYGTDFNIDSLPLPRKAHHDWAVFHEESPKNNYKLFHKPVITLFNYTATFSRHSHLPLTTQYLESIEVLKSLRYLVPLQSKNKLRKRLAPLVYVQSDCDPPSDRDSYVRELMTYIEVDSYGECLRNKDLPQQLKNPASMDADGFYRIIAQYKFILAFENAVCDDYITEKFWRPLKLGVVPVYYGSPSITDWLPSNKSAILVSEFSHPRELASYIRRLDSDDRLYEAYVEWKLKGEISNQRLLTALRERKWGVQDVNQDNYIDAFECMVCTKVWANIRLQEKGLPPKRWEAEDTHLSCPEPTVFAFSPLRTPPLSSLREMWISSFEQSKKEAQALRWLVDRNQNFSSQEFWGLVFKD

SEQ ID NO: 523 - DNA, 2691 bp, Homo sapiens
agaagcctgaggagccggagagggtgctggctgccgcgcggccgagtgtgttttatggaccatgtgctgctatgtatgcctgaagaagtacttgaaatgcaaatttggggagactttgccatataaatgcttggctggattaagcgcctaattaggatggtttttcaacaagttggagtaagcatgcaatcggtactttggtctaggaagccatatggttcgtctcgaagtatcgtaaggaaaattggtactaatttgtctctgattcagtgtccaagagttcagtttcagattaacagccatgcaacagaatggagtcccagccacccaggagaggatgcagtggcgtcttttgctgatgttggatgggtagccaaagaagaaggagagtgttcagcaagactaaggacagaggtcagatcaaggccaccccttcaggatgaccttcttttctttgagaaggccccaagcagacagatttccttaccagacttgtctcaagaagagcctcagctgaagaccccagcgcgggcaaatgaggaagcactgcagaagatttgcgctctcgaaaatgaacttgctgctctcagagctcagattgccaaaattgtgacccagcaggagcagcaaaatctcactgcaggtgacttagattctaccacatttggtaccataccaccacaccctccacctcccccaccgcccctgcctccccctgcactggggctccaccaaagtacatctgctgttgatctgattaaagaacgaagagagaaaagagccaatgctggaaagactttggttaagaacaatccaaagaaacctgaaatgccaaatatgctagagatccttaaagagatgaacagtgtaaaacttcggtcagtgaagaggtcagagcaagatgtgaagcccaagccagtggatgctactgaccctgctgccctcatagcagaggctctgaaaaagaaatttgcttatcggtatcgaagtgatagccaagatgaagttgaaaaaggaattccaaagtctgaatcagaggccacctcagagagagtgttgtttgggccacacatgttgaagccaacaggaaaaatgaaggctttaattgaaaatgtatcagactcctaatagacaatgagctgcgaaaagactcctggttcccctgttgatttgtgagggccaagtttgctagtagaaatcgacactgtttagtaaatacctctttagtattcagtggtcttcttttcaggctaattagtggattaagcaataatgaaagcactaagtttggttttgcttttgtgagatggtcagctttggtgctctccacaacatgtgtgttctgacatgtttctaatatgtggccagggcgttcagatttccagttttgaaaacaattgtatagatttcacaacacaaaaaggacatttgtggatgttactgcacattttaaattcttaacactaatttatctgtataagtgttttatatgcatatttttggacataaacagtttatgtaaaattagtaatgaatgatggcaacgagggcactgttatcttcgtttgttttcaatgatcatttagcattcaatgatggaacagctggtataacataagttgttggcatgaaatatttgagattggaaacttcttgccttgaacagaacttatatcttagattctctctcacattttcttggagctggggtttgaataggaaccagatgatgttcactgctgaaattccataatgcttcccattgaagggaagttgagaaccaggaaagctgctttcacgtcattgccatccagtactgacagggaagaaagatgtagttttccagtagtgatgaatcaaattattgaattaaatttcttcttaagaagtaaaaactcagaatgtaccatcttgtttcctttcagtttattaaatggcatcataaagatgactttgctaagttaatagagttaaaaatttttttaatataagccaaaatattaactttaatgaaacattgacttggcaaatgaatttcctataaattatcattggtcagaatgctgttttgtttaataatattacgcaacataaaccataggtgttattagaagtggagaactgcctttttcatctggggcttttaaggacttgctataaatgattattttttaaatgctttataaatcttcatggtttttctatttctgatacactcagctatagttaataccagagtatcctaccaggagtaatatttggaatatttaaatctagtaaaagaagaaagttgtacttcctggctgggagtattaggagatgggagtagagattcacttttaagttcttgaaaatatatgcattctcctaaatattaacaaaaatgatttggggaaatgacatggcttgattgttctgtttaaatttgtactgtggcttatgttacacatgttcatgttcacctctcattcacctgttttatatggtttaaaattctctttaacaaaattcagaaaattcacctgaaacgtattttgacctaaaagaaacatatttttgtatcagtattgaattttggacagtgcccccatataaggaagttactgttttaaaataaagcaaactaactgttttaaaaaaaaaaaaaaaaaaaaaaaaaaaaaaaaaaaaaaaaccaaaaaaaaaaaaaaa

SEQ ID NO: 524 - protein, 333 aa, Homo sapiens
MLGWIKRLIRMVFQQVGVSMQSVLWSRKPYGSSRSIVRKIGTNLSLIQCPRVQFQINSHATEWSPSHPGEDAVASFADVGWVAKEEGECSARLRTEVRSRPPLQDDLLFFEKAPSRQISLPDLSQEEPQLKTPARANEEALQKICALENELAALRAQIAKIVTQQEQQNLTAGDLDSTTFGTIPPHPPPPPPPLPPPALGLHQSTSAVDLIKERREKRANAGKTLVKNNPKKPEMPNMLEILKEMNSVKLRSVKRSEQDVKPKPVDATDPAALIAEALKKKFAYRYRSDSQDEVEKGIPKSESEATSERVLFGPHMLKPTGKMKALIENVSDS

SEQ ID NO: 525 - DNA, 1739 bp, Homo sapiens
ggggatcactgttggaaggcagctgcttgaggtccaaggcagtcagtgtcccctctcttttgcctcgggacagctggtatttatcagactcctaagaagttttccttgctccctagtagaagagagagattatgcagcgggcttttgattgatccaatgggaattacattgatctggtgtctggccttggttcttatcaagtggatcacctctaagaggcgtggagctatttcctatgacagttctgatcagactgcattatacattcgtatgctaggagatgtacgtgtaaggagccgagcaggatttgaatcagaaagaagaggttctcacccatatattgattttcgtattttccactctcaatctgaaattgaagtgtctgtctctgcaaggaatatcagaaggctactaagtttccagcgatatcttagatcttcacgcttttttcgtggtactgcggtttcaaattccctaaacattttagatgatgattataatggacaagccaagtgtatgctggaaaaagttggaaattggaattttgatatctttctatttgatagactaacaaatggaaatagtctagtaagcttaacctttcatttatttagtcttcatggattaattgagtacttccatttagatatgatgaaacttcgtagatttttagttatgattcaagaagattaccacagtcaaaatccttaccataacgcagtccacgctgcggatgttactcaggccatgcactgttacttaaaggaacctaagcttgccaattctgtaactccttgggatatcttgctgagcttaattgcagctgccactcatgatctggatcatccaggtgttaatcaacctttccttattaaaactaaccattacttggcaactttatacaagaatacctcagtactggaaaatcaccactggagatctgcagtgggcttattgagagaatcaggcttattctcacatctgccattagaaagcaggcaacaaatggagacacagataggtgctctgatactagccacagacatcagtcgccagaatgagtatctgtctttgtttaggtcccatttggatagaggtgatttatgcctagaagacaccagacacagacatttggttttacagatggctttgaaatgtgctgatatttgtaacccatgtcggacgtgggaattaagcaagcagtggagtgaaaaagtaacggaggaattcttccatcaaggagatatagaaaaaaaatatcatttgggtgtgagtccactttgcgatcgtcacactgaatctattgccaacatccagattggttttatgacttacctagtggagcctttatttacagaatgggccaggttttccaatacaaggctatcccagacaatgcttggacacgtggggctgaataaagccagctggaagggactgcagagagaacagtcgagcagtgaggacactgatgctgcatttgagttgaactcacagttattacctcaggaaaatcggttatcataacccccagaaccagtgggacaaactgcctcctggaggtttttagaaatgtgaaatggggtcttgaggtgagagaacttaactcttgactgccaaggtttccaagtgagtgatgccagccagcattatttatttccaagatttcctctgttggatcatttgaacccacttgttaattgcaagacccgaacatacagcaatatgaatttggcttt

SEQ ID NO: 526 - protein, 456 aa, Homo sapiens
MGITLIWCLALVLIKWITSKRRGAISYDSSDQTALYIRMLGDVRVRSRAGFESERRGSHPYIDFRIFHSQSEIEVSVSARNIRRLLSFQRYLRSSRFFRGTAVSNSLNILDDDYNGQAKCMLEKVGNWNFDIFLFDRLTNGNSLVSLTFHLFSLHGLIEYFHLDMMKLRRFLVMIQEDYHSQNPYHNAVHAADVTQAMHCYLKEPKLANSVTPWDILLSLIAAATHDLDHPGVNQPFLIKTNHYLATLYKNTSVLENHHWRSAVGLLRESGLFSHLPLESRQQMETQIGALILATDISRQNEYLSLFRSHLDRGDLCLEDTRHRHLVLQMALKCADICNPCRTWELSKQWSEKVTEEFFHQGDIEKKYHLGVSPLCDRHTESIANIQIGFMTYLVEPLFTEWARFSNTRLSQTMLGHVGLNKASWKGLQREQSSSEDTDAAFELNSQLLPQENRLS

SEQ ID NO: 527 - DNA, 2990 bp, Homo sapiens
atggaagtgtgttaccagctgccggtactgcccctggacaggccggtcccccagcacgtcctcagccgccgaggagccatcagcttcagctccagctccgctctcttcggctgccccaatccccggcagctctctcagaggcgtggagctatttcctatgacagttctgatcagactgcattatacattcgtatgctaggagatgtacgtgtaaggagccgagcaggatttgaatcagaaagaagaggttctcacccatatattgattttcgtattttccactctcaatctgaaattgaagtgtctgtctctgcaaggaatatcagaaggctactaagtttccagcgatatcttagatcttcacgcttttttcgtggtactgcggtttcaaattccctaaacattttagatgatgattataatggacaagccaagtgtatgctggaaaaagttggaaattggaattttgatatctttctatttgatagactaacaaatggaaatagtctagtaagcttaacctttcatttatttagtcttcatggattaattgagtacttccatttagatatgatgaaacttcgtagatttttagttatgattcaagaagattaccacagtcaaaatccttaccataacgcagtccacgctgcggatgttactcaggccatgcactgttacttaaaggaacctaagcttgccaattctgtaactccttgggatatcttgctgagcttaattgcagctgccactcatgatctggatcatccaggtgttaatcaacctttccttattaaaactaaccattacttggcaactttatacaagaatacctcagtactggaaaatcaccactggagatctgcagtgggcttattgagagaatcaggcttattctcacatctgccattagaaagcaggcaacaaatggagacacagataggtgctctgatactagccacagacatcagtcgccagaatgagtatctgtctttgtttaggtcccatttggatagaggtgatttatgcctagaagacaccagacacagacatttggttttacagatggctttgaaatgtgctgatatttgtaacccatgtcggacgtgggaattaagcaagcagtggagtgaaaaagtaacggaggaattcttccatcaaggagatatagaaaaaaaatatcatttgggtgtgagtccactttgcgatcgtcacactgaatctattgccaacatccagattggtaactatacatatttagatatagctggttagaaaaatgccactgtttttatcaagaagggaaatatatttgaaatataaaatattaaaattatgctcatttctatttttaaaaataatttaagaaattttacccttgttttcccttgttatggctcttctaattctcatttaattttaggatgtaaaaagtatatttttgcagaacaggcagcagcaataacttgtttctgttcttatgtaaataagaatccattattcgctcatgtggaagcttcttttgcatcatttgggactgccatttaaaaaaggataggtaaacaaagaaatgacaaaaataaaataaataaaataaaaatggataggtggtgacccactgagcctgatcataatacgaagaccagcttctgccactgcctttccagactcttaccactgcctgttgattaaatctaactcttcaacatcctagacaggcccttataatcttgcttcaaatgctgtgcagccatcttgcctcaacttccctctcatttgcctacagcatctcgggacgcttctgtgtttcccaagtatacgctgttctttcgctctttgtgcttcgccagtgctttccatgtgcctcgtagagttatttttcttgaagaggcagctcaaatgtcaccttctccagaagctgctctccacttgctttaggcagagtcagtcacttttcttctagattccaaagtgcctgatccacttggttgtggattcctggagcctagcaccacaccagaagcacgaggcccttgagaactgtgtgttgagtgaactaataactgtattatagaaagcataatgaaaatgtcctgtgactgaagtatgtgtagcttgttgcaggagtcacaggaaagttgactaggattgagtgtgttgggctttgggtataaaggagggggattctacgggggcagtagctcaacaaggaatagagggaggagtgtaattttggtagctggtgttgaatagggcctttgagaatcagactgaacacagtgaaatatgtgcccaaagttcagaaagatgaagtttccagaaactaagaaggtagcacaatatgtggcatcatactcagaaaggaagaccatgccatggggccagaaattcagaaacgtaattcttacattgtgattgcaatggatactcatgaaagaaagtgggtagtggccgatttgccttcagagtgacaggtagagaagggaagagcgtgtagaactgtggccatactttaggagtgtgagggatgctgaatctcccagagagctcacactggccaggaatgctgagagtagcagatgcttttcttttgggaggatagtaaaacaatttagaaccagatatgctttgtcttgattctcaagtagaataatcttcaaatgcaaaagaatacattagaaatggacaaaagtggccaggagcggtagctcatacttgtaacccagcactttgggaagccgaggcgggctgatcgcttgaggtcaggagttcgagaccagcctggccaaaatagtgaaactcacgtttctactaaaaatacaaaaattagctgggtgtgatggccacttgggaggctgagataggagaatcgcttgaacctgggaggcagaggttgcagtgagccaatatcgtgccactgcattccagcctgggtgacagaatgaaactccatcactccatctcaaaaaaaaaaaaaaaaaaaaaaaaaa

SEQ ID NO: 528 - protein, 424 aa, Homo sapiens
MEVCYQLPVLPLDRPVPQHVLSRRGAISFSSSSALFGCPNPRQLSQRRGAISYDSSDQTALYIRMLGDVRVRSRAGFESERRGSHPYIDFRIFHSQSEIEVSVSARNIRRLLSFQRYLRSSRFFRGTAVSNSLNILDDDYNGQAKCMLEKVGNWNFDIFLFDRLTNGNSLVSLTFHLFSLHGLIEYFHLDMMKLRRFLVMIQEDYHSQNPYHNAVHAADVTQAMHCYLKEPKLANSVTPWDILLSLIAAATHDLDHPGVNQPFLIKTNHYLATLYKNTSVLENHHWRSAVGLLRESGLFSHLPLESRQQMETQIGALILATDISRQNEYLSLFRSHLDRGDLCLEDTRHRHLVLQMALKCADICNPCRTWELSKQWSEKVTEEFFHQGDIEKKYHLGVSPLCDRHTESIANIQIGNYTYLDIAG

SEQ ID NO: 529 - DNA, 3669 bp, Homo sapiens
gcccaggtaaagccatgttttcctacacttaaaaatgtaaataaatatcccttagataatctggacagcagtttcttatatagcatgtctgagcactatattttgctgggctataaaaggtttaattgttgtttattggtacaataagggattctagttactaatatctacctgtagtcaataaagcaaacattgattggttgatcgaatcattgattcattcaataggtattgattcagcaccagctatgagctaggcagagttctaggccctacagagaaaactgatatcaaactaagaaagtctttttccaagtgctacagtaggggtgggggaggagagagataacaaactggtgagcaaatgttaaacaaaatgattctagagagtgctaaatactgtgaggaagataaaatgataaaataataaagacttctgaagattggttagggtaacctcttgtagaagtatcattggagaccgaaggatgacacaccagccatctgaccatgagagaacatcattcaaggcaaaggaaacagaccaccaccaacaaaaaaagatgcactggggaatttccagtaacacttttgttagctctcttaatatctgattttttgagcactagaacactgcctctcacagaatcctagcttaaaacagcaatgaacagactagaattctaggctaaaaccaacaagatgaaatgtgactgatatgaatataaatggtgcacataagttcacaaacccaattacacagcacaaaatgatatccacgtggcttgacagctgttcatattagaaaaatctagggattctaatggactacatattggagattgctctttgctgttcctgactggaaaaaaaaatatgtagatattacccttgggcagatttcagcccaacttaaagtatcattagagctgtccaaaatggaacagcctgctttgcacatagagaactcacattgctcaactcaaaaaagagcagaaggaaggaagaaggaaggacacgtaacagggatttttacaaaaacagaattcggtatttcttggagactactttaagacagtttttggtttctgtaagtctgtgacttattacttattcctttaattccaataaaattttcttcatttttgttatttttaaaacattaagaagaaaaaaatgatattgatataaggtagatggtgaagtttagcaaaagtttagtttataatgatatctctcaaaatagcaaactgaagtttaaaattcttaagctataattttaaaggaatttagattaaacttttaatatgttgttggctaagtataatacaaaataaaaactaaataaatcttggttttgccacatattagctgtgtaatatagacaatttacttctctgttattgtttcctcagaatgagggcagtaacttgtagccgtctgaaaagattgttataagcatggagttagttgctgtatataaagcagttagaccagtacctgacaatattacatgctaagtaagtgcttgctattactgttgctgttattattaattataattgtgtgctctattctgccttcaggaattaatgaccaagttaataactgagacacctgaccagccaatcccatttctcattgaccatcttcagtctaaacaagggaaccgtggacaacttcaaagaactttgtctggatctgcagctctatgggcagaaagtgaaaaatcagaatccaaaggaacaagaagggatttcagaagctatgataaaccttggcaattaaatgcaaagaagcctaaaaaatcaaaaagtgaccttgctgtgtctaatatttctccaccatcaccggactccaaatcattgccaaggtcagtagagcatccaaagtggaactggaggactaaaccacaaagccgtgattttgatgaattgaatcacatccttcaggagagcaagaagctggggaaagcccttgagaatctctctcgaagtattgcaatttcagatgaactcgataaggaaacagtgacatttaattcttctcttctgaggccccgtgtgattggagaatggattggtagagaagaaaatgatgctgatcccctagctgctgaaatgctacagcctccaattccaagaagcaaaaatgaccaatgggaaagtgaagatagtggctctagtcctgcaggaagcttaaagatggagcctaagaacaaaggattaaaacagcagcaacagcaacataagaaactcctggccgcaatgctctctcaagattcttttgagtccatccacagccctaccccatctgtaacagaagaagatattgataatgaagatgatgcaatggaattgctggaggatcttaatgatttaagaatggagggagtaacaaccctggtaccttctgggagcaaatttaaccaaggccgtcctacttaccctgctgagcctcaggccaaggtcacactgaacatctgttcaaggtgtgccaggcttcaaggagacaacctggaagaaaggacagaagagtcactaccaatactccattctccagatgaaaaaatcccagattcattcgattccttgcctgggactgaagaagcactaatggaggagggtgacgaatttgagaaagcatctaaactaacaggacctggagaagcctccagtggagtaggacactcactgaaaaactacatggaagaagatgaatccttaaagcaattgcaggtagttcatcaaccatggatcttgccaagtgacacagaaagtgaaggagtggaagcagaacaagagaaacgttccgctgatcttcttctttgcgttccatgctcttcttgtcctacgctggtctactctggtttgtgaaacagagagaagaagttgcaagtggtccttaaagaaatgcagttattcaaatccttatgtatagttctaattttatttactatgtgtaatcatttagagaatggttatttttataatctcaataataaacaagtactatcgtagccagggggtgcccaagtatgtaatcagagaacactaatcctggcaaaggattgtggggtggtcaggaggccggctgccttttgacatggttagagtcctgggtttagattactttataaatagttattaagattaatatttgatatattaaatattgcctgattcaaataactttgcttaaaatttttctgtattttaacttgtctagggttttctacttcttctatttttataatattttctcattttttagattactaaacattctacttatccacatgtgccaagatgtgccatttaggtctctgcagaaattagctgtttggtatcatcacctgccatacatgttgtgtgcagcagtgagaagtatattctctaccactgctctttctcatgattattttctctattcctattaaaatgaataattgatatgttaattaagtaaagcaaatcaataaggaatgaaatgcatggcccaaaacatagaaaatgaaaatcgtttgaccatttatccaattattgaacccaattaagatgatccattttaaatttaatatatgctcgcttttggaatgtgttatgcattgatgttaagtgaatggatctaagtaaatctattgatatctctaaaaaaaaaaaaaaaaaa

SEQ ID NO: 530 - protein, 427 aa, Homo sapiens
MTKLITETPDQPIPFLIDHLQSKQGNRGQLQRTLSGSAALWAESEKSESKGTRRDFRSYDKPWQLNAKKPKKSKSDLAVSNISPPSPDSKSLPRSVEHPKWNWRTKPQSRDFDELNHILQESKKLGKALENLSRSIAISDELDKETVTFNSSLLRPRVIGEWIGREENDADPLAAEMLQPPIPRSKNDQWESEDSGSSPAGSLKMEPKNKGLKQQQQQHKKLLAAMLSQDSFESIHSPTPSVTEEDIDNEDDAMELLEDLNDLRMEGVTTLVPSGSKFNQGRPTYPAEPQAKVTLNICSRCARLQGDNLEERTEESLPILHSPDEKIPDSFDSLPGTEEALMEEGDEFEKASKLTGPGEASSGVGHSLKNYMEEDESLKQLQVVHQPWILPSDTESEGVEAEQEKRSADLLLCVPCSSCPTLVYSGL

SEQ ID NO: 531 - DNA, 390 bp, Homo sapiens
atggtgcacatgaatgtcttggttgatattctcaggaacatccacaatgctaaaaagagagacaaacaccaggttcttatcaagccatgctccagagttatcatcctgtttctcactgtgatgaagcatggctacactggtgaatctaaaatcattgatgatcacagagctgggaagattgttgtgaacctcacaggcaggctaaacaaatatggagtgatcagccccaggtttcatgtgcaactcaaagatctagaaaaatggcagcataatctgctcccatctgaccagttcggtttcattgtactgacaacctcagctggcatcatggaccacaaagaagtaagacgaagacacacaggagggaaaatcctgggattctttttctag

SEQ ID NO: 532 - protein, 129 aa, Homo sapiens
MVHMNVLVDILRNIHNAKKRDKHQVLIKPCSRVIILFLTVMKHGYTGESKIIDDHRAGKIVVNLTGRLNKYGVISPRFHVQLKDLEKWQHNLLPSDQFGFIVLTTSAGIMDHKEVRRRHTGGKILGFFF

SEQ ID NO: 533 - DNA, 4058 bp, Homo sapiens
ccaatgttggagccgtctgcaaagtgtccccggcaagaagaggctgcctaccacaaggactttagcttactttttaaagattgaagaaaaaaaagaagacagaaaaagaagaactcaaagatacacaaagtaatttgaaccaaggctcagaagtttttggagccgtgagggatacagcagtttggtcaatattgtcttaacatgcttcaaataaatcagatgttctcagtgcagctgagtcttggtgagcagacatgggaatccgaaggcagcagtataaagaaggctcagcaggctgttgccaataaagctttgactgaatctacgcttcccaaaccagttcagaagccacccaaaagtaatgttaacaataacccaggcagtataactccaactgtggaactgaatgggcttgctatgaaaaggggagagcctgccatctacaggccattagatccaaagccattcccaaattatagagctaattacaactttcggggcatgtacaatcagaggtatcattgcccagtgcctaagatcttttatgttcagctcactgtaggaaataatgaattttttggggaaggaaagactcgacaagctgctagacacaatgctgcaatgaaagccctccaagcactgcagaatgaacctattccagaaagatctcctcagaatggtgaatcaggaaaggatatggatgatgacaaagatgcaaataagtctgagatcagcttagtgtttgaaattgctctgaagcgaaatatgcctgtcagttttgaggttattaaagaaagtggaccaccacatatgaaaagctttgttactcgagtgtcagtaggagagttctctgcagaaggagaaggaaatagcaaaaaactctccaagaagcgcgctgcgaccaccgtcttacaggagcttaaaaaacttccacctcttcctgtggtggaaaagccaaaactattttttaaaaaacgccctaaaacaatagtaaaggccggaccagaatatggccaagggatgaaccctattagccgcctggcgcaaattcaacaggccaaaaaggaaaaggagccggattatgttttgctttcagaaagaggaatgcctcgacgtcgagaatttgtgatgcaggtgaaggtaggcaatgaagttgctacaggaacaggacctaataaaaagatagccaaaaaaaatgctgcagaagcaatgctgttacaacttggttataaagcatccactaatcttcaggatcaacttgagaagacaggggaaaacaaaggatggagtggtccaaagcctgggtttcctgaaccaacaaataatactccaaaaggaattcttcatttgtctcctgatgtttatcaagagatggaagccagccgccacaaagtaatctctggcactactctaggctatttgtcacccaaagatatgaaccaaccttcaagctctttcttcagtatatctcccacatcgaatagttcagctacaattgccagggaactccttatgaatggaacatcttctacagctgaagccataggtttaaaaggaagttctcctactcccccttgttctccagtacaaccttcaaaacaactggaatatttagcaaggattcaaggctttcaggtatgaattaaaagcaaaaacaaaaaacaaaacaattcattagcctcagattcttcatctgtatacatcacaaggctcattcttgcctgctagtatggcctacatgccacttacgttttaagttatttaggaacacaaaggacagacaaaaaagccatatgcacatgcctcattttctcttatttttgatctatctagtaattcttttgctgcctgtctcttctccattttccttcttcttttttaagcatttttcatattcttcactgtcttctatttggtcttgattaggtgcatctatctcttcgctctgtcttccacaaacaaaaattctgccttcagacatttggtgttagtatttcacactcagttctccctttttttacataaggattgagtttctttttatgatgattttacctttatagcaattttgaattttgcattctgttgctagtattgattcaggtacaccattaagatacaacattctagaagtctattaccttaggagttaattaaacatgatatttgaagaataatgaaatgctttatagttgtttgaggcataacaatgtgtatttgttttactggatcatgttttgaactgactagggagggtagcacctgcctcagatagtaccaacaattctgtttcactgggtagtctaaaactagcttatagtttaacttaacttgttgtgtatgtgaatttagggatggaaactttttttcccctatttattctttgtttccttctgggaaaaaaccccacaaaaatcagcactcctttatggatacattggagcttttgaaagaattgtaaactctaggaaggggaaatatctgtgtcttgatttcttagttgccttgaaaatcatgtactgaactgtaaccgctaacttgactggatgaactagtttgcttgtgtgtagagagtgtattgcttcctcagatttcactgttttcatctccttttccatcttagtctttattccttaagaccaaaaactgtaatatcctttagaaatgctctagaagatctgtattgtgtagaatgatcatgtatttataaatattttacaagtttagattataaaatgaaaaagaaggtcatgtgttttggggggtattttgcatgttcggatttttttttcccttcaccgaacccttctgattctttcaaactattgccaggtagttgttagtgtttctaattggactcttaatatgaacttcaagaagctgttaccagttatcggctctgtcatctgaaattttaaccacttaatttaaagttacaattttagaatttgtttttgttgttttaccttaagaaacacaataaatcactgtttaaaaaagatctcaatttatataaagtactggaaaaaagctaagtaatttttagttctatctataatctccgtaggatgaattagaaataaattgtgatgaaaagaaattaactgcttatttatgaatctaatcatttagaaatgtctgagagtaacactgcattcttatagaaacaaagcacaaattgcattcaagctctgaattgattttttgcttggagctgttgttacagtagctgtaattttgctaccagaatgtcttaattttttaaatttgtttttatttctaagctcttggcaatgacaataattataattttaacatatcttcactgtagtcaacatgtagagtctgcttccctcattattgcattgctaaggcctttttaaaaagcttatgcttacataatatactcttttttatggacacgttatatgtttccaaatctgtgtattgtgatttttacatactaatgaatataaacaggtgattttaaaatattactgtgcttctttggttgaatgagctggtattgatgtaaaatactctgtcattgatggaccactacctgcagctaagcagtgagcagaatctccgggaaatgacttagtctggccacatgcatagcccatcttcataatgtcgcagcagaaggttctttgtggttaaaagttttaaagcctatttctttataggtaaccctctcaggtatatttacctggtagaaaaacatgtagattgtttctattacttaaatgttttaattggactgtagtttagaaattacaggaccagcttgttacagattatacactattctgttacttttatttctgaaacttaaaaacaataaattctttttctgtgtttctaggttagaacttttttattttattgcacactgaacagatactgttgcttattgaatattgtgtaaacccttctttggctttccttgcccattgcaatttgatttaagcctactagagccattgtatgtgacagctatattgtattacaaagtaaaaatatatgagtgtattgaaaaaaaaaaaaaaaaaaaa

SEQ ID NO: 534 - protein, 479 aa, Homo sapiens
MLQINQMFSVQLSLGEQTWESEGSSIKKAQQAVANKALTESTLPKPVQKPPKSNVNNNPGSITPTVELNGLAMKRGEPAIYRPLDPKPFPNYRANYNFRGMYNQRYHCPVPKIFYVQLTVGNNEFFGEGKTRQAARHNAAMKALQALQNEPIPERSPQNGESGKDMDDDKDANKSEISLVFEIALKRNMPVSFEVIKESGPPHMKSFVTRVSVGEFSAEGEGNSKKLSKKRAATTVLQELKKLPPLPVVEKPKLFFKKRPKTIVKAGPEYGQGMNPISRLAQIQQAKKEKEPDYVLLSERGMPRRREFVMQVKVGNEVATGTGPNKKIAKKNAAEAMLLQLGYKASTNLQDQLEKTGENKGWSGPKPGFPEPTNNTPKGILHLSPDVYQEMEASRHKVISGTTLGYLSPKDMNQPSSSFFSISPTSNSSATIARELLMNGTSSTAEAIGLKGSSPTPPCSPVQPSKQLEYLARIQGFQV

SEQ ID NO: 535 - DNA, 2302 bp, Homo sapiens
atggtcgcgcgtcccctgcacagcacagaggggcagccggagagcctgggaaaggtacgagcggggaatcagagcacagggtgcggaccagaaagagcagacggtcagtcgggcggggaaggaagttgccgagttgcaggtgtggaaggggctgccccaggcccacccttggcagacgagggggcggggagtcgcgccggggacgaggagactgcggaccgggcgcgctccttgcgcagtcgctcgcccgcgtgcccaagccccccgggaatggccctcgcccaggggcccagctcgccgccgctagccccgcagagcctgcagctgctggggcccggcagccgccagggggcgggagctgcgtcgcgaacaatggccgcgcttgttctctgtagtgtttgccaatgttggagccgtctgcaaagtgtccccggcaagaaggtaaataccctcatcgggggcgtccgggagaccccgacttccgcgccgccggcgaagaaggcagagggcgctggggagccctgcagttccgcagcacggggaacccggagaaaagcagcccccttcgcggcctcccctcccccgcgccttccctcccacatcgggctctcggggcagcagcggggaggggagaccggcgggggagggaggacagggaggcgaaggaattggggtggggggtgcgtgtgtggtggagggggtgggacgacacaggtgtcctgaggggaggagccgggaggaaggcgaggaggccgggccaagtgggggtgcggaggtcggggagacaggaacgcggctgcgggcgcgggaggctggggttctagggggccggggtggtagcggccggaagagaggacggcgagtgcagccacggtgtggctgcgagggagagggagcgcctagagtagggcaggggagggcggcccggggagggtctgcgggaaatgggcctgggggcgctggaggcggagcggcggggccggggcgcgccggagggtggcggcggcagctatttctgtagaatgggctagtggtaaagacgtaacttgccgaaatggggagggtaggtggggccgaggggacaaaatatatcctatgacaggcaagttctgctgtggctgttacgaactcctaccgtgatggctcggcttaaaggggtagttggcggtagtgaccttgccggggtgaagggagttgggcgaggagacaaagctcagttacggaatccgctgtgtgagagcaggaactctagtctcttcggggtcgagccgggggctgtggcttgggggctgggggtgctccgcagaggccattgagaagcacgccactctgggattcttagggaggcggtgggggtaatggccgtgggattctggaagtctttggaaatgtgtgtagaattttgcatttgtgaataattttctttggtaagggtccatatttgctgtgatgtccccttacccccatccccactccaaagggttaagaactgcttgagcagatagagagggaccattcaattagggtagacctgggaatttaccaaaggattttaaagtgggtggatcctgcagaaagaaaggctagagatgatcctttaaagatattttactgttaattgaaaacgttttttatttaatgtttgctttcacaattttggtgaacttttgctgagcattacttggcttctgatgcatcctgtgtttcagaccagcatcgtgaatacttgaaatcaaaattgtgatggacaggcagggtgatagtaaccttggaggagaaaagatttcaacatttctccaggatatttcttccccgtccttgctttctttagatgattcaagtacactgttgtgaactcagctgcggtggaaaaatcttatttaataaaactaccaaaaccaagacttactctccatctctgttttgtagtatggccagattttcattgttcagtttgtatcttactgcaaacaagagatatcacataacactttaattgtagattgctgcattttgcagcaggcctgtattaaatttgcgaagcagttatgccaaactatctggtgtgtttgtgttttcctgctatggtttcaagtcaagtcactattgccatattttattatatggtaggctagtctgaaatttattcctaagtgatgataagttggtaggatatggtacatacttgctcacaaattactgcatttttccccataaaaaccagtgttttgtatttgtaagaatgttgctgtgtaatccaagtatgtattgttaatttcaaataaaatgctgtgtaattttt

SEQ ID NO: 536 - protein, 240 aa, Homo sapiens
MVARPLHSTEGQPESLGKVRAGNQSTGCGPERADGQSGGEGSCRVAGVEGAAPGPPLADEGAGSRAGDEETADRARSLRSRSPACPSPPGMALAQGPSSPPLAPQSLQLLGPGSRQGAGAASRTMAALVLCSVCQCWSRLQSVPGKKVNTLIGGVRETPTSAPPAKKAEGAGEPCSSAARGTRRKAAPFAASPPPRLPSHIGLSGQQRGGETGGGGRTGRRRNWGGGCVCGGGGGTTQVS

SEQ ID NO: 537 - DNA, 4057 bp, Homo sapiens
agctcctccccctgcgtctctggcctcgccggtcttggggggatggttccatcatggcgtcaatgcagaccacaggaaggagggtggaagtatggtttccaaaacgactacagaaagaactgttggctttgcaaaatgacccacctcctggaatgaccttaaatgagaagagtgttcaaaattcaattacacagtggattgtagacatggaaggtgcaccaggtaccttatatgaaggggaaaaatttcaacttctatttaaatttagtagtcgatatccttttgactctcctcaggtcatgtttactggtgaaaatattcctgttcatcctcatgtttatagcaatggtcatatctgtttatccattctaacagaagactggtccccagcgctctcagtccaatcagtttgtcttagcattattagcatgctttccagctgcaaggaaaagagacgaccaccggataattctttttatgtgcgaacatgtaacaagaatccaaagaaaacaaaatggtggtatcatgatgatacttgttgatgccactgttatcatcctcctagcagaagatagtcctactgagaaaatgagcactttgatcattcagtctttgaactttaacctttgactggaagtgacctataggcaatgaagactacttccttttactgcatttttactcgtgtgcattctgggcgcatgttgatcgctggttcagtccaggcaactgacatgcttttattagtcatacagtattaatgcaggtgtcaggaaatgtcaaatataattccattttttatttttatttttttaagcttttggaaaagctccaggtcctcatgtattgtgcaataacaatgacttccttggcggttttggtacgttcattgccggcaatgggcgttgtaacaggaaaagttttcattaactcctgccattcaatgattaatgcatgatagggcctatgaaatgaacttactggttatagtgggaatataaataaagtgagggatccaacattactttaaaagtcaccccaactgtttatatttggattctatgcactgtgatcctaaggttaacagcatgaattaacatgcgtctttaaaggactgtaatgaaagatcattgcatatttattgaattgtttatatctactgtcaagttgttttgacatggaagattttcaagtaacattggcagagaggtacagtatgttatccctatggtgaaaataaattaatttgttgtatatagttcctcaatctctgaagtaaaggtatgagtaatatagggtatgaatggtttaatcaaggctttattttggaagtaagaaaaatggcagtgatgattaaattgctgcagtccataatttgggcttgttatttgtacattaaagattttttccaagtaagttacactctgttaacttcctgctagccatcagcatgagccctactgcctaaacactatttcatttatttatgtttggaaaccccgtaaacatttttgtttgcaatcttgtttcttttgttataagtcaagtttgaatgttacaatacttttattgaaacttttgttaagttttttcttgtaaattttctttacttgtgagtatcatcttgtcctttaatcctgtaccctaaaataagaaatacatttttgacagaggcttaatgttttaacaaaagagtgtggacatttttattttaaaatttaggcaaaagtcactatcaaatggttgcttatttgtctcacacagccatatagtttttcctggagggttttgttttgttgttgttgaaaagactttgcttacagctagatgaaactttctatagaaaaaaaaaattgttgaaaggtccagttctcagtaccatgtgagttaatgatactacaactaagttctttttaaaaagtgattaatgtattttataaattaccttttcacatatgcaaaatctgtttctactacaatgttatttttactaatgccttattgttgcactctttttgaaatatcctgcagtgaatatatgaatcaatttgggcttaaaactgaaagccagttggctgaaaggtttgaaatacgtaccccagtaaaaccattcaatcaataattggtaaataatattttaaaattgtttttaatctgtatagatgacattttgtagctttgtacatgttgttaattaagggcatataattttacactcaaagtataattgctgaactcaggggtgggtagacttcaaaaatatgtctgctatagaaataacttgaaaaaaaaaattaaaaccgtggccagccaccaaattgtggacactgtttatatactgctagttaacaattaccacttttaaaaaattataaccgtttttgttctatcttgactagataaattctcacaatgatctctgtcagttttattagttggcctgtttaaccaagacagaaagtctttgaattactcatagttttaaactgcttttaatatgaaaattgcagctgtaaattatgtattttcatattttgcgtaactgctctacactactgtttgacttgatcttcttctgggggttagggagaaatctgtctccatattgctggttctcttaccaaaatgcttttataaagaaatgaccggtgacatttattcaccaaaggaattaatatactgagtcaaagattaacaatgctatactatagagtaataggtcatatatagcctcaattgagttttttatgacaatattttaacatacctctctctctacatataaataccataaagtaaactaaaatgacacagaggaaagtagaggaaaatgaaataatttcggtacatcttatggtttaaagagtagaaaataagatgaaatatcctaaaatataggagcacagacatttaaaattcataatcaggctaacaacactctcttgaatttaggaatcattgaaaactccttgcacttagatttaatttatatgttagttacattattaaaagtcataaggcatttatctgagtcattgctctacagagagcaattaatggcttgtaataataaaaagaatatttctctgtaatgcattgttgaaagacaaccagaatatcaagaaaatgtatataggaatatgctacttgcctcctccctgcatttcctcgtggggcactatttgcgacataggcctacagaattagactttcatacttagaagataaggtacactcttcttcttttatttatttatttatttatttttaggccattcttctggtttgccaaattctattaagacagtgatacatttgcttccttatttatgcatgcttagatcatgaacatgatgcccttcttttttttttttttctttggtcaagtagggattaatgccataggtttagagagaaggattgttttcagtttttaagagaattttttaaaaatacattttatggttctcttaaggaattaatattcacttctgaaggacttacttgtaatatataatttatcattttagccagcagggaaataaatcatttttaatccccagaagaaagtgctggaaatagcttctatatagtcagcagttcacctggagaaagatcttaattccttgttgttttgactaggaatatcaatatttggtataaaataactagaatagtttattaccttttccctcatgaaattttaaatatatgcaaatatatatatcattagattcctgtggtggataataatttcttcagattctaaaacaggtgtctagtgactgcttaattgtttccaagttgcatcaaagatgaattggtaaataatggaaatgagtagtgatatgaaaatggttatgtaactacatattacttgtttctggtaatcaagtcttattttttaaaagcctattgtttttcagaattgagatatttaaaacttgttataacttcttcctaaaaatagaagagaagaggaggtactgtgtgttacaaaaatttttttaaataaagaattcagtgtcactagttctaaaaaaaaaaaaaaaaaaca

SEQ ID NO: 538 - protein, 162 aa, Homo sapiens
MASMQTTGRRVEVWFPKRLQKELLALQNDPPPGMTLNEKSVQNSITQWIVDMEGAPGTLYEGEKFQLLFKFSSRYPFDSPQVMFTGENIPVHPHVYSNGHICLSILTEDWSPALSVQSVCLSIISMLSSCKEKRRPPDNSFYVRTCNKNPKKTKWWYHDDTC

SEQ ID NO: 539 - DNA, 4024 bp, Homo sapiens
agctcctccccctgcgtctctggcctcgccggtcttggggggatggttccatcatggcgtcaatgcagaaacgactacagaaagaactgttggctttgcaaaatgacccacctcctggaatgaccttaaatgagaagagtgttcaaaattcaattacacagtggattgtagacatggaaggtgcaccaggtaccttatatgaaggggaaaaatttcaacttctatttaaatttagtagtcgatatccttttgactctcctcaggtcatgtttactggtgaaaatattcctgttcatcctcatgtttatagcaatggtcatatctgtttatccattctaacagaagactggtccccagcgctctcagtccaatcagtttgtcttagcattattagcatgctttccagctgcaaggaaaagagacgaccaccggataattctttttatgtgcgaacatgtaacaagaatccaaagaaaacaaaatggtggtatcatgatgatacttgttgatgccactgttatcatcctcctagcagaagatagtcctactgagaaaatgagcactttgatcattcagtctttgaactttaacctttgactggaagtgacctataggcaatgaagactacttccttttactgcatttttactcgtgtgcattctgggcgcatgttgatcgctggttcagtccaggcaactgacatgcttttattagtcatacagtattaatgcaggtgtcaggaaatgtcaaatataattccattttttatttttatttttttaagcttttggaaaagctccaggtcctcatgtattgtgcaataacaatgacttccttggcggttttggtacgttcattgccggcaatgggcgttgtaacaggaaaagttttcattaactcctgccattcaatgattaatgcatgatagggcctatgaaatgaacttactggttatagtgggaatataaataaagtgagggatccaacattactttaaaagtcaccccaactgtttatatttggattctatgcactgtgatcctaaggttaacagcatgaattaacatgcgtctttaaaggactgtaatgaaagatcattgcatatttattgaattgtttatatctactgtcaagttgttttgacatggaagattttcaagtaacattggcagagaggtacagtatgttatccctatggtgaaaataaattaatttgttgtatatagttcctcaatctctgaagtaaaggtatgagtaatatagggtatgaatggtttaatcaaggctttattttggaagtaagaaaaatggcagtgatgattaaattgctgcagtccataatttgggcttgttatttgtacattaaagattttttccaagtaagttacactctgttaacttcctgctagccatcagcatgagccctactgcctaaacactatttcatttatttatgtttggaaaccccgtaaacatttttgtttgcaatcttgtttcttttgttataagtcaagtttgaatgttacaatacttttattgaaacttttgttaagttttttcttgtaaattttctttacttgtgagtatcatcttgtcctttaatcctgtaccctaaaataagaaatacatttttgacagaggcttaatgttttaacaaaagagtgtggacatttttattttaaaatttaggcaaaagtcactatcaaatggttgcttatttgtctcacacagccatatagtttttcctggagggttttgttttgttgttgttgaaaagactttgcttacagctagatgaaactttctatagaaaaaaaaaattgttgaaaggtccagttctcagtaccatgtgagttaatgatactacaactaagttctttttaaaaagtgattaatgtattttataaattaccttttcacatatgcaaaatctgtttctactacaatgttatttttactaatgccttattgttgcactctttttgaaatatcctgcagtgaatatatgaatcaatttgggcttaaaactgaaagccagttggctgaaaggtttgaaatacgtaccccagtaaaaccattcaatcaataattggtaaataatattttaaaattgtttttaatctgtatagatgacattttgtagctttgtacatgttgttaattaagggcatataattttacactcaaagtataattgctgaactcaggggtgggtagacttcaaaaatatgtctgctatagaaataacttgaaaaaaaaaattaaaaccgtggccagccaccaaattgtggacactgtttatatactgctagttaacaattaccacttttaaaaaattataaccgtttttgttctatcttgactagataaattctcacaatgatctctgtcagttttattagttggcctgtttaaccaagacagaaagtctttgaattactcatagttttaaactgcttttaatatgaaaattgcagctgtaaattatgtattttcatattttgcgtaactgctctacactactgtttgacttgatcttcttctgggggttagggagaaatctgtctccatattgctggttctcttaccaaaatgcttttataaagaaatgaccggtgacatttattcaccaaaggaattaatatactgagtcaaagattaacaatgctatactatagagtaataggtcatatatagcctcaattgagttttttatgacaatattttaacatacctctctctctacatataaataccataaagtaaactaaaatgacacagaggaaagtagaggaaaatgaaataatttcggtacatcttatggtttaaagagtagaaaataagatgaaatatcctaaaatataggagcacagacatttaaaattcataatcaggctaacaacactctcttgaatttaggaatcattgaaaactccttgcacttagatttaatttatatgttagttacattattaaaagtcataaggcatttatctgagtcattgctctacagagagcaattaatggcttgtaataataaaaagaatatttctctgtaatgcattgttgaaagacaaccagaatatcaagaaaatgtatataggaatatgctacttgcctcctccctgcatttcctcgtggggcactatttgcgacataggcctacagaattagactttcatacttagaagataaggtacactcttcttcttttatttatttatttatttatttttaggccattcttctggtttgccaaattctattaagacagtgatacatttgcttccttatttatgcatgcttagatcatgaacatgatgcccttcttttttttttttttctttggtcaagtagggattaatgccataggtttagagagaaggattgttttcagtttttaagagaattttttaaaaatacattttatggttctcttaaggaattaatattcacttctgaaggacttacttgtaatatataatttatcattttagccagcagggaaataaatcatttttaatccccagaagaaagtgctggaaatagcttctatatagtcagcagttcacctggagaaagatcttaattccttgttgttttgactaggaatatcaatatttggtataaaataactagaatagtttattaccttttccctcatgaaattttaaatatatgcaaatatatatatcattagattcctgtggtggataataatttcttcagattctaaaacaggtgtctagtgactgcttaattgtttccaagttgcatcaaagatgaattggtaaataatggaaatgagtagtgatatgaaaatggttatgtaactacatattacttgtttctggtaatcaagtcttattttttaaaagcctattgtttttcagaattgagatatttaaaacttgttataacttcttcctaaaaatagaagagaagaggaggtactgtgtgttacaaaaatttttttaaataaagaattcagtgtcactagttctaaaaaaaaaaaaaaaaaaca

SEQ ID NO: 540 - protein, 151 aa, Homo sapiens
MASMQKRLQKELLALQNDPPPGMTLNEKSVQNSITQWIVDMEGAPGTLYEGEKFQLLFKFSSRYPFDSPQVMFTGENIPVHPHVYSNGHICLSILTEDWSPALSVQSVCLSIISMLSSCKEKRRPPDNSFYVRTCNKNPKKTKWWYHDDTC

SEQ ID NO: 541 - DNA, 668 bp, Homo sapiens
cggggacccggctgcggtggctgcgggactgacgagaaactactaaagttcctggggaagcaaagtagaatttcataagaacaaaatggatggagaggagaaaacctatggtggctgtgaaggacctgatgccatgtatgtcaaattgatatcatctgatggccatgaatttattgtaaaaagagaacatgcattaacatcaggcacgataaaagccatgttgagtggcccaggtcagtttgctgagaacgaaaccaatgaggtcaattttagagagataccttcacatgtgctatcgaaagtatgcatgtattttacgtacaaggttcgctacactaacagctccaccgagattcctgaattcccaattgcacctgaaattgcactggaactgctgatggctgcgaacttcttagattgttaaataaaataaattataataaactgttaactcttttcagtatttaatacctgtagttcagttagtaactttttcatatatagcatgttgcctgtatgcagttgaactatataaagttcattgcaaagcagattatcttgtttttttgcatagcaatcaaagttgaaatttgtttgctacatcaacaaattaaggacattttcacaaactgagaaataaacaaatatgccaattaaaaaaaaaaaaa

SEQ ID NO: 542 - protein, 112 aa, Homo sapiens
MDGEEKTYGGCEGPDAMYVKLISSDGHEFIVKREHALTSGTIKAMLSGPGQFAENETNEVNFREIPSHVLSKVCMYFTYKVRYTNSSTEIPEFPIAPEIALELLMAANFLDC

SEQ ID NO: 543 - DNA, 2030 bp, Homo sapiens
acttgtgcggcagtcgggtgggaagccgtgtctcgcagtcgtggactcgtgcagctggggcgtccgcagccgctcgtcacccgcgtgatgctgtttctggcgttgggcagcccgtgggcggtcgaactgcctctctgcggaaggaggactgcattgtgtgcggccgccgcgctccgaggtccccgggcctctgtctcccgggcgtcctccagcagcgggccttcggggccggtagccggctggagtacggggccttcgggagccgcgcgccttctccggcgtccgggtcgagcgcagatccctgtttattgggaaggatatgttcgattcttaaatacgccatctgacaaatcagaagatggaaggctaatttatactggcaatatggcccgagcagtgtttggtgtgaaatgtttctcttattctacgagtctgattggccttacatttctgccatacatttttacacaaaataatgctatttctgaaagtgtgcctctgcctattcaaatcatattctatggcatcatgggaagctttacggtgatcaccccagtgctgcttcactttattacaaaaggctatgtcattcgattgtaccatgaggccacaacagacacttataaagccattacctacaatgctatgcttgcagaaacgagtacagtgtttcaccagaatgatgtgaagattccagatgctaaacatgtatttaccacattttatgctaaaacaaaatcactgttagttaatccagtgctctttccaaaccgtgaagactatatccatctaatgggttatgacaaagaagaatttattttgtatatggaagaaaccagtgaagagaaacggcataaagatgacaaatgagcctatttgttagtgttcgtgctcaaatgtgatttacgttttaatgtataataataaaattgccttttgcattccgttagtgactgattgttaaaaataatttgaaattatcaaagcttttaatttccagagaatgatgtttgtttataataaaacaagctatgtttgaaaaccaaaatgtagtatctaccattcgtgttttagaaaggtatgtgaataaatatgttcatgctagtataagagttctgtgttactgtggttgactctaaactggggatctgatgtcagtagcaaatgggagagttgctttattctttgtgtatggatttttctaagtgtataaatattttccgacattaaaagacattttctctttgaggaagacacagtcataggtggtgcggagctgtggtccacctgctcctgctcctgactcactgctctttgctgttgcctgaggaccaagtctgtcaggaagctggctaggaagccttgcagcagccatggcttttaaacataccagaaaaacacccgtggagtcagaggtggcaattcaccgaattcatatcactctaacgagttgcaacgtaaaatccctggataaggtgtgtgctgacttgatctgaggagcaaaggaaaagaatcagtgaaaggaccagtttgaatgcctaccaagactttgagaatcactacaagaaaaacttacggtgaaggttctaaggcatgggatcgtttccagatgagaatccacaagcgactcattgacttgcgcagtcctcagatagttaagcagattacttccatcagtattgagccaggagttgagatggaagtcaccattgcaaatgcttaagtcaactgttttcataaattgattaccagttgttaaaaaattttcaaaaaaccgcaaaatttcaagaaattcacaaattatgggagcagttttaagtcttctttggttcagaacacaggtttttgcctaacccctggcatgattgcccataagaacatacatgtacagttgaactggtggttagctatacgggaaatggtaagtagtgttgtcttcagtatcttaatttgtttctgcaactgtgcactcctcccttggtggcaccctatgggtgtaggaaaaccactgttattaaacaggtgaaaaa

SEQ ID NO: 544 - protein, 260 aa, Homo sapiens
MLFLALGSPWAVELPLCGRRTALCAAAALRGPRASVSRASSSSGPSGPVAGWSTGPSGAARLLRRPGRAQIPVYWEGYVRFLNTPSDKSEDGRLIYTGNMARAVFGVKCFSYSTSLIGLTFLPYIFTQNNAISESVPLPIQIIFYGIMGSFTVITPVLLHFITKGYVIRLYHEATTDTYKAITYNAMLAETSTVFHQNDVKIPDAKHVFTTFYAKTKSLLVNPVLFPNREDYIHLMGYDKEEFILYMEETSEEKRHKDDK

SEQ ID NO: 545 - DNA, 587 bp, Homo sapiens
taaatcttttctgcttactgaaaaggaagagtctgatgattagttactgatcctctttgcatttgtaaagctttggagatattgaatcatgttaccatttctgtttttttccaccctgttttcttccatatttactgaagctcagaagcagtattgggtctgcaactcatccgatgcaagtatttcatacacctactgtgataaaatgcaatacccaatttcaattaatgttaacccctgtatagaattgaaaggatccaaaggattattgcacattttctacattccaaggagagatttaaagcaattatatttcaatctctatataactgtcaacaccatgaatcttccaaagcgcaaagaagttatttgccgaggatctgatgacgattactctttttgcagagctctgaagggagagactgtgaatacaacaatatcattctccttcaagggaataaaattttctaagggaaaatacaaatgtgttgttgaagctatttctgggagcccagaagaaatgctcttttgcttggagtttgtcatcctacaccaacctaattcaaattagaataaattgagtattt

SEQ ID NO: 546 - protein, 160 aa, Homo sapiens
MLPFLFFSTLFSSIFTEAQKQYWVCNSSDASISYTYCDKMQYPISINVNPCIELKGSKGLLHIFYIPRRDLKQLYFNLYITVNTMNLPKRKEVICRGSDDDYSFCRALKGETVNTTISFSFKGIKFSKGKYKCVVEAISGSPEEMLFCLEFVILHQPNSN

SEQ ID NO: 547 - DNA, 724 bp, Homo sapiens
caaaggtcagaggtaaagaagtcatggcggcgctgtgtcggacccgtgctgtggctgccgagagccattttctgcgagtgtttctcttcttcaggccctttcggggtgtaggcactgagagtggatccgaaagtggtagttccaatgccaaggagcctaagacgcgcgcaggcggtttcgcgagcgcgttggagcggcactcggagcttctacagaaggtggagcccctacagaagggttctccaaaaaatgtggaatcctttgcatctatgctgagacattctcctcttacacagatgggacctgcaaaggataaactggtcattggacggatctttcatattgtggagaatgatctgtacatagattttggtggaaagtttcattgtgtatgtagaagaccagaagtggatggagagaaataccagaaaggaaccagggtccggttgcggctattagatcttgaacttacgtctaggttcctgggagcaacaacagatacaactgtactagaggctaatgcagttctcttgggaatccaggagagtaaagactcaagatcgaaagaagaacatcatgaaaaataaatgaactttgcttagtggattgactcctttgctgaagtcagttattcatcaagaatgcaattagactaattgtgaataaatgattgaatgaagatataataaataaaagctataattataaaaaaaaaaaaaaaaaa

SEQ ID NO: 548 - protein, 187 aa, Homo sapiens
MAALCRTRAVAAESHFLRVFLFFRPFRGVGTESGSESGSSNAKEPKTRAGGFASALERHSELLQKVEPLQKGSPKNVESFASMLRHSPLTQMGPAKDKLVIGRIFHIVENDLYIDFGGKFHCVCRRPEVDGEKYQKGTRVRLRLLDLELTSRFLGATTDTTVLEANAVLLGIQESKDSRSKEEHHEK

SEQ ID NO: 549 - DNA, 4250 bp, Homo sapiens
gcccttctttgttgactgaggaaagctcgctccctgcccaggtttttcattgttgatcgaaattaacaccaggtggtgaatagagcccctcctaaggttgctcaggataaatcatttattaaataggtctgcttatcaggaggggcgtgaaggctcccaaaaggaaatgctggcacctgggcccagaagccagggcctctaactcctggggttgatttcttcagtgaagttgcaccctacaaagggaatatggccaaagcggcactcaactgaaggctgatatcaggcgattagacagccatgcattctgcgtttgtctggaatggattgtagagagatggacttatatgaggactaccagtccccgtttgattttgatgcaggagtgaacaaaagctatctctacttgtctcctagtggaaattcatctccacccggatcacctactcttcagaaatttggtctgctgagaacagacccagtccctgaggaaggagaagatgttgctgccacgatcagtgccacagagaccctctcggaagaggagcaggaagagctaagaagagaacttgcaaaggtagaagaagaaatccagactctgtctcaagtgttagcagcaaaagagaagcatctagcagagatcaagcggaaacttggaatcaattctctacaggaactaaaacagaacattgccaaagggtggcaagacgtgacagcaacatctgcttacaagaagacatctgaaaccttatcccaggctggacagaaggcctcagctgctttttcgtctgttggctcagtcatcaccaaaaagctggaagatgtaaaaaactccccaacttttaaatcatttgaagaaaaggtcgaaaacttaaagtctaaagtagggggaaccaagcctgctggtggtgattttggagaagtcttgaattcggctgcaaatgctagtgccaccaccacggagcctcttccagaaaagacacaggagagcctgtgagattcctacctttgttctgctacccactgccagatgctgcaagcgaggtccaagcacatcttgtcaacatgcattgccatgaatttctaccagatgtgcttttatttagctttacatattcctttgaccaaatagtttgtgggttaaacaaaatgaaaatatcttcacctctattcttgggaaacaccctttagtgtacatttatgttcctttatttaggaaacaccattataaaaacacttatagtaaatggggacattcactataatgatctaagaagctacagattgtcatagttgttttcctgctttacaaaattgctccagatctggaatgccagtttgacctttgtcttctataatatttcctttttttcccctctttgaatctctgtatatttgattcttaactaaaattgttctcttaaatattctgaatcctggtaattaaaagtttgggtgtattttctttacctccaaggaaagaactactagctacaaaaaatattttggaataagcattgttttggtataaggtacatattttggttgaagacaccagactgaagtaaacagctgtgcatccaatttattatagttttgtaagtaacaatatgtaatcaaacttctaggtgacttgagagtggaacctcctatatcattatttagcaccgtttgtgacagtaaccatttcagtgtattgtttattataccacttatatcaacttatttttcaccaggttaaaattttaatttctacaaaataacattctgaatcaagcacactgtatgttcagtaggttgaactatgaacactgtcatcaatgttcagttcaaaagcctgaaagtttagatctagaagctggtaaaaatgacaatatcaatcacattaggggaaccattgttgtcttcacttaatccatttagcactatttaaaataagcacaccaagttatatgactaatataacttgaaaattttttatactgaggggttggtgataactcttgaggatgtaatgcattaataaaaatcaactcatcattttctacttgttttcaatgtgttggaaactgtaaaatgatactgtagaacctgtctcctactttgaaaactgaatgtcagggctgagtgaatcaaagtgtctagacatatttgcatagaggccaaggtattctattctaataactgcttactcaacactaccaccttttccttatactgtatatgattatggcctacaatgttgtatttgttatttattaaattgtgattgttttattattgtttatgccaaatgttaactgccaagcttggagtgacctaaagcattttttaaaagcatggctagatttacttcagtataaattatcttatgaaaaccaaattttaaaagccacaggtgttgattgttataaaataacatgctgccattcttgattgctagagtttttgttagtactttggatgcaattaaaactatgtgctatcacatgtgaaaagcttaataaattccatctatcagtagtataggtctcaatatttattatgagaccagtggtctggaaacagcttgttgtaccgaatcaactggagtctatgcttaaaaaaaaaaaatttttttttaaccatccttaaattattgcttaatggtatcatattaacatattctaaataagggctttaaggcacaggctgttgaagcattttctcagaggagtggatctgtagaagtctgtctttctatagaaatattgtgcttactcaagtgttaaattattttttctatgaactagtctacttcttaaaattcaaacatattcttttgatcacattgtttcttgagcatcctgccctgctactaacttttcaacaaggcaaaatggagtaaagtggcaatttctttagatgagtgaaataccctcaagtctcttttctgcccaaaaagggaaaagtgatagaaatgggggtggcaagtggggtgagtggatgaaggtgggtattgggggtggctgtgaaagaaaataatggagaatcacttttctagacatctacctatacttaatctaagaaacaaagtaatctactgtaaagtactctgccccttgaaagaagtattaaaaagagtgaggatggatttagaaaaaaacatgaatttagaaatattcaaaatggtttttgtggcagattcaatattatgaattcacagatatttaaagaatgagaaacatagtaattagtagaaatgccagaaacagttcctggttcctcttgtgtttgacactaagaaaatagcaagagtgtgaaatctcagatacttatgaaatctcacagatgtaaggactcaagtgtagaagaaaatatccccttcttacaaaaagaaatgtcaatttatggagtttgtgggaaatagggcaagaattcttatgcttatgagagccaagtagtcagtggaagagagtagagctcaaaactggattatcaccttagcaacttagaatagtttgaaatagaaaaaaagtatttaatttggatctggatctgttaagatatgcacagtctattttttgtatagtattggaaaataaaaatgctataatttgggtatgggttcttttgtatacattacctgcccattgaggaaaggggcaagtccattatgcaacttctctccaaacccttcatattctggatatgatacttaaagagccatgagcagctacattctgcctatcagaaggcatttattaaatgactgcttgctgaagatgtgtccaaagagatcctacattaaggtcatttgtcagaatgatgtttgtgtttgtttagagttggctgacctccaactcctggggtcaaggaatcctactgccttagcttcccaaatagctaggactataggcatgcacccggccatgtgttttatttatagctcttaaagcccagatgaagaaatcacatttttgcccatagtgaagaaacatttggccattgattagtccttattttcagtgactgtcctgttttcattagattagagagaccctgtgtgggccacagttaatataaaccattatcacttttaagtaaacctgcacatcttagatttcataatttccttattgttctgactcaaaatgaactaagagcttttcactttttgtttgtaagttctcagagagtcgggtctgcaagtgcttttgcctgccaggattttgtactcaaataaatgctatttggcaactaaaaaaaaa

SEQ ID NO: 550 - protein, 224 aa, Homo sapiens
MDCREMDLYEDYQSPFDFDAGVNKSYLYLSPSGNSSPPGSPTLQKFGLLRTDPVPEEGEDVAATISATETLSEEEQEELRRELAKVEEEIQTLSQVLAAKEKHLAEIKRKLGINSLQELKQNIAKGWQDVTATSAYKKTSETLSQAGQKASAAFSSVGSVITKKLEDVKNSPTFKSFEEKVENLKSKVGGTKPAGGDFGEVLNSAANASATTTEPLPEKTQESL

SEQ ID NO: 551 - DNA, 4035 bp, Homo sapiens
gggcggcgccgccgcgcccgacgcctctgggggtggggacttcgcgggagtcgccggcggaggcgaggaggagctctgcgcggcgcggcgggcgatccgagccgggacgggctgcaggcgggggtgctgcagaggacacgaggcggcgggctggagacatggaccgcggcgagcaaggtctgctgagaacagacccagtccctgaggaaggagaagatgttgctgccacgatcagtgccacagagaccctctcggaagaggagcaggaagagctaagaagagaacttgcaaaggtagaagaagaaatccagactctgtctcaagtgttagcagcaaaagagaagcatctagcagagatcaagcggaaacttggaatcaattctctacaggaactaaaacagaacattgccaaagggtggcaagacgtgacagcaacatctgcttacaagaagacatctgaaaccttatcccaggctggacagaaggcctcagctgctttttcgtctgttggctcagtcatcaccaaaaagctggaagatgtaaaattgcaagccttttcacattcctttagtatacgttccattcagcattcaattagcatgcctgctatgagaaactccccaacttttaaatcatttgaagaaaaggtcgaaaacttaaagtctaaagtagggggaaccaagcctgctggtggtgattttggagaagtcttgaattcggctgcaaatgctagtgccaccaccacggagcctcttccagaaaagacacaggagagcctgtgagattcctacctttgttctgctacccactgccagatgctgcaagcgaggtccaagcacatcttgtcaacatgcattgccatgaatttctaccagatgtgcttttatttagctttacatattcctttgaccaaatagtttgtgggttaaacaaaatgaaaatatcttcacctctattcttgggaaacaccctttagtgtacatttatgttcctttatttaggaaacaccattataaaaacacttatagtaaatggggacattcactataatgatctaagaagctacagattgtcatagttgttttcctgctttacaaaattgctccagatctggaatgccagtttgacctttgtcttctataatatttcctttttttcccctctttgaatctctgtatatttgattcttaactaaaattgttctcttaaatattctgaatcctggtaattaaaagtttgggtgtattttctttacctccaaggaaagaactactagctacaaaaaatattttggaataagcattgttttggtataaggtacatattttggttgaagacaccagactgaagtaaacagctgtgcatccaatttattatagttttgtaagtaacaatatgtaatcaaacttctaggtgacttgagagtggaacctcctatatcattatttagcaccgtttgtgacagtaaccatttcagtgtattgtttattataccacttatatcaacttatttttcaccaggttaaaattttaatttctacaaaataacattctgaatcaagcacactgtatgttcagtaggttgaactatgaacactgtcatcaatgttcagttcaaaagcctgaaagtttagatctagaagctggtaaaaatgacaatatcaatcacattaggggaaccattgttgtcttcacttaatccatttagcactatttaaaataagcacaccaagttatatgactaatataacttgaaaattttttatactgaggggttggtgataactcttgaggatgtaatgcattaataaaaatcaactcatcattttctacttgttttcaatgtgttggaaactgtaaaatgatactgtagaacctgtctcctactttgaaaactgaatgtcagggctgagtgaatcaaagtgtctagacatatttgcatagaggccaaggtattctattctaataactgcttactcaacactaccaccttttccttatactgtatatgattatggcctacaatgttgtatttgttatttattaaattgtgattgttttattattgtttatgccaaatgttaactgccaagcttggagtgacctaaagcattttttaaaagcatggctagatttacttcagtataaattatcttatgaaaaccaaattttaaaagccacaggtgttgattgttataaaataacatgctgccattcttgattgctagagtttttgttagtactttggatgcaattaaaactatgtgctatcacatgtgaaaagcttaataaattccatctatcagtagtataggtctcaatatttattatgagaccagtggtctggaaacagcttgttgtaccgaatcaactggagtctatgcttaaaaaaaaaaaatttttttttaaccatccttaaattattgcttaatggtatcatattaacatattctaaataagggctttaaggcacaggctgttgaagcattttctcagaggagtggatctgtagaagtctgtctttctatagaaatattgtgcttactcaagtgttaaattattttttctatgaactagtctacttcttaaaattcaaacatattcttttgatcacattgtttcttgagcatcctgccctgctactaacttttcaacaaggcaaaatggagtaaagtggcaatttctttagatgagtgaaataccctcaagtctcttttctgcccaaaaagggaaaagtgatagaaatgggggtggcaagtggggtgagtggatgaaggtgggtattgggggtggctgtgaaagaaaataatggagaatcacttttctagacatctacctatacttaatctaagaaacaaagtaatctactgtaaagtactctgccccttgaaagaagtattaaaaagagtgaggatggatttagaaaaaaacatgaatttagaaatattcaaaatggtttttgtggcagattcaatattatgaattcacagatatttaaagaatgagaaacatagtaattagtagaaatgccagaaacagttcctggttcctcttgtgtttgacactaagaaaatagcaagagtgtgaaatctcagatacttatgaaatctcacagatgtaaggactcaagtgtagaagaaaatatccccttcttacaaaaagaaatgtcaatttatggagtttgtgggaaatagggcaagaattcttatgcttatgagagccaagtagtcagtggaagagagtagagctcaaaactggattatcaccttagcaacttagaatagtttgaaatagaaaaaaagtatttaatttggatctggatctgttaagatatgcacagtctattttttgtatagtattggaaaataaaaatgctataatttgggtatgggttcttttgtatacattacctgcccattgaggaaaggggcaagtccattatgcaacttctctccaaacccttcatattctggatatgatacttaaagagccatgagcagctacattctgcctatcagaaggcatttattaaatgactgcttgctgaagatgtgtccaaagagatcctacattaaggtcatttgtcagaatgatgtttgtgtttgtttagagttggctgacctccaactcctggggtcaaggaatcctactgccttagcttcccaaatagctaggactataggcatgcacccggccatgtgttttatttatagctcttaaagcccagatgaagaaatcacatttttgcccatagtgaagaaacatttggccattgattagtccttattttcagtgactgtcctgttttcattagattagagagaccctgtgtgggccacagttaatataaaccattatcacttttaagtaaacctgcacatcttagatttcataatttccttattgttctgactcaaaatgaactaagagcttttcactttttgtttgtaagttctcagagagtcgggtctgcaagtgcttttgcctgccaggattttgtactcaaataaatgctatttggcaactaaaaaaaaa

SEQ ID NO: 552 - protein, 207 aa, Homo sapiens
MDRGEQGLLRTDPVPEEGEDVAATISATETLSEEEQEELRRELAKVEEEIQTLSQVLAAKEKHLAEIKRKLGINSLQELKQNIAKGWQDVTATSAYKKTSETLSQAGQKASAAFSSVGSVITKKLEDVKLQAFSHSFSIRSIQHSISMPAMRNSPTFKSFEEKVENLKSKVGGTKPAGGDFGEVLNSAANASATTTEPLPEKTQESL

SEQ ID NO: 553 - DNA, 3966 bp, Homo sapiens
gggcggcgccgccgcgcccgacgcctctgggggtggggacttcgcgggagtcgccggcggaggcgaggaggagctctgcgcggcgcggcgggcgatccgagccgggacgggctgcaggcgggggtgctgcagaggacacgaggcggcgggctggagacatggaccgcggcgagcaaggtctgctgagaacagacccagtccctgaggaaggagaagatgttgctgccacgatcagtgccacagagaccctctcggaagaggagcaggaagagctaagaagagaacttgcaaaggtagaagaagaaatccagactctgtctcaagtgttagcagcaaaagagaagcatctagcagagatcaagcggaaacttggaatcaattctctacaggaactaaaacagaacattgccaaagggtggcaagacgtgacagcaacatctgcttacaagaagacatctgaaaccttatcccaggctggacagaaggcctcagctgctttttcgtctgttggctcagtcatcaccaaaaagctggaagatgtaaaaaactccccaacttttaaatcatttgaagaaaaggtcgaaaacttaaagtctaaagtagggggaaccaagcctgctggtggtgattttggagaagtcttgaattcggctgcaaatgctagtgccaccaccacggagcctcttccagaaaagacacaggagagcctgtgagattcctacctttgttctgctacccactgccagatgctgcaagcgaggtccaagcacatcttgtcaacatgcattgccatgaatttctaccagatgtgcttttatttagctttacatattcctttgaccaaatagtttgtgggttaaacaaaatgaaaatatcttcacctctattcttgggaaacaccctttagtgtacatttatgttcctttatttaggaaacaccattataaaaacacttatagtaaatggggacattcactataatgatctaagaagctacagattgtcatagttgttttcctgctttacaaaattgctccagatctggaatgccagtttgacctttgtcttctataatatttcctttttttcccctctttgaatctctgtatatttgattcttaactaaaattgttctcttaaatattctgaatcctggtaattaaaagtttgggtgtattttctttacctccaaggaaagaactactagctacaaaaaatattttggaataagcattgttttggtataaggtacatattttggttgaagacaccagactgaagtaaacagctgtgcatccaatttattatagttttgtaagtaacaatatgtaatcaaacttctaggtgacttgagagtggaacctcctatatcattatttagcaccgtttgtgacagtaaccatttcagtgtattgtttattataccacttatatcaacttatttttcaccaggttaaaattttaatttctacaaaataacattctgaatcaagcacactgtatgttcagtaggttgaactatgaacactgtcatcaatgttcagttcaaaagcctgaaagtttagatctagaagctggtaaaaatgacaatatcaatcacattaggggaaccattgttgtcttcacttaatccatttagcactatttaaaataagcacaccaagttatatgactaatataacttgaaaattttttatactgaggggttggtgataactcttgaggatgtaatgcattaataaaaatcaactcatcattttctacttgttttcaatgtgttggaaactgtaaaatgatactgtagaacctgtctcctactttgaaaactgaatgtcagggctgagtgaatcaaagtgtctagacatatttgcatagaggccaaggtattctattctaataactgcttactcaacactaccaccttttccttatactgtatatgattatggcctacaatgttgtatttgttatttattaaattgtgattgttttattattgtttatgccaaatgttaactgccaagcttggagtgacctaaagcattttttaaaagcatggctagatttacttcagtataaattatcttatgaaaaccaaattttaaaagccacaggtgttgattgttataaaataacatgctgccattcttgattgctagagtttttgttagtactttggatgcaattaaaactatgtgctatcacatgtgaaaagcttaataaattccatctatcagtagtataggtctcaatatttattatgagaccagtggtctggaaacagcttgttgtaccgaatcaactggagtctatgcttaaaaaaaaaaaatttttttttaaccatccttaaattattgcttaatggtatcatattaacatattctaaataagggctttaaggcacaggctgttgaagcattttctcagaggagtggatctgtagaagtctgtctttctatagaaatattgtgcttactcaagtgttaaattattttttctatgaactagtctacttcttaaaattcaaacatattcttttgatcacattgtttcttgagcatcctgccctgctactaacttttcaacaaggcaaaatggagtaaagtggcaatttctttagatgagtgaaataccctcaagtctcttttctgcccaaaaagggaaaagtgatagaaatgggggtggcaagtggggtgagtggatgaaggtgggtattgggggtggctgtgaaagaaaataatggagaatcacttttctagacatctacctatacttaatctaagaaacaaagtaatctactgtaaagtactctgccccttgaaagaagtattaaaaagagtgaggatggatttagaaaaaaacatgaatttagaaatattcaaaatggtttttgtggcagattcaatattatgaattcacagatatttaaagaatgagaaacatagtaattagtagaaatgccagaaacagttcctggttcctcttgtgtttgacactaagaaaatagcaagagtgtgaaatctcagatacttatgaaatctcacagatgtaaggactcaagtgtagaagaaaatatccccttcttacaaaaagaaatgtcaatttatggagtttgtgggaaatagggcaagaattcttatgcttatgagagccaagtagtcagtggaagagagtagagctcaaaactggattatcaccttagcaacttagaatagtttgaaatagaaaaaaagtatttaatttggatctggatctgttaagatatgcacagtctattttttgtatagtattggaaaataaaaatgctataatttgggtatgggttcttttgtatacattacctgcccattgaggaaaggggcaagtccattatgcaacttctctccaaacccttcatattctggatatgatacttaaagagccatgagcagctacattctgcctatcagaaggcatttattaaatgactgcttgctgaagatgtgtccaaagagatcctacattaaggtcatttgtcagaatgatgtttgtgtttgtttagagttggctgacctccaactcctggggtcaaggaatcctactgccttagcttcccaaatagctaggactataggcatgcacccggccatgtgttttatttatagctcttaaagcccagatgaagaaatcacatttttgcccatagtgaagaaacatttggccattgattagtccttattttcagtgactgtcctgttttcattagattagagagaccctgtgtgggccacagttaatataaaccattatcacttttaagtaaacctgcacatcttagatttcataatttccttattgttctgactcaaaatgaactaagagcttttcactttttgtttgtaagttctcagagagtcgggtctgcaagtgcttttgcctgccaggattttgtactcaaataaatgctatttggcaactaaaaaaaaa

SEQ ID NO: 554 - protein, 184 aa, Homo sapiens
MDRGEQGLLRTDPVPEEGEDVAATISATETLSEEEQEELRRELAKVEEEIQTLSQVLAAKEKHLAEIKRKLGINSLQELKQNIAKGWQDVTATSAYKKTSETLSQAGQKASAAFSSVGSVITKKLEDVKNSPTFKSFEEKVENLKSKVGGTKPAGGDFGEVLNSAANASATTTEPLPEKTQESL

SEQ ID NO: 555 - DNA, 1780 bp, Homo sapiens
atgttgcgagccacagctccctgctggttcccacctggatacccagaaactaagaaggtggccgaggaggcggccctcgaggctccagaattcccactgccctctcatcagcctgcccagagcttcgggctctgggtgccccagatgcacaagcaggcctcagcatttgtggacatccaggcagagccccagaacaggggtccggcggtgcccccagcgtggcccaagatggtgacggagtcgtgctacttccctgcgcagaggggatcggcctgccgcttgccagccgccccaaggctgacagagaggccctcgggagtccgcatctcagcccccaggaagaggaagacgatcgcccactcttccagcccttgcttggtcacaggttacacagatgccaagagaacccgggtggccagcagtagccaacgctccagtggctccaaggtcggcagacagccagggaagacgcgcaacaggtcagggatggcatgcaagaccaccgccaccatcagctctaagcgaatcgtccgtcgtccatccttaccgagtttgaagaaacccattatcctccgaagctctgggtgccaagtccccaccgtcctccgccgaggctatctccaactgttcaccgaagagtgtctcaagttctgcgcctccaagcaggaggccgaggagaaggcgctgaacgaggagaaggtggcctacgactgcagccccaacaagaacaggtacctgaacgtggtcctgaacaccctcaagagactgaagggcctgacccccagctccatgcccggcctcagcagggccgccctgtacagccgcctccaggagttcctgctcacccaggaccagctcaaggagaacggctaccccttcccgcaccccgagcggcccggaggcgccgtcctcttcactggccaggggaaggggcccggcgactcctcctgcagggtctgctgccgttgtggcaccgagtacctggtgtcctcctcgggccgctgtgtacgcgaccagttgtgttattatcactgggggcgggtccgctcgagccaggtggctggaggccgggttagccagtacacctgctgtgcagctgctcctggctctgtgggctgccaggtggcaaagcagcacgtgcgggacggccgcaaggagagcctcgatggcttcgtggagaccttcaagaaagagttgtccagagacgcttatccaggaatctacgccttggactgtgagatgtgctacaccacgcatggcctagagctgacccgcgtcaccgtggtggacgccgacatgcgagtggtgtacgacaccttcgtcaagcccgacaacgagatcgtggactacaacaccaggttttccggagtcaccgaggccgacgtcgccaagacgagcatcacgttgccccaagtccaagccatcctgctgagctttttcagcgcccaaaccatcctcatcgggcacagcctggagagcgacctgctggccctgaagctcatccacagcaccgtggtggacacggccgtgctcttcccgcactacctgggtttcccctacaagcgctccctcaggaatctcgcggccgactacctggcacagatcatccagaacagccaggacggccacaactccagcgaggacgcaaacgcctgcctgcagctggtgatgtggaaggtccgacagcgcgcccagatccagccacgccaccggtccgcctctcccgccgccctggcctgtccttagccccaggcctcttccaaaactgccattcgtcccg

SEQ ID NO: 556 - protein, 581 aa, Homo sapiens [sequence omitted]

SEQ ID NO: 557 - DNA, 2062 bp, Homo sapiens
atgttgcgagccacagctccctgctggttcccccctggatacccagaagctaagaaggtggccgaggaggcggccctggaggcaagccgccatttgggaggggagcagagccaggccggtgctcccgaaggcagcaagatgttgcgagccacagctccctgctggttccgccctggatacccagaagctaagaaggtggccaaggaggcggccccggaggcaagccgccatttgggagcggagcagagcccggccggtgctcccgaaggcagcaagatgttgcgagccacagctccctgctggttcccacctggatacccagaagctaagaaggtggccgaggaggcggccctcgaggctccagaattcccactgccctctcatcagcctgcccagagcttcgggctctgggtgccccagatgcacaagcaggcctcagcatttgtggacatccaggcggagccccagaacaggggtccggcggtgcccccagcgtggcccaagatggtgacggagtcgtgctacttccctgcgcagaggggatcggcctgccgcttgccagccgccccaaggctgacagagaggccctcgggagtccgcatctcagcccccaggaagaggaagacgatcgcccactcttccagcccttgcttggtcacaggttacacagatgccaagagaacccgggtggccagcagcagccaacgctcccgtggctccaaggtcggcagacagccagggaagactcgcaacaggtcagggatggcatgcaagaccaccgccaccaccagctctaagcgaatcgtccgtcgtccatccttaccgagtttgagtttgaagaaacccattatcctccgaagctctgggtgccaagtccccaccgtcctccgccgaggctatctccaactgttcaccgaagagtgtctcaagttctgcgcctccaagcaggaggccgaggagaaggcgctgaacgaggagaaggtggcctacgactgcagccccaacaagaacaggtacctgaacgtggtcctgaacaccctcaagagactgaagggcctgacccccagctccatgcccggcctcagcagggccgccctgtacagccgcctccaggagttcctgctcacccaggaccagctcaaggagaacggctaccccttcccgcaccccgagcggcccggaggcgccgtcctcttcactggccaggggaaggggcccggcgactcctcctgcagggtctgctgccgttgtggcaccgagtacctggtgtcctcctcgggccgctgtgtacgcgaccagttgtgttattatcactgggggcgggtccgctcgagccaggtggctggaggccgggttagccagtacacctgctgtgcagctgctcctggctctgtgggctgccaggtggcaaagcagcacgtgcgggacggccgcaaggagagcctcgatggcttcgtggagaccttcaagaaagagttgtccagagacgcttatccaggaatctacgccttggactgtgagatgtgctacaccacgcatggcctggagctgacccgcgtcaccgtggtggacgccgacatgcgagtggtgtacgacaccttcgtcaagcccgacaacgagatcgtggactacaacaccaggttttccggagtcaccgaggccgacgtcgccaagacgagcatcacgttgccccaagtccaagccatcctgctgagctttttcagcgcccaaaccatcctcatcgggcacagcctggagagcgacctgctggccctgaagctcatccacaacaccgtggtggacacggccgtgctcttcccgcactacctgggtttcccctacaagcgctccctcaggaatctcgcggccgactacctggcacagatcatccaggacagccaggacggccacaactccagcgaggacgcaaacgcctgcctgcagctggtgatgtggaaggtccgacagcgcgcccagatccagccacgccaccggtccgcctctcccgccgccctggcctgtccttagccccaggcctcttccaaaaccgccatcagtcccg

SEQ ID NO: 558 - protein, 675 aa, Homo sapiens
MLRATAPCWFPPGYPEAKKVAEEAALEASRHLGGEQSQAGAPEGSKMLRATAPCWFRPGYPEAKKVAKEAAPEASRHLGAEQSPAGAPEGSKMLRATAPCWFPPGYPEAKKVAEEAALEAPEFPLPSHQPAQSFGLWVPQMHKQASAFVDIQAEPQNRGPAVPPAWPKMVTESCYFPAQRGSACRLPAAPRLTERPSGVRISAPRKRKTIAHSSSPCLVTGYTDAKRTRVASSSQRSRGSKVGRQPGKTRNRSGMACKTTATTSSKRIVRRPSLPSLSLKKPIILRSSGCQVPTVLRRGYLQLFTEECLKFCASKQEAEEKALNEEKVAYDCSPNKNRYLNVVLNTLKRLKGLTPSSMPGLSRAALYSRLQEFLLTQDQLKENGYPFPHPERPGGAVLFTGQGKGPGDSSCRVCCRCGTEYLVSSSGRCVRDQLCYYHWGRVRSSQVAGGRVSQYTCCAAAPGSVGCQVAKQHVRDGRKESLDGFVETFKKELSRDAYPGIYALDCEMCYTTHGLELTRVTVVDADMRVVYDTFVKPDNEIVDYNTRFSGVTEADVAKTSITLPQVQAILLSFFSAQTILIGHSLESDLLALKLIHNTVVDTAVLFPHYLGFPYKRSLRNLAADYLAQIIQDSQDGHNSSEDANACLQLVMWKVRQRAQIQPRHRSASPAALACP

SEQ ID NO: 559 - DNA, 7032 bp, Homo sapiens
atgttgcgagccacagctccctgctggttcccccctggatacccagaagctaagaaggtggccgaggaggcggccctggaggcaagccgccatttgggaggggagcagagccaggccggtgctcccgaaggcagcaagatgttgcgagccacagctccctgctggttccgccctggatacccagaagctaagaaggtggccaaggaggcggccccggaggcaagccgccatttgggagcggagcagagcccggccggtgctcccgaaggcagcaagatgttgcgagccacagctccctgctggttcccacctggatacccagaagctaagaaggtggccgaggaggcggccctcgaggctccagaattcccactgccctctcatcagcctgcccagagcttcgggctctgggtgccccagatgcacaagcaggcctcagcatttgtggacatccaggcggagccccaaaacaggggtccggcggtgcccccagcgtggcccaagatggtgacggagtcgtgctacttccctgcgcagaggggatcggcctgccgcttgccagccgccccaaggctgacagagaggccctcgggagtccgcatctcagcccccaggaagaggaagacgatcgcccactcttccagcccttgcttggtcacaggttacacagatgccaagagaacccgggtggccagcagcagccaacgctcccgtggctccaaggtcggcagacagccagggaagacgcgcaacaggtcagggatggcatgcaagaccaccgccaccaccagctctaagcgaatcgtccgtcgtgcatccttaccgagtttgagtttgaagaaacccattatcctccgaagctctgggtgccaagtccccaccgtcctccgccgaggctatctccaactgttcaccgaagagtgtctcaagttctgcgcctccaagcaggaggccgaggagaaggcgctgaacgaggagaaggtggcctacgactgcagccccaacaagaacaggtacctgaacgtggtcctgaacaccctcaagagactgaagggcctgacccccagctccatgcccggcctcagcagggccgccctgtacagccgcctccaggagttcctgctcacccaggaccagctcaaggagaacggctaccccttcccgcaccccgagcggcccggaggcgccgtcctcttcactggccaggggaaggggcccggcgactcctcctgtagggtctgctgccgttgtggcaccgagtacctggtgtcctcctcgggccgctgtgtacgcgaccagttgtgttattatcactgggggcgggtccgctcgagccaggtggctggaggccgggttagccagtacacctgctgtgcagctgctcctggctctgtgggctgccaggtggcaaagcagcacgtgcgggacggccgcaaggagagcctcgatggcttcgtggagaccttcaagaaagagttgtccagagacgcttatccaggaatctacgccttggactgtgagatgtgctacaccacgcatggcctagagctgacccgcgtcaccgtggtggacgccgacatgcgagtggtgtacgacaccttcgtcaagcccgacaacgagatcgtggactacaacaccaggttttccggagtcaccgaggccgacgtcgccaagacgagcatcacgttgccccaagtccaagccatcctgctgagctttttcagcgcccaaaccatcctcatcgggcacagcctggagagcgacctgctggccctgaagctcatccacagcaccgtggtggacacggccgtgctcttcccgcactacctgggtttcccctacaagcgctccctcaggaatctcgcggccgactacctggcacagatcatccaggacagccaggacggccacaactccagcgaggacgcaagcgcctgcctgcagctggtgatgtggaaggtccgacagcgcgcccagatccagccacgccaccggtccgcctctcccgccgccctggcctgtccttagccccaggcctcttccaaaaccgccatcagtcccgagagctcaccctgcccacctcgccgcaaagcgaaagaaactggagcagccggcggcaggagagggcaaaaagccaagagtaaccccaaccccccactcccggtcccccggaatccctgccgcggcccctcgggcctgtccacatccctctgcccctcccagacctctgtccttccaccaatcgcctcccgcagccccgagccgccactcccagtcccccgagtccctgccgcgcgccctcgcgcctgttcacatccctctgcccatccgagacctctgtctttacaccactagccaccccacgtgggacttccatggcttctgagtacaaggccagccccccggcccaccagctttcggaatgcctgcttacctctttttctgtagaggcaccacagggaggtgggtgaagcacttcggctctggagttacagatctgggttcaaggccaaattccaccacttactaggtttgtaatattggacagataacgtctttgcgcttctaccttttggtctttaaagtgtgatcaaaagagacttagactcccacatagtaataataataataatggcaaacttaacaccccactgtcaacattagacacaccaacgagacagaaagttaaaaaaggatatccgggaattgaactcagctctgcaccaagcggacctaggagacatgtacagaacgctccaccccaaatcaacagaatatacattcttctcagcaccacatcacacttatttccacattgaccacatagttggaagtaaagcactcctcagtaaaagtaaaataacagaaattattacaaacggtctctcagaccacattgcaatcaaactagacctcaggattgagaaactcactcaaaaccgctcaactgcatggaaaccgtacaagctgctcctgaatgagtacagggtacataacgaaatgaaggcagaaataaagatattctctgaaagcaatgagaacaaagacacaacataccagaatctctgggacacatttaaagcagtgtgtagagggaaatttatagcactaaatgcccacaagggaaagcaggaaagatcaaaaatgcataccctaacatcaccattaaaagaatgagagaagcaagggcaaacacattcaaaagctagcagaaggcaagaaataactaagatctgagcaggactgaaggagatagagacacaaaaaacgtgggatggttttttagtatgtggaaaaattctttgatggtttttccttgaaaaagtgaaacctaaatccactccgtttggatgtgggacgatttgcggttgttgcttcctaaacataaactacgtttaggctgatatttcagacaatgaaacctttgagtgcccgtagcgggaagatctcggttgctgagtgcagggaaggaggatgtaattccatcatatactctctctgtgcctaccgcatttggaaccatgcgagtgatacctatttataaaataaaataaaccaagcacaagtacgaacttagcaacactatattgagttaatagaacggtatcttgtatttcttctgtccaggtatacttataaatgcctgcagggatttcaccacctcagggtggagagactgaatgcttgtgagggaattaggatggtggaatattggtgttaccagggaagggggcgggatgtttgaaaatgctatgtttactcgttcttgggttccaataaaggagaaacagggcacaggagtcggaaggactagtggcaatagtgatgaaaggacctccttatcatgctggcaatgttaattacccaggtgtaggaagccatacactgaggcggaagatcgcaagtcagagtggccggcaggcacaacctcctggcacaccagaggcaggtcttcaatacccactggtttccccaacaggctgcgtaagggaccctgagccacagtgagttggtcaaatgctcctgacagtgtggagaaaccaacagacaaaacgtgggtgcaaaagtgatgagaccccacactttacactcgtggtgacaatgaagctattaagtaacagcttctcaacctatgctgtttcctgttggatgcacataatccatttgcactgcagacaattttaggatgtggtttacagtaaggtggatggtaccttatggcaaaaatctctcagaaatttatgtgtggttttaaagtcattccagtcctagcacgttgtgcttttcagagacgccatagctgtttttccctttgtaatatcaaagcagtaatatgttctctggaggcctgttgggtgaatttaatggaatcaagttaagtaggtgccagaaccattgctgttttccctccatagccctgccacccactgtaaaaaggttgatgagattacttaatgatttccaattaagttgtatttccaaatatcatgatttccattttaatgtagttggtatggagctctgtgagtgtgtgcttcttttattatggatcacgttcagcttctttttatttgcctcctagtcataatagtaaaactctactcctctactccgaggagtccctaccacccatctcatcactttccagcccagcactcttcatgctcattcatttaaagcattcaacattgtgtaaatgaatcttggaaggccaaagctactgaatttagcgaatttgtggaggcattgccacaaatcagccaggtgaagtttcacacaatcgaagactgcacaactcctagaaggcagcactatgctgcaaacccagacggccactcttctcacccctcgtccgtttgctgttctggataatgaggttcaaaagtcacctaggcaactgccaaaatagctgaaatggagaaagggcttcaggctggtgactagcagaggtccacctgacccccgtaagctgctgaacaagtagggctgccagaaatgtcccactagggaatttggtagagacgaagacatgctcaccggacaagggttcctcccaggatacgcccgagcggaagaagcgggctctgagccacgccctttcaccctcctctaccccgccctgggctggtgaaggtgcgcgccaggatgtggactactgagccctgaagaaataagtccttccactttgaccccatggaggattgcctgtgaggaacttaaacgagtctaccagtgtctagacacgggggcaggtctgtccggcacagcagctccctcaaggaggagaagagtgaggagaaaggaaactcaagtctcaccattctgtcctgggagagaagaggaggatctcatctctcatctgtccaaacaaggcaaggagactttctctcatctttccaagcaaggcaaggagactttttatcattaggaaacaaaaagaatttagaaggaatgaaagcagcccgtaaggtgaattcctaaggactgcccattgaaactgacaaaattgcccttgtttgatgagaggaatgagcagagcattgatgtggtgaacaaggatctagtgagactttcccagcatgtttctaccaaagctttatctaagcttctcagaacactctcctaataagcagatgtttggcctttcagaaagtcaacaagcaaaatgccttgagtgtcccaaaacactgatgccatgatgtgggctcctgactggcctccttttcctttgactggaccgctgccacctcttggtagccatcgctttcatgatgctttgccttggagatcatattggtgaagccatgttccaactgccgcttacaatttgtcagagggatgcgtcaggatcgtgatccctcctgtttaaaatttccactgatagctctcgtcgtaaatgcagctgatctgggcacagtggttttcacagccactgcaggattcatcttccacatcttctcacctcttcttgaaacaagctatacattcgtaaagagttcatttctttggggtagtgtccttacaagcttttcttaaaacgtcaatgatgtcttcaatcttccacccaagcttcaccataaatttgatgtttcctcttgctgcaattttcgtggaattcatgttgctctgacgggagtccttttcagtggatgtctcatccttcttagtgcctcaaactagatctagttcagaaaggttatcagaagttaggacaagtttattttagtgcaaaccagtggaaatccatgcatagtttcttcaccatgtgcattttctatgaacctttggaagaccacctgtgttgaacattgcccaagtcctgggagagaagtgggtgcggtccgcttcctgtcctcaatttgcccgcagcggcggagtgcacagagcagggaaaggcagccccagagggatcccgccctccagcatgcagcagactgctggcccagtcctggctccaaggggtgctgtgtgggcccaagcaagttgaccaacctccctgaaccttaatttaatcctaggtagcccaattccagtagccattataggactgccctgccgggacagttacttaactcaggaaaagcaacctagctccaagtttagcaaccgggagttccagttgattccattagcgcaccccctgaggcattcccaagctggagtctggtggaagatgaggctcagtgtgattggactgaagcaccaacctatcaaggagaagtcccacccagtctgccctgtgcctatataaaggcgacaagtggcggccgcagcactcattgaagccgccagttgggagaggagcagagccaggccggtgctcccgaaggcagcaagatgttgcgagccacagctccctgctggttcccccctggatacccagaagctaagaaggtggccgaggaggcggccctggaggcaagccgccatttgggaggggagcagagccaggccggtgctcccgaaggcagcaagatgttgcgagccacagctccctgctggttccgccctggatacccagaagctaagaag

SEQ ID NO: 560 - protein, 675 aa, Homo sapiens
MLRATAPCWFPPGYPEAKKVAEEAALEASRHLGGEQSQAGAPEGSKMLRATAPCWFRPGYPEAKKVAKEAAPEASRHLGAEQSPAGAPEGSKMLRATAPCWFPPGYPEAKKVAEEAALEAPEFPLPSHQPAQSFGLWVPQMHKQASAFVDIQAEPQNRGPAVPPAWPKMVTESCYFPAQRGSACRLPAAPRLTERPSGVRISAPRKRKTIAHSSSPCLVTGYTDAKRTRVASSSQRSRGSKVGRQPGKTRNRSGMACKTTATTSSKRIVRRASLPSLSLKKPIILRSSGCQVPTVLRRGYLQLFTEECLKFCASKQEAEEKALNEEKVAYDCSPNKNRYLNVVLNTLKRLKGLTPSSMPGLSRAALYSRLQEFLLTQDQLKENGYPFPHPERPGGAVLFTGQGKGPGDSSCRVCCRCGTEYLVSSSGRCVRDQLCYYHWGRVRSSQVAGGRVSQYTCCAAAPGSVGCQVAKQHVRDGRKESLDGFVETFKKELSRDAYPGIYALDCEMCYTTHGLELTRVTVVDADMRVVYDTFVKPDNEIVDYNTRFSGVTEADVAKTSITLPQVQAILLSFFSAQTILIGHSLESDLLALKLIHSTVVDTAVLFPHYLGFPYKRSLRNLAADYLAQIIQDSQDGHNSSEDASACLQLVMWKVRQRAQIQPRHRSASPAALACP

SEQ ID NO: 561 - DNA, 2062 bp, Homo sapiens
atgttgcgagccacagctccctgctggttcccccctggatacccagaagctaagaaggtggccgaggaggcggccctggaggcaagccgccatctgggaggggagcagagccaggccggtgctcccgaaggcagcaagatgttgcgagccacagctccctgctggttcccccctggatacccagaagctaagaaggtggccaaggaggcggccccggaggcaagccgccatttgggagcggagcagagcccggccggtgctcccgaaggcagcaagatgttgcgagccacagctccctgctggttcccacctggatacccagaagctaagaaggtggtcgaggaggcggccctcgaggctccagaattcccactgccctctcatcagcctgcccagagcttcgggctctgggtgccccagatgcacaagcaggcctcagcatttgtggacatccaggcggagccccagaacaggggtccggcggtgcccccagcgtggcccaagatggtgacggagtcgtgctacttccctgcgcagaggggatcggcctgccgcttgccagccgccccaaggctgacagagaggccctcgggagtccgcatctcagcccccaggaagaggaagacgatcgcccactcttccagcccttgcttggtcacaggttacacagatgccaagagaacccgggtggccagcagcagccaacgctcccgtggctccaaggtcggcagacagccagggaagacgcgcaacaggtcagggatggcatgcaagaccaccgccaccaccagctctaagcgaatcgtccgtcgtgcatccttaccgagtttgagtttgaagaaacccattatcctccgaagctctgggtgccaagtccccaccgtcctccgccgaggctatctccaactgttcaccgaagagtgtctcaagttctgcgcctccaagcaggaggccgaggagaaggcgctgaacgaggagaaggtggcctacgactgcagccccaacaagaacaggtacctgaacgtggtcctgaacaccctcaagagactgaagggcctgacccccagctccatgcccggcctcagcagggccgccctgtacagccgcctccgggagttcctgctcacccaggaccagctcaaggagaacggctaccccttcccgcaccccgagcggcccggaggcgccgtcctcttcactggccaggggaaggggcccggcgactcctcctgcagggtctgctgccgttgtggcaccgagtacctggtgtcctcctcgggccgctgtgtacgcgaccagttgtgttattatcactgggggcgggtccgctcgagccaggtggctggaggccgggttagccagtacacctgctgtgcagctgctcctggctctgtgggctgccaggtggcaaagcagcacgtgcgggacggccgcaaggagagcctcgatggcttcgtggagaccttcaagaaagagttgtccagagacgcttatccaggaatctacgccttggactgtgagatgtgctacaccacgcatggcctagagctgacccgcatcaccgtggtggacgccgacatgcgagtggtgtacgacaccttcgtcaagcccgacaacgagatcgtggactacaacaccaggttttccggagtcaccgaggccgacgtcgccaagacgagcatcacgttgccccaagtccaagccatcctgctgagctttttcagcgcccaaaccatcttcatcgggcacagcctggagagcgacctgctggccctgaagctcatccacagcaccgtggtggacacggccgtgctcttcccgcactacctgggtttcccctacaagcgctccctcaggaatctcgcggccgactacctggcacagatcatccaggacagccaggacggccacaactccagcgaggacgcaaacgcctgcctgcagctggtgatgtggaaggtccaacagcgcgcccagatccagccacgccaccggtccgcctctcccgccgccctggcctgtccttagccccaggcctcttccaaaaccgccatcagtcccg

SEQ ID NO: 562 - protein, 675 aa, Homo sapiens
MLRATAPCWFPPGYPEAKKVAEEAALEASRHLGGEQSQAGAPEGSKMLRATAPCWFPPGYPEAKKVAKEAAPEASRHLGAEQSPAGAPEGSKMLRATAPCWFPPGYPEAKKVVEEAALEAPEFPLPSHQPAQSFGLWVPQMHKQASAFVDIQAEPQNRGPAVPPAWPKMVTESCYFPAQRGSACRLPAAPRLTERPSGVRISAPRKRKTIAHSSSPCLVTGYTDAKRTRVASSSQRSRGSKVGRQPGKTRNRSGMACKTTATTSSKRIVRRASLPSLSLKKPIILRSSGCQVPTVLRRGYLQLFTEECLKFCASKQEAEEKALNEEKVAYDCSPNKNRYLNVVLNTLKRLKGLTPSSMPGLSRAALYSRLREFLLTQDQLKENGYPFPHPERPGGAVLFTGQGKGPGDSSCRVCCRCGTEYLVSSSGRCVRDQLCYYHWGRVRSSQVAGGRVSQYTCCAAAPGSVGCQVAKQHVRDGRKESLDGFVETFKKELSRDAYPGIYALDCEMCYTTHGLELTRITVVDADMRVVYDTFVKPDNEIVDYNTRFSGVTEADVAKTSITLPQVQAILLSFFSAQTIFIGHSLESDLLALKLIHSTVVDTAVLFPHYLGFPYKRSLRNLAADYLAQIIQDSQDGHNSSEDANACLQLVMWKVQQRAQIQPRHRSASPAALACP

SEQ ID NO: 563 - DNA, 2062 bp, Homo sapiens
atgttgcgagccacagctccctgctggttcccccctggatacccagaagctaagaaggtggccgaggaggcggccctggaggcaagccgccatttgggaggggagcagagccaggccggtgctcccgaaggcagcaagatgttgcgagccacagctccctgctggttccgccctggatacccagaagctaagaaggtggccaaggaggcggccccggaggcaagccgccatttgggagcggagcagagcccggccggtgctcccgaaggcagcaagatgttgcgagccacagctccctgctggttcccacctggatacccagaagctaagaaggtggccgaggaggcggccctcgaggctccagaattcccactgccctctcatcagcctgcccagagcttcgggctctgggtgccccagatgcacaagcaggcctcagcatttgtggacatccaggcggagccccagaacaggggtccggcggtgcccccagcgtggcccaagatggtgacggagtcgtgctacttccctgcgcagaggggatcggcctgccgcttgccagccgccccaaggctgacagagaggccctcgggagtccgcatctcagcccccaggaagaggaagacgatcgcccactcttccagcccttgcttggtcacaggttacacagatgccaagagaacccgggtggccagcagcagccaacgctcccgtggctccaaggtcggcagacagccagggaagacgcgcaacaggtcagggatggcatgcaagaccaccgccaccaccagctctaagcgaatcgtccgtcgtccatccttaccgagtttgagtttgaagaaacccattatcctccgaagctctgggtgtcaagtccccaccgtcctccgccgaggctatctccaactgttcaccgaagagtgtctcaagttctgcgcctccaagcaggaggccgaggagaaggcgctgaacgaggagaaggtggcctacgactgcagccccaacaagaacaggtacctgaacgtggtcctgaacaccctcaagagactgaagggcctgacccccagctccatgcccggcctcagcagggccgccctgtacagccgcctccaggagttcctgctcacccaggaccagctcaaggagaacggctaccccttcccgcaccccgagcggcccggaggcgccgtcctcttcactggccaggggaaggggcccggcgactcctcctgcagggtctgctgccgttgtggcaccgagtacctggtgtcctcctcgggccgctgtgtacgcgaccagttgtgttattatcactgggggcgggtccgctcgagccaggtggctggaggccgggttagccagtacacctgctgtgcagctgctcctggctctgtgggctgccaggtggcaaagcagcacgtgcgggacggccgcaaggagagcctccatggcttcgtggagaccttcaagaaagagttgtccagagacgcttatccaggaatctacgccttggactgtgagatgtgctacaccacgcatggcctagagctggcccgcgtcaccgtggtggacgccgacatgcgagtggtgtacgacaccttcgtcaagcccgacaacgagatcgtggactacaacaccaggttttccggagtcaccgaggccgacgtcgctaagacgagcatcacgttgccccaagtccaagccatcctgctgagctttttcagcgcccaaaccatcctcatcgggcacagcctggagagcgacctgctggccctgaagctcatccacagcaccgtggtggacacggccgtgctcttcccgcactacctgggtttcccctacaagcgctccctcaggaatctcgcggccgactacctggcacagatcatccaggacagccaggacggccacaactccagcgaggacgcaaacgcctgcctgcagctggtgatgtggaaggtccgacagcgcgcccagatccagccacgccaccggtccgcctctcccgccgccctggcctgtccttagccccaggcctcttccaaaaccgccatcagtcccg

SEQ ID NO: 564 - protein, 675 aa, Homo sapiens
MLRATAPCWFPPGYPEAKKVAEEAALEASRHLGGEQSQAGAPEGSKMLRATAPCWFRPGYPEAKKVAKEAAPEASRHLGAEQSPAGAPEGSKMLRATAPCWFPPGYPEAKKVAEEAALEAPEFPLPSHQPAQSFGLWVPQMHKQASAFVDIQAEPQNRGPAVPPAWPKMVTESCYFPAQRGSACRLPAAPRLTERPSGVRISAPRKRKTIAHSSSPCLVTGYTDAKRTRVASSSQRSRGSKVGRQPGKTRNRSGMACKTTATTSSKRIVRRPSLPSLSLKKPIILRSSGCQVPTVLRRGYLQLFTEECLKFCASKQEAEEKALNEEKVAYDCSPNKNRYLNVVLNTLKRLKGLTPSSMPGLSRAALYSRLQEFLLTQDQLKENGYPFPHPERPGGAVLFTGQGKGPGDSSCRVCCRCGTEYLVSSSGRCVRDQLCYYHWGRVRSSQVAGGRVSQYTCCAAAPGSVGCQVAKQHVRDGRKESLHGFVETFKKELSRDAYPGIYALDCEMCYTTHGLELARVTVVDADMRVVYDTFVKPDNEIVDYNTRFSGVTEADVAKTSITLPQVQAILLSFFSAQTILIGHSLESDLLALKLIHSTVVDTAVLFPHYLGFPYKRSLRNLAADYLAQIIQDSQDGHNSSEDANACLQLVMWKVRQRAQIQPRHRSASPAALACP

SEQ ID NO: 565 - DNA, 2062 bp, Homo sapiens
atgttgcgagccacagctccctgctggttcccccctggatacccagaagctaagaaggtggccgaggaggcggccctggaggcaagccgccatttgggaggggagcagagccaggccggtgctcccgaaggcagcaagatgttgcgagccacagctccctgctggttccgccctggatacccagaagctaagaaggtggccaaggaggcggccccggaggcaagccgccatttgggagcggagcagagcccggccggtgctcccgaaggcagcaagatgttgcgagccacagctccctgctggttcccacctggatacccagaagctaagaaggtggccgaggaggcggccctcgaggctccagaattcccactgccctctcatcagcctgcccagagcttcgggctctgggtgccccagatgcacaagcaggcctcagcatttgtggacatccaggcggagccccagaacaggggtccggcggtgcccccagcgtggcccaagatggtgacggagtcgtgctacttccctgcgcagaggggatcggcctgccgcttgccagccgccccaaggctgacagagaggccctcgggagtccgcatctcagcccccaggaagaggaagacgatcgcccactcttccagcccttgcttggtcacaggttacacagatgccaagagaacccgggtggccagcagcagccaacgctcccgtggctccaaggtcggcagacagccagggaagacgcgcaacaggtcagggatggcatgcaagaccaccgccaccaccagctctaagcgaatcgtccgtcgtccatccttaccgagtttgagtttgaagaaacccattatcctccgaagctctgggtgccaagtccccaccgtcctccgccgaggctatctccaactgttcaccgaagagtgtctcaagttctgcgcctccaagcaggaggccgaggagaaggcgctgaacgaggagaaggtggcctacgactgcagccccaacaagaacaggtacctgaacgtggtcctgaacaccctcaagagactgaagggcctgacccccagctccatgcccggcctcagcagggccgccctgtacagccgcctccaggagttcctgctcacccaggaccagctcaaggagaacggctaccccttcccgcaccccgagcggcccggaggcgccgtcctcttcactggccaggggaaggggcccggcgactcctcctgcagggtctgctgccgttgtggcaccgagtacctggtgtcctcctcgggccgctgtgtacgcgaccagttgtgttattatcactgggggcgggtccgctcgagccaggtggctggaggccgggttagccagtacacctgctgtgcagctgctcctggctctgtgggctgccaggtggcaaagcagcacgtgcgggacggccgcaaggagagcctccatggcttcgtggagaccttcaagaaagagttgtccagagacgcttatccaggaatctacgccttggactgtgagatgtgctacaccacgcatggcctagagctgacccgcgtcaccgtggtggacgccgacatgcgagtggtgtacgacaccttcgtcaagcccgacaacgagatcgtggactacaacaccaggttttccggagtcaccgaggccgacgtcgccaagacgagcatcacgttgccccaagtccaagccatcctgctgagctttttcagcgcccaaaccatcctcatcgggcacagcctggagagcgacctgctggccctgaagctcatccacagcaccgtggtggacacggccgtgctcttcccgcactacctgggtttcccctacaagcgctccctcaggaatctcgcggccgactacctggcacagatcatccaggacagccaggacggccacaactccagcgaggacgcaaacgcctgcctgcagctggtgatgtggaaggtccgacagcgcgcccagatccagccacgccaccggtccgcatatcccgccgccttggcctgtctttagccccaggcctcttccaaaaccgccatcagtcccg

SEQ ID NO: 566 - protein, 675 aa, Homo sapiens
MLRATAPCWFPPGYPEAKKVAEEAALEASRHLGGEQSQAGAPEGSKMLRATAPCWFRPGYPEAKKVAKEAAPEASRHLGAEQSPAGAPEGSKMLRATAPCWFPPGYPEAKKVAEEAALEAPEFPLPSHQPAQSFGLWVPQMHKQASAFVDIQAEPQNRGPAVPPAWPKMVTESCYFPAQRGSACRLPAAPRLTERPSGVRISAPRKRKTIAHSSSPCLVTGYTDAKRTRVASSSQRSRGSKVGRQPGKTRNRSGMACKTTATTSSKRIVRRPSLPSLSLKKPIILRSSGCQVPTVLRRGYLQLFTEECLKFCASKQEAEEKALNEEKVAYDCSPNKNRYLNVVLNTLKRLKGLTPSSMPGLSRAALYSRLQEFLLTQDQLKENGYPFPHPERPGGAVLFTGQGKGPGDSSCRVCCRCGTEYLVSSSGRCVRDQLCYYHWGRVRSSQVAGGRVSQYTCCAAAPGSVGCQVAKQHVRDGRKESLHGFVETFKKELSRDAYPGIYALDCEMCYTTHGLELTRVTVVDADMRVVYDTFVKPDNEIVDYNTRFSGVTEADVAKTSITLPQVQAILLSFFSAQTILIGHSLESDLLALKLIHSTVVDTAVLFPHYLGFPYKRSLRNLAADYLAQIIQDSQDGHNSSEDANACLQLVMWKVRQRAQIQPRHRSAYPAALACL

SEQ ID NO: 567 - DNA, 1780 bp, Homo sapiens
atgttgcgagccacagctccctgctggttcccacctggatacccagaagctaagaaggtggccgaggaggcggccctcgaggctccagaattcccactgccctctcatcagcctgcccagagcttcgggctctgggtgccccagatgcacaagcaggcctcagcatttgtggacatccaggcggagccccagaacaggggtccggcggtgcccccagcgtggcccaagatggtgacggagtcgtgctacttccctgcgcagaggggatcggcctgccgcttgccagccgccccaaggctgacagagaggccctcgggagtccgcatctcagcccccaggaagaggaagacgatcgcccactcttccagcccttgcttggtcacaggttacacagatgccaagagaacccgggtggccagcagcagccaacgctccattggctcccaggtcggcagacagccagggaagacgcgcaagaggtcagggatggcatgcaagaccaccgccaccatcagctctaagcgaatcgtccgtcgtctatccttaccgagtttgaagaaacccattatcctccgaagctctgggtgccaagtccccaccatcctccgccgatgctatctccaactgttcaccgaagagtgtctcaagttctgcgcctccaagcaggaggccgaggagaaggcgctgaacgaggagaaggtggcctacgactgcagccccaacaagaacaggtacctgaacgtggtcctgaacaccctcaagagactgaagggcctgacccccagctccatgcccggcctcagcagggccgccctgtacagccgcctccaggagttcctgctcacccaggaccagctcaaggagaacggctaccccttcccgcaccccgagcggcccggaggcgccgtcctcttcactggccaggggaaggggcccggcgactcctcctgcagggtctgctgccgttgtggcaccgagtacctggtgtcctccttgggccgctgtgtacgcgaccagttgtgttattatcactgggggcgggtccgctcgagccaggtggctggaggccgggttagccagtacacctgctgtgcagctgctcctggctctgtgggctgccaggtggcaaagcagcacgtgcgggacggccgcaaggagagcctccatggcttcgtggagaccttcaagaaagagttgtccagagacgcttatccaggaatctacgccttggactgtgagatgtgctacaccacgcatggcctagagctgacccgcgtcaccgtggtggacgccgacatgcgagtggtgtacgacaccttcgtcaagcccgacaacgagatcgtggactacaacaccaggttttccggagtcaccgaggccgacgtcgccaagacgagcatcacgttgccccaagtccaagccatcctgctgagctttttcagcgcccaaaccatcctcatcgggcacagcctggagagcgacctgctggccctgaagctcatccacagcaccgtggtggacacggccgtgctcttcccgcactacctgggtttcccctacaagcgctccctcaggaatctcgcggccgactacctggcacagatcatccaggacagccaggacggccacaactccagcgaggacgcaaacgcctgcctgcagcttggtgatgtggaaggtcaacagcgcgcccagatccagccacgccaccggtccgcctctcccgccgccctggcctgtccttagccccaggcctcttccaaaaccgccatcagtcccg

SEQ ID NO: 568 - protein, 581 aa, Homo sapiens
MLRATAPCWFPPGYPEAKKVAEEAALEAPEFPLPSHQPAQSFGLWVPQMHKQASAFVDIQAEPQNRGPAVPPAWPKMVTESCYFPAQRGSACRLPAAPRLTERPSGVRISAPRKRKTIAHSSSPCLVTGYTDAKRTRVASSSQRSIGSQVGRQPGKTRKRSGMACKTTATISSKRIVRRLSLPSLKKPIILRSSGCQVPTILRRCYLQLFTEECLKFCASKQEAEEKALNEEKVAYDCSPNKNRYLNVVLNTLKRLKGLTPSSMPGLSRAALYSRLQEFLLTQDQLKENGYPFPHPERPGGAVLFTGQGKGPGDSSCRVCCRCGTEYLVSSLGRCVRDQLCYYHWGRVRSSQVAGGRVSQYTCCAAAPGSVGCQVAKQHVRDGRKESLHGFVETFKKELSRDAYPGIYALDCEMCYTTHGLELTRVTVVDADMRVVYDTFVKPDNEIVDYNTRFSGVTEADVAKTSITLPQVQAILLSFFSAQTILIGHSLESDLLALKLIHSTVVDTAVLFPHYLGFPYKRSLRNLAADYLAQIIQDSQDGHNSSEDANACLQLGDVEGQQRAQIQPRHRSASPAALACP

SEQ ID NO: 569 - DNA, 2370 bp, Homo sapiens
gcaaatcttcaggggccgtccaggactacagagctgtttcaccctaccttggcttcaatctcttcccccatgctcgaaggtgcggagctgtacttcaacgtggaccatggctacctggagggcctggttcgaggatgcaaggccagcctcctgacccagcaagactatatcaacctggtccagtgtgagaccctagaagacctgaaaattcatctccagactactgattatggtaactttttggctaatcacacaaatcctcttactgtttccaaaattgacactgagatgaggaaaagactatgtggagaatttgagtatttccggaatcattccctggagcccctcagcacatttctcacctatatgacgtgcagttatatgatagacaatgtgattctgctgatgaatggtgcattgcagaaaaaatctgtgaaagaaattctggggaagtgccaccccttgggccgtttcacagaaatggaagctgtcaacattgcagagacaccttcagatctctttaatgccattctgatcgaaacgccattagctccattcttccaagactgcatgtctgaaaatgctctagatgaactgaatattgaattgctacgcaataaactatacaagtcttaccttgaggcattctataaattctgtaagaatcatggtgatgtcacagcagaagttatgtgtcccattcttgagtttgaggccgacagacgtgcttttatcatcactcttaactcctttggcactgaattgagcaaagaagaccgagagaccctctatccaaccttcggcaaactctatcctgaggggttgcggctgttggctcaagcagaagactttgaccagatgaagaacgtagcggatcattacggagtatacaaacctttatttgaagctgtaggtggcagtgggggaaagacattggaggacgtgttttacgagcgtgaggtacaaatgaatgtgctggcattcaacagacagttccactacggtgtgttttatgcatatgtaaagctgaaggaacaggaaattagaaatattgtgtggatagcagaatgtatttcacagaggcatcgaactaaaatcaacagttacattccaattttataacccaagtaaggttctcaaatgtagaaaattataaatgttaaaaggaagttattgaagaaaataaaagaaattatgttatattatctagactacacaaaagtaagccacactatatcttcatgagttgcaaatccatggaaacacagtaaaccagccctgaaacaaagcatttccttgttttcagtggtattagatcttgtttccacatgtctgtctcattcttcactgggccttacaggttagttttaattaactctatggtatttttcttattcttgtttgatcatgttaaaaattggacctaataaaagtattttattcttgcttttccatgcttctctacaggtccaaatactgaatgtctcctttactttttctcttttaaatttttttctagacagggtctcactctgtcacctaggctacagtgcagtggtgtgatcacagctcactgcagcctcgacttcccaggctcaagtgatcctcccagctctcagcctccaaagtagctggcactacaagtgtacacccccacacaaggctaagttttgtattttttgtagagacagggtttcaacatattatccaggctggtgtcgaattcctgggctccagggatccacagtcccccttggcctcccaaagtgttgggattacatgcatgagccactgtgctgggcttcatttacattttaactgtctgttccttgcctagattcacagaaatccaaagctgtatgtagtcaacatggttcacaagtgttggaaaatgtgttttttgttttgttttgttttgtttcgttttgttttgagacagagtttccctctgtcgcccaggctagagtgcaatggcgtgatctcggctcactgcaacctccacctcccagattcaagcaactctctgcctcagcctcccgagtagctgggattacaagcacccaccactacactcagctaattttttgtatttttagtagagccggggtttcaccatcttggccaggctgatcttgaactcctgagctcatgatccacccgcctcagcctcccaaagtgctgggattacaggccccttgttcagccactgcacctggccccttattttgtttttgttttctaatatactttgatgtaatcagcttgagaaagcaacacaatttcaaatcctatcttctagatgcaagcagtgttaaatttgttaataaatttgcttttcacacctttctttaaataaaaggtatatctctc

SEQ ID NO: 570 - protein, 350 aa, Homo sapiens
MLEGAELYFNVDHGYLEGLVRGCKASLLTQQDYINLVQCETLEDLKIHLQTTDYGNFLANHTNPLTVSKIDTEMRKRLCGEFEYFRNHSLEPLSTFLTYMTCSYMIDNVILLMNGALQKKSVKEILGKCHPLGRFTEMEAVNIAETPSDLFNAILIETPLAPFFQDCMSENALDELNIELLRNKLYKSYLEAFYKFCKNHGDVTAEVMCPILEFEADRRAFIITLNSFGTELSKEDRETLYPTFGKLYPEGLRLLAQAEDFDQMKNVADHYGVYKPLFEAVGGSGGKTLEDVFYEREVQMNVLAFNRQFHYGVFYAYVKLKEQEIRNIVWIAECISQRHRTKINSYIPIL

SEQ ID NO: 571 - DNA, 1865 bp, Homo sapiens
attttatttcaggaatccatcaacatcctttgcagctacataggcaggaaaatctagaaattgtaatttatatagaattttaaaactcttcaattacaatggatagaggggagaaaatacagctcaagagagtgtttggatattggtggggcacaagttttttgcttattaatatcattggtgcaggaatttttgtgtcccccaaaggtgtgttggcatactcttgcatgaacgtgggagtctccctgtgcgtttgggctggctgtgccatactggccatgacatcaactctttgctctgcagagataagtataagcttcccatgcagtggagctcaatactattttctcaagagatactttggctccacggttgcttttttgaatctctggacatccttgtttctggggtcaggggtagttgctggccaagctctgctccttgctgagtacagcatccagcctttttttcccagctgctctgtcccaaagctgcctaagaaatgtctggcattggccatgttgtggattgtaggaattctgacttctcgtggtgtgaaagaagtgacttggcttcagatagctagctcagtgctgaaagtgtccatacttagcttcatttccctaactggagtagtgttcctgataagagggaaaaaggagaatgtagaacgatttcagaatgcttttgatgctgaacttccagatatctctcaccttatacaagccatcttccaaggatattttgcatattcaggcggggcatgctttacacttatagcaggggagctgaagaagcccagaacaacaattcccaaatgcatatttactgcgttacctctggtgactgtagtttatttactggttaacatttcctatctgactgttctgacacccagggaaattctctcttcagatgctgtagctatcacatgggctgatcgagcttttccctcattagcatggattatgccttttgctatttctacctcattatttagcaaccttctgatttctatatttaaatcatcgagaccaatatatcttgcaagccaagagggccagctgcctttgctatttaatacacttaatagtcactcttctccatttacagctgtgctactacttgtcactttgggatcccttgcaattatcttaacaagtctaattgatttgataaactatatttttttcacgggttcattatggtctatattattaatgataggaatactaaggcggagataccaggaacccaatctatctataccttataaggtgtttttgtcatttccattagcaacaatagtcatcgacgtgggcttggttgtgataccattggtaaagtctccaaatgtgcattatgtctacgtgcttctgttagttctcagcggattactattttacatacctttaatacattttaaaataagattggcttggtttgagaagatgacttgctatttacaattactatttaatatttgcctccctgatgtgtctgaggaatagatgtcggaagtgcaaactcttaaaaaattggccttctaaaaaacatatatcagattccaaatcaaggttaaacatatgatagaacattcatggtgaaattcctatggtaaatatttttttctcaaatgaaataagtaatgtatacaaaagtgcctaagacagtacctggcttcagagtcactaagaaattgctaaaagctctgcttcgcatggtaaaaaacttaagtcctggtttgcgtagcttgatagagtgattatacaacttccattctctcactttttttttctgtatcccaccccttttctactgaatttgtggggatcctataataaaagtgaatgactaaaaatttt

SEQ ID NO: 572 - protein, 470 aa, Homo sapiens
MDRGEKIQLKRVFGYWWGTSFLLINIIGAGIFVSPKGVLAYSCMNVGVSLCVWAGCAILAMTSTLCSAEISISFPCSGAQYYFLKRYFGSTVAFLNLWTSLFLGSGVVAGQALLLAEYSIQPFFPSCSVPKLPKKCLALAMLWIVGILTSRGVKEVTWLQIASSVLKVSILSFISLTGVVFLIRGKKENVERFQNAFDAELPDISHLIQAIFQGYFAYSGGACFTLIAGELKKPRTTIPKCIFTALPLVTVVYLLVNISYLTVLTPREILSSDAVAITWADRAFPSLAWIMPFAISTSLFSNLLISIFKSSRPIYLASQEGQLPLLFNTLNSHSSPFTAVLLLVTLGSLAIILTSLIDLINYIFFTGSLWSILLMIGILRRRYQEPNLSIPYKVFLSFPLATIVIDVGLVVIPLVKSPNVHYVYVLLLVLSGLLFYIPLIHFKIRLAWFEKMTCYLQLLFNICLPDVSEE

SEQ ID NO: 573 - DNA, 4347 bp, Homo sapiens
ggcacagtcataaatacagagggttttcagaaccacctcagagaagatgtttaaatcgctgacaaaagtcaacaaggtgaagcctataggagagaacaatgagaatgaacaaagttctcgtcggaatgaagaaggctctcacccaagtaatcagtctcagcaaaccacagcacaggaagaaaacaaaggtgaagagaaatctctcaaaaccaagtcaactccagtcacgtctgaagagccacacaccaacatacaagacaaactctccaagaaaaattcctctggagatctgaccacaaaccctgaccctcaaaatgcagcagaaccaactggaacagtgccagagcagaaggaaatggaccccgggaaagaaggtccaaacagcccacaaaacaaaccgcctgcagctcctgttataaatgagtatgccgatgcccagctacacaacctggtgaaaagaatgcgtcaaagaacagccctctacaagaaaaagttggtagagggagatctctcctcacccgaagccagcccacaaactgcaaagcccacggctgtaccaccagtaaaagaaagcgatgataagccaacagaacattactacaggctgttgtggttcaaagtcaaaaagatgcctttaacagagtacttaaagcgaattaaacttccaaacagcatagattcatacacagatcgactctatctcctgtggctcttgcttgtcactcttgcctataactggaactgctgttttataccactgcgcctcgtcttcccatatcaaaccgcagacaacatacactactggcttattgcggacatcatatgtgatatcatctacctttatgatatgctatttatccagcccagactccagtttgtaagaggaggagacataatagtggattcaaatgagctaaggaaacactacaggacttctacaaaatttcagttggatgtcgcatcaataataccatttgatatttgctacctcttctttgggtttaatccaatgtttagagcaaataggatgttaaagtacacttcattttttgaatttaatcatcacctagagtctataatggacaaagcatatatctacagagttattcgaacaactggatacttgctgtttattctgcacattaatgcctgtgtttattactgggcttcaaactatgaaggaattggcactactagatgggtgtatgatggggaaggaaacgagtatctgagatgttattattgggcagttcgaactttaattaccattggtggccttccagaaccacaaactttatttgaaattgtttttcaactcttgaattttttttctggagtttttgtgttctccagtttaattggtcagatgagagatgtgattggagcagctacagccaatcagaactacttccgcgcctgcatggatgacaccattgcctacatgaacaattactccattcctaaacttgtgcaaaagcgagttcggacttggtatgaatatacatgggactctcaaagaatgctagatgagtctgatttgcttaagaccctaccaactacggtccagttagccctcgccattgatgtgaacttcagcatcatcagcaaagtcgacttgttcaagggttgtgatacacagatgatttatgacatgttgctaagattgaaatccgttctctatttgcctggtgactttgtctgcaaaaagggagaaattggcaaggaaatgtatatcatcaagcatggagaagtccaagttcttggaggccctgatggtactaaagttctggttactctgaaagctgggtcggtgtttggagaaatcagccttctagcagcaggaggaggaaaccgtcgaactgccaatgtggtggcccacgggtttgccaatcttttaactctagacaaaaagaccctccaagaaattctagtgcattatccagattctgaaaggatcctcatgaagaaagccagagtgcttttaaagcagaaggctaagaccgcagaagcaacccctccaagaaaagatcttgccctcctcttcccaccgaaagaagagacacccaaactgtttaaaactctcctaggaggcacaggaaaagcaagtcttgcaagactactcaaattgaagcgagagcaagcagctcagaagaaagaaaattctgaaggaggagaggaagaaggaaaagaaaatgaagataaacaaaaagaaaatgaagataaacaaaaagaaaatgaagataaaggaaaagaaaatgaagataaagataaaggaagagagccagaagagaagccactggacagacctgaatgtacagcaagtcctattgcagtggaggaagaaccccactcagttagaaggacagttttacccagagggacttctcgtcaatcactcattatcagcatggctccttctgctgagggcggagaagaggttcttactattgaagtcaaagaaaaggctaagcaataaatgtttgattatctttagatgtgatatagctagttcccaaagtgattgtacctaggattgtaacttaaattaacgaggggaaacgacatgctgggacccttgagaaacgaaaggcaaatccctagcttagtttctaggacttatctgagagtgtgatttcatgcagtggtaataagaagattattaaaagccatccctattctccgttttcattaactttatgcaattgctatatcttctaattgtatgtagtaagtttccttttcctttggttctttcctgatgatgtctcttccttccagttttattagcttgctcttggctgtgatgtgattcactaaccttttctcttaatttttattgtgtttaatttcttctttggcactctaaagcctggctaattgttctaggtttatgaatttcacctcttacatgtaaagggtataagattttaatgtaataggtcaaaaatcagattattttcattcaaatgaggatgatgagtcactgtaatatcaaaaaatccccagcagctgggactgaagggaagcagagatcatgaagctttctgaatgagaagtctgatttttggaacagtcccctgaagaccaatgttggtcggcagaattagcaaactggcaaaatcacattgcaggaacatattggaaaaattgtaccctttactaaagaaataaacttcaatattttctcttctaaccaacttaaaagacaccaatctacctaactcatctggctcaagggacttggactggaggatacaggctaaagtgacacttatcagaatcttcctcaagcacttgctggaaaagatatcagattggaacttcttgtttaaaattaagctttagtaaaacaaagtgatgaggttaggaaggcagactctacacatgtcagattgacatatccccacaatttccggaacctacatgtatagctgtttacaaaatctccaagttaattaagggcactttaggaagttgtcctcatgaattagctagcattagcataattaccgacgttgcatgctgtgaggaggctacaaaggccaggctggtgtcggaagtaataatacatatagaattccattctaataaatgccattagtgtataacatcaagttctgtgtaatgaggctatttccaagtctccaaagatggtcactgtaacagcactttgctgagagggttttaacaaatcatattagccaaaaagcctacaacatagatgcatttagcaaaccatgtacaaatcaatcactataataaactgcatcatttgatagagtcaccgtttttgcatgtagtgttagagtatcacaaaatataacaagttttactaaaggatggttggttttttcaggatttaagggaatatggacaaattgttaaatagtatttatttgataaatgggagtttgtatgcagaaagagtgaattgcgtataaaaagggtgatttaaaaacccagaaacaaaaggtagaatagggctgaagcatctgataataggaaaagaaaaggacaaaagtcctcaacttgtgagcaatatgctttccctttacaccctgtaatttattcaaatgatattaaaatacaagaccattgcaatttatgcttttcgcctggcagttattttcccccccaagctatcctgtttcagataatatcaatttatttccaatccatcagactaaaatctaagaaaattcaagaactcttttattgttgatttggtgccaccaaattctttttctttttaaatctttctaattatcctttctttttcaatcccattgctaacacccagaacatattttctgttcaatgcaaataaacattcactttttacctata

SEQ ID NO: 574 - protein, 809 aa, Homo sapiens
MFKSLTKVNKVKPIGENNENEQSSRRNEEGSHPSNQSQQTTAQEENKGEEKSLKTKSTPVTSEEPHTNIQDKLSKKNSSGDLTTNPDPQNAAEPTGTVPEQKEMDPGKEGPNSPQNKPPAAPVINEYADAQLHNLVKRMRQRTALYKKKLVEGDLSSPEASPQTAKPTAVPPVKESDDKPTEHYYRLLWFKVKKMPLTEYLKRIKLPNSIDSYTDRLYLLWLLLVTLAYNWNCCFIPLRLVFPYQTADNIHYWLIADIICDIIYLYDMLFIQPRLQFVRGGDIIVDSNELRKHYRTSTKFQLDVASIIPFDICYLFFGFNPMFRANRMLKYTSFFEFNHHLESIMDKAYIYRVIRTTGYLLFILHINACVYYWASNYEGIGTTRWVYDGEGNEYLRCYYWAVRTLITIGGLPEPQTLFEIVFQLLNFFSGVFVFSSLIGQMRDVIGAATANQNYFRACMDDTIAYMNNYSIPKLVQKRVRTWYEYTWDSQRMLDESDLLKTLPTTVQLALAIDVNFSIISKVDLFKGCDTQMIYDMLLRLKSVLYLPGDFVCKKGEIGKEMYIIKHGEVQVLGGPDGTKVLVTLKAGSVFGEISLLAAGGGNRRTANVVAHGFANLLTLDKKTLQEILVHYPDSERILMKKARVLLKQKAKTAEATPPRKDLALLFPPKEETPKLFKTLLGGTGKASLARLLKLKREQAAQKKENSEGGEEEGKENEDKQKENEDKQKENEDKGKENEDKDKGREPEEKPLDRPECTASPIAVEEEPHSVRRTVLPRGTSRQSLIISMAPSAEGGEEVLTIEVKEKAKQ

SEQ ID NO: 575 - DNA, 2905 bp, Homo sapiens
cggacgcgtgggcgggttcgactggaggggcgggggagtcacctgcgagcggctgcgctggcggccagcccgcccaccgcgtctggatcgcgccggctgcgcggggctgcggacagcacacaccctggaaggccccggcggggaacgggcagagtccgcgccctgcgtccgcgaccaggaggatcggaccttcgccttcgctgtcgccgccgccgccgcccgcggccgtcggggctattagtgaaagatggtggatcgcttggcaaacagtgaagcaaatactagacgtataagtatagtggaaaactgttttggagcagctggtcaacctttaactatacctggacgagttcttattggagaaggagtattgactaagttgtgcaggaaaaagcccaaagcaaggcagtttttcttgtttaatgatattcttgtatatggcaatattgtcatccagaagaaaaaatataacaaacaacatattattcccctggaaaatgtcactattgattccatcaaagatgagggagacttaaggaatggatggctaatcaagacaccaactaaatcttttgcagtttatgctgccactgctacggagaaatcagaatggatgaatcatataaataaatgtgttactgatttactctccaaaagtgggaagacacccagtaatgaacatgctgctgtctgggttcctgactctgaggcaactgtatgtatgcgttgtcagaaagcaaaattcacacctgttaatcgtcgccaccattgccgcaaatgtggttttgttgtctgtgggccctgctctgaaaagagatttcttcttcccagccagtcctctaagcctgtgcggatttgtgacttctgctatgacctgctttctgctggggacatggccacatgccagcctgctagatcagactcttacagccagtcattgaagtctcctttaaatgatatgtctgatgatgatgacgatgatgatagcagtgactaaggacacatttgggagtatttaatcaggtgtggctatctgagaaatcaactttgggggaaatgtaagattctgagctctctctctgttttgttctagccatgaatttgcctgagaaacttgtaacctatgtgcctcaatatattccatagaaagtaggtccccctgccttctcccactcctcacactcttctacagggataggcttttgcaaatatatcagataaattttttgtttcttgtttatttttaggttattttcttggaaggttgggaaaagatgtttgttttaacaggtcatgtactacgttgttgttttcatttctgttataagtaaaactaaaagcacagaatggtgggaaaggggctataatgtggttcattaataatgttagcagcttttttctaaccatcctgtctaatggttaagacaccagtaacaaaaacacatgatttggaaatactttggctttttcatatacctagtggtgccttatcataatagcactgttacatgaaataagcccctaccttcttactttctggtttgttgaaaaaatacactggtgctctttgaagtgataaaatgagtgtttatgaatgggtgtaattaggaaatacttctcatctgacagctacaaataactaagtttggaggtattttcactctatatgaataaatatttttccataaaatagttgtgattatatttttgttttatataggtcccaaattataattgtcaaatatatattttaaattaataaaagttgtcattcttaggaatttggtttgaaatttatcagttatacagaattgtcatactgcattagcttctacctttagtaagacatattttttaggtataaattcttatgctttaacattatttctggattgaaaatcttataaaacccttgaaaataaacagtctcttttttacaaagcctgtgttagagcacagatttacctaggcttgaagatttggaagaaataatatgtaagaatggcctcaaggcagaccactttaagtttggctagacttcatatcgtggaagtattgtctatttcagtgtgaaactatcttgaatttgcaaatatagtgttatattttataaagttttgtaaaatcccaaacaatatttctatttttgtaaaacaattgtatgtataatctgtatttgaaatcattttgcaatctatggaaatagagtagcaattgctatttctaaattgtgaactttaagtcaatctagatttattttgagaagtaattgttcactctttacttttgaggcagccattaggttgaaagtatatatttatcatataaaacttgatgcgttttgcactactctttccatttatatgctgcaaacaactacagtctttgaaatatggaaaatcagcagtctaaagtttgttttaaattctaaatttaaaaaatcttcaaatctgaatataccgcaaatgtcatgagaagtttgattcagtaacttgtgatggaggattctttggtatcttactgtttggttaaggcactaattttacttacctattagattttgaaagtatctgagatatacaaatctccctgtaggaaatgtgaaagaaaagcacaacaaaactagggttttttgttcatttgcttgcttttatgattttttttggtttgttttaatatcaggtggatttttgtttctaagcaatatatacataaaatcaaccaacatatctgaaaaggatcatgaaacctgagaaatgctaatggagatttgctggtacataggaatctagcaaattcaggaaccaaggggaaatgttgtgagataacatttacattgtcaacctttattgactttgtttttacaataaaaaatattttacaactcaaaaaaaaaaaaaaaaag

SEQ ID NO: 576 - protein, 249 aa, Homo sapiens
MVDRLANSEANTRRISIVENCFGAAGQPLTIPGRVLIGEGVLTKLCRKKPKARQFFLFNDILVYGNIVIQKKKYNKQHIIPLENVTIDSIKDEGDLRNGWLIKTPTKSFAVYAATATEKSEWMNHINKCVTDLLSKSGKTPSNEHAAVWVPDSEATVCMRCQKAKFTPVNRRHHCRKCGFVVCGPCSEKRFLLPSQSSKPVRICDFCYDLLSAGDMATCQPARSDSYSQSLKSPLNDMSDDDDDDDSSD

SEQ ID NO: 577 - DNA, 2254 bp, Homo sapiens
aaaaggccaggcgattcaagatggcggaggacctggacgagctcttggatgaagtcgagtccaagttttgcacacctgaccttctaagacggggtatggtcgagcagcccaaaggctgcggcggcggcacccacagtagcgaccggaaccaagccaaggcgaaagagacgctcagatcaacagaaacatttaaaaaagaagatgatcttgacagtcttattaatgaaatacttgaagagcccaacttggacaaaaaaccctctaaattaaaatctaaatcttcaggtaacacatctgtcagagcttccattgaaggccttggtaaaagttgcagtccggtgtaccttggtgggagctctattccatgtgggattggaacaaatatttcatggagagcatgtgaccatctgcgttgtatagcctgtgatttcttggtagtcagctatgatgactatatgtgggacaaatcgtgtgattatctgtttttcaggaacaacatgccagaatttcacaaattaaaagcaaagttgataaagaagaaaggaacacgggcatatgcctgccagtgtagctggagaactattgaagaagtgactgaccttcagacagatcatcagcttcgctgggtttgtggtaaacattaagaatgcagactgcacattcggacagatgcatccatgagagtggtctccatgaatcatcatcatgtttagacattagtccctagcaataccattccctgtgggaaaaggcagtgaattttattgatacaactacatacatttttgaagaccaaatggactaaggaagatcatgtattataacactttggaattattcctgatacatggatgtttcacttagtaacaggcatctacattctttactaatctgtcttctgtttaatagaggtttgattatggagttccatacaaatatctagtttttcattagcaactgcaatattgattgctaatacgtttagcaaatcattccccaacttgtagcagttaaagtggataaagccggccagggcaaagagatcatttaggggtgtctacaacacttcttccagtcagatcttttgttgccaaagatcataatttggacatggcagaaaccaggtgatcagtggctgactgaagggtgttcagaagtagttacaggtattttgcaaaaacactgcctcatagctgatcttacctcatcaactcaaagcaatgttatgcacaatattaaatacatgttaccagttttagcttatttttccctcttttgttcatttaactatcaaaagttattttctattttgattacccaataatatataaaaagagtttgatgcacccaaaatcacaaaaatcctaatacatacaggttattgttggattttccaagtactttctatcctttaatgcctaaaactccatcaagggaagtaaacagcaagtaatataatttttcaggcagcctgtggacttctctggtaggatcaggttgacatatcgtttattaggtgagtaagtgaaaagacaagtaaagcataactgaaccaacaggtaacctgttgggctccttcctgacatcactgagatctgaggagccctacaatagcagcacattcaggaaatcaggtccctcaaaatttctagctcccaaccccattgagagattttgggagctttccaatctgccacaaactccctgctacatatgtactatatagttcaaatgtgtgatacagagcaccctgaaagggaataattgaaacaaagttataatcttcttagtcttatgctaaatttattccagccaccctactgaagggaggaagatctgatcattagaatccttttcctagccatgacacatttacatacttgtaaaatttattgtagtaagtctagcattgcaacagaatagatcttataatggccaatcctcacacttttgtattaaggatattatgacagactaagcatggtagctctcgcctgtaatcccagcactttgggaggctgaggcaggcagatcagctgaggtcaggagttcaagaccagcctggccaacatgataaaacaccgtctctgctagaaatacaaaaattggctgggcgcggtggtgcatgcctgtgatcccaactactcgggaggccgaggcaggaaaatttattgaacctgggaggcggaggttgtagtgagccaaggtcgcgccactgcgctccagcctggacaacacagtgagactctgtctc

SEQ ID NO: 578 - protein, 207 aa, Homo sapiens
MAEDLDELLDEVESKFCTPDLLRRGMVEQPKGCGGGTHSSDRNQAKAKETLRSTETFKKEDDLDSLINEILEEPNLDKKPSKLKSKSSGNTSVRASIEGLGKSCSPVYLGGSSIPCGIGTNISWRACDHLRCIACDFLVVSYDDYMWDKSCDYLFFRNNMPEFHKLKAKLIKKKGTRAYACQCSWRTIEEVTDLQTDHQLRWVCGKH

SEQ ID NO: 579 - DNA, 4507 bp, Homo sapiens
tcagcggcagcagccgccgccgagatgtcccggcgaaagcaaagcaaaccccggcagatcaaacggccgcttgaagatgccattgaagatgaggaagaagaatgtccatcagaggaaacagacatcatctccaaaggagactttccattggaggaaagcttttccacagaatttgggcctgaaaatctgagctgcgaagaagtggaatacttttgtaacaaaggtgatgatgaaggaatccaggagacagcagaatcagatggggacacacagtcagagaaaccggggcaacctggagttgagacagacgactgggatggaccaggagagctggaggtgtttcagaaagatggggaacgaaaaattcagagtcgacagcaacttccagtgggaacaacctgggggccgtttcctgggaagatggacttgaataataattctttgaagacaaaggctcaggtcccaatggtgctgactgctggtcccaagtggttgctggatgtgacttggcaaggagtggaagacaacaaaaacaactgcattgtgtacagcaaagggggtcagctttggtgtacaactacgaaggccatctctgagggtgaagagctaattgcctttgtggtggattttgactcaaggctacaagctgccagtcagatgactctcacagaagggatgtaccctgcacgcctgctggactcaattcagctgcttcctcagcaagctgccatggcttctattttgcccacagctattgtcaataaggatatattcccttgcaagtcctgtggcatctggtatcggagtgagcggaatctgcaggcccatttgatgtactactgcagtgggaggcaaagagaagctgctccggtgtcagaggaaaatgaagacagtgcccatcagatttccagcctgtgccccttcccacagtgcaccaagagcttttcaaatgctcgagctctagaaatgcacctgaattcacacagtggagtgaaaatggaagaattcctgccccctggtgctagtctaaaatgcaccgtctgtagctacactgctgattccgtgatcaactttcaccaacacctgttctcccatctcactcaagctgccttccgatgtaatcactgccatttcggcttccagactcagagggagttattgcagcaccaggagctccatgtccctagcggcaaacttcccagagaaagtgacatggaacactctccaagtgcaactgaagacagcttacagccagccacagacttattgaccagaagcgaacttccccagagccaaaaggccatgcagactaaagatgcgagctctgacacagagctggacaagtgtgagaaaaagactcagctctttctcacgaaccagagaccagagatacagcctacaacaaataaacaaagcttttcttacacaaaaataaagtctgagccctctagcccaagacttgcctcatctccagttcagcctaatattgggccttctttccctgtgggccctttcctatctcagttttctttcccccaagatatcaccatggtccctcaagcttcagagatcttagctaagatgtctgaactggtgcatcggcgactgaggcatggcagtagtagctaccctcccgtcatttacagccctttgatgcccaagggggctacttgttttgagtgtaacataacattcaataatttggataattatctagtgcacaaaaagcattattgcagcagccgatggcagcagatggctaagtccccagagttccctagtgtgtcagaaaagatgcctgaagctttgagtcccaacactggccaaacctccataaaccttctcaacccagctgctcattctgctgatcctgagaatccacttcttcaaacatcttgcatcaattcttccactgtcttagatttaattgggccaaatgggaagggccatgacaaggacttttccactcaaactaagaagctctccacctccagtaacaatgatgacaaaattaatggaaaacctgttgatgtgaaaaatcccagtgtccccttagtggatggggaaagtgacccaaataagactacctgtgaagcttgcaacattaccttcagccggcacgaaacatacatggtccacaaacagtattactgtgctacacgccacgaccctccactgaagaggtctgcttccaacaaagtgcctgccatgcagagaaccatgcgcacacgcaagcgcagaaagatgtatgagatgtgcctacctgagcaggaacaaaggcctccactggttcagcagagatttcttgacgtagccaacctcaataatccttgtacctccactcaagaacccacagaagggctaggagagtgctaccacccaagatgtgatatctttccaggaattgtctctaaacacttggaaacttctctgacgatcaacaagtgtgttccagtttccaaatgtgatactactcattccagtgtttcctgcctagagatggacgtgcccatagatctcagcaaaaagtgtttatctcagtctgagcggacgaccacgtctcccaaaaggctgctggactatcacgagtgcactgtgtgcaagatcagtttcaataaggtagaaaactatctggcccacaagcagaatttctgcccggttactgcacatcagcgtaatgacctgggtcaactggacggcaaagtgtttccgaatccagaaagcgaacgaaacagccctgatgtcagctacgaaagaagcataataaaatgtgagaaaaatgggaatttgaagcagccttcccccaatggaaacttattttcatcccacctagcaaccccgcaaggcttgaaggtctttagtgaagctgctcagctcattgctacaaaagaagaaaacagacatttgtttcttccacaatgcctttaccctggagcaataaagaaagcaaaaggagccgaccagctttctccatattatggaatcaagccaagtgattatatttctggttctcttgtcatccataacactgacatcgagcaaagcagaaatgcagaaaatgaatctcctaaaggccaggcttcctcaaatgggtgtgctgcgctgaagaaagattctctgccattgttgcccaaaaatcgaggaatggtaatagtgaatggtggactgaaacaagatgagagacctgctgccaacccacagcaagagaacatttcccagaatcctcagcacgaagacgaccacaaatctccctcgtggatctctgagaacccattagctgccaatgagaatgtctcaccaggaattccctcagcagaggaacagttgtctagtatagcaaaaggtgtgaatggttccagccaggctccaaccagtgggaaatattgccggctatgtgatatccagttcaacaacctttcaaactttataactcacaagaagttttattgctcatcacatgcagcagaacatgtcaaatgaactaactaaacatcagtcacctttggtatcagtgtttagtatgttgttctaaccagtccagaaaaaaaaataagctgtttgaattacatctgggcaatcaggagataattcattatggctgagttgaagacttaaggtgtaatttcattacagtccattagtaaagtgtattattggtgccattttcaaaaaaattaatttattttaccagcagtattcatagctgtggttatgttattttttatttaaaaactttatattaaagtcatttgtaatgttattgtatagttattgtgtagcacatatggtttgcactgtatagtagcttttaaagaaaatagtcacaatacagaaaagcattttagaaatagcttcaaaagcacttgtgtatcttgattttttcttatatgctgttgcagatatatgtatatgctaaaatataacttgcaaagatgttctaaatacacatgctataagttcgccttaagatttcaattcttggataatcaggctctgtttgcactttatattttagcagatacagtctcttagtcactaggctttgcatttgtatgtagctgtatgtttccgtccattttcttaatcctgaacctgtatgttaaatgaagatggcaatttttttcttgtatagtacttgtattttctttcgctgatgcagctctgtctcaatttttaaacctttgctgttaaatgcaatactttataaagaatgaacaaaattactggaagcagtattgtaagtaatgaggtagtattaatcagttttatcttttgaaaggcacagtctaaatcgaaaccctaaactcaatgctgcaagtatgaatttaattcatatataagatctatttaaatataagagtagcaatactgcacctggtgatcacaaagataatgttctacttctgatagaaataatttctcaacaaatgttgttactatgcatgtatatggatggaataaaattccagattgttggagaaaaaaaaaaaaaaaaaaaaaaaaaaaa

SEQ ID NO: 580 - protein, 1151 aa, Homo sapiens
MSRRKQSKPRQIKRPLEDAIEDEEEECPSEETDIISKGDFPLEESFSTEFGPENLSCEEVEYFCNKGDDEGIQETAESDGDTQSEKPGQPGVETDDWDGPGELEVFQKDGERKIQSRQQLPVGTTWGPFPGKMDLNNNSLKTKAQVPMVLTAGPKWLLDVTWQGVEDNKNNCIVYSKGGQLWCTTTKAISEGEELIAFVVDFDSRLQAASQMTLTEGMYPARLLDSIQLLPQQAAMASILPTAIVNKDIFPCKSCGIWYRSERNLQAHLMYYCSGRQREAAPVSEENEDSAHQISSLCPFPQCTKSFSNARALEMHLNSHSGVKMEEFLPPGASLKCTVCSYTADSVINFHQHLFSHLTQAAFRCNHCHFGFQTQRELLQHQELHVPSGKLPRESDMEHSPSATEDSLQPATDLLTRSELPQSQKAMQTKDASSDTELDKCEKKTQLFLTNQRPEIQPTTNKQSFSYTKIKSEPSSPRLASSPVQPNIGPSFPVGPFLSQFSFPQDITMVPQASEILAKMSELVHRRLRHGSSSYPPVIYSPLMPKGATCFECNITFNNLDNYLVHKKHYCSSRWQQMAKSPEFPSVSEKMPEALSPNTGQTSINLLNPAAHSADPENPLLQTSCINSSTVLDLIGPNGKGHDKDFSTQTKKLSTSSNNDDKINGKPVDVKNPSVPLVDGESDPNKTTCEACNITFSRHETYMVHKQYYCATRHDPPLKRSASNKVPAMQRTMRTRKRRKMYEMCLPEQEQRPPLVQQRFLDVANLNNPCTSTQEPTEGLGECYHPRCDIFPGIVSKHLETSLTINKCVPVSKCDTTHSSVSCLEMDVPIDLSKKCLSQSERTTTSPKRLLDYHECTVCKISFNKVENYLAHKQNFCPVTAHQRNDLGQLDGKVFPNPESERNSPDVSYERSIIKCEKNGNLKQPSPNGNLFSSHLATPQGLKVFSEAAQLIATKEENRHLFLPQCLYPGAIKKAKGADQLSPYYGIKPSDYISGSLVIHNTDIEQSRNAENESPKGQASSNGCAALKKDSLPLLPKNRGMVIVNGGLKQDERPAANPQQENISQNPQHEDDHKSPSWISENPLAANENVSPGIPSAEEQLSSIAKGVNGSSQAPTSGKYCRLCDIQFNNLSNFITHKKFYCSSHAAEHVK

SEQ ID NO: 581 - DNA, 2842 bp, Homo sapiens
tggaattccagagctgccaggcgctcccagccggtctcggcaaacttttccccagcccacgtgctaaccaagcggctctcttcccgagcccgggatggagcaccgcgcctagggaggccgcgccgcccgagacgtgcgcacggttcgtggcggagagatgctgatcgcgctgaactgaccggtgcggcccgggggtgagtggcgagtctccctctgagtcctccccagcagcgcggccggcgccggctctttgggcgaaccctccagttcctagactttgagaggcgtctctcccccgcccgaccgcccagatgcagtttcgccttttctcctttgccctcatcattctgaactgcatggattacagccactgccaaggcaaccgatggagacgcagtaagcgagctagttatgtatcaaatcccatttgcaagggttgtttgtcttgttcaaaggacaatgggtgtagccgatgtcaacagaagttgttcttcttccttcgaagagaagggatgcgccagtatggagagtgcctgcattcctgcccatccgggtactatggacaccgagccccagatatgaacagatgtgcaagatgcagaatagaaaactgtgattcttgctttagcaaagacttttgtaccaagtgcaaagtaggcttttatttgcatagaggccgttgctttgatgaatgtccagatggttttgcaccattagaagaaaccatggaatgtgtggaaggatgtgaagttggtcattggagcgaatggggaacttgtagcagaaataatcgcacatgtggatttaaatggggtctggaaaccagaacacggcaaattgttaaaaagccagtgaaagacacaataccgtgtccaaccattgctgaatccaggagatgcaagatgacaatgaggcattgtccaggagggaagagaacaccaaaggcgaaggagaagaggaacaagaaaaagaaaaggaagctgatagaaagggcccaggagcaacacagcgtcttcctagctacagacagagctaaccaataaaacaagagatccggtagatttttaggggtttttgtttttgcaaatgtgcacaaagctactctccactcctgcacactggtgtgcagcctttgtgctgctctgcccagtatctgttcccagtaacatggtgaaaggaagcaccaccagcatggcccctgtgttatttatgctttgatttgaatctggagactgtgaaggcaggagtaagtgcacagcccgtgacttggctcagtgtgtgctgagagaatccgtccccggcaccatggacatgctagaggtgtgaggctgcagaacaccgctggaggacggacttgtgcctatttatgtgaaagaagatgcttggcaggcaatgcgctactcactcgtgacctttatttctcacattgtgcattttcaaggatatgtttgtgtggatatctgcttagtgttaccacatggtattctcagcatgttaccttcacactgttgtgcgatgaaactgcttttagctgaggatatgctctggaaattcctgctcagtttcactgcagccctaatatgtacatatactgcaggagctacatataaagctcttatttactgtatatttatgctttcttgtgggtaacaagtcatacctgattaatatgatgccactttgtttctagtggttcctaacccattgtctgataaatgacttttctagtttggggaattgacacttgttttgttgcctcttgaaactttttttttttcccctcattgtgggcttatttctcattgtaagggtaggataaactagtttttgtatatagagtcaaatgaccagtgtcaaagagtttgcatattgggtagaccttctccactccacatgtcccacacatatagataaagcagcaggcggcatctggcaatcagaagcccaaactgcctttgagtctaagatgtgatgactttgatgaaacacaactgaaaacatgagggactatatccagtcacttgtagccagtttcacaggccagctacagaattgtccaaacaaacattatttctgactgcaatttttttcccccaaatttaaagcaatccctggctttaaatgacaaggcacctaccaatgttcttgggtcactgaagaagctactaccatgagcctgtgcatagaattttaggagataaaaggatgaatttctgtgactgccagtcagatcttaacaggtttctgttgagccagaatctgtttcagatccaagatggagaggaacactatggaaacttcccaggtgactttcagagcagttgtttcaaacacatcattgtccttttaggggaaccagtttttagaaggttgtgaattggctttttcacaaagcatgattatcttcctggctgatccaggagaaaattagaacagaaaaataatggttgtggattttgaaacaaagcaaggtaaagccttttttttttcaccttgcattggcaaaactacctcttcagtgtttttaacttttgattcaaaagcatcttaccaataaggataaatatcatatacatcgttatgaaaatattgctatgagataataagccacatatgaatgttgtatacaactttagggtttacatttaatcctgaagtgttacctcctttcatgtctatttacactattttcccatttactaagtggggagggggtctccttatatagtgcttcatcgttaataagtcaatacctgttgttcctgggatgttcttttttgtgcattaaaaacttcaaaattaaaaaaaaaaaaaaaaaaaaaaaaaaaaaaaaaaaaaaaag

SEQ ID NO: 582 - protein, 243 aa, Homo sapiens
MQFRLFSFALIILNCMDYSHCQGNRWRRSKRASYVSNPICKGCLSCSKDNGCSRCQQKLFFFLRREGMRQYGECLHSCPSGYYGHRAPDMNRCARCRIENCDSCFSKDFCTKCKVGFYLHRGRCFDECPDGFAPLEETMECVEGCEVGHWSEWGTCSRNNRTCGFKWGLETRTRQIVKKPVKDTIPCPTIAESRRCKMTMRHCPGGKRTPKAKEKRNKKKKRKLIERAQEQHSVFLATDRANQ

SEQ ID NO: 583 - DNA, 1773 bp, Homo sapiens
tggctcctggggtgcagagaggggccacagtctctgcggctgtgtcacgctcccctgcagtcccctccatgttccctggcaccactactccccttcctaaggccgccgcttaccccagggtctatggaagtaatgaaggacccctcaacctggctcatcaacagagcagatgagcagaccgtttattagctgtaggcaaatacgaagaggctatttcttgtcacaaaaaggctgcagcgtatctttctgaagctatgaagctgacacagtctgagcaggctcatctttcactggaattgcaaagggatagccatatgaaacagctcctcctcatccaagagagatggaaaagggcccagggtgaagcaagattgaaagcccagcagaacacagacaaggatgtagctgcccatcttcaggcatctcacaaaccctctgtagaggatgcagagggccagagtcccctttctcagaagtacagcccttccacagagaaatgtctgcctgagattcaggggatctttgacagggatccagacacactactatatttacttcagcaaaagagtgagccagcagagccatgtattggaagtaaagccccaaaagacgataaaacaattatagaggagcaggcaaccaaaattgcagatttgaagaggcatgtggaattccttgtggcagagaattaaagattaagggaagaaaataacaactaaaggctgaaaaggccagacttctaaaaggtccaatagaaaaggagctggatgtagatgctgattttgtagaaacatcagagttatggagcttgccaccacattcagaaactgctacagcctcctcaacctggcagaagtttgcagcaaatactgggaaagccaaggacattcctgtcttccgcccttggattttccatctacagaacttcctcttatggagctctctgaggatattctgaaaggatttatgaataattgaaatagaaggccaccaaaaggggaaaagaggaaataatacagtaatcgttaatccagcaaaaagaaaagggaaaaccacatagaagggtcatcccggaaatgcttcatctggtggactgtgggagcagaggcattgccaggacttgggaaacagtcactgtgaaatgcgcagcatatctcattcactcacttgagctaatgattctgacttggcagacgctaaactcatggaggttcagtttctcctgatccaaaccaaatggctacctggaataatttcttccaagcaacagttatttttcttatcttcaggtttaaaatgtataaaagttatgtgtaattaatctataatgccataaatgataatgcaaaacctaaataatatggtggccggaggggctgctttatatttgaaacatgctttctatcatgcattaactgtatgcactttgttaatgcacattttgtttgtttaaggtaagatccacacccttctagatgaaactatatgtgccacactttgcactactcataatgataacctcaagactatcagaagaaatatttaaatttccattttatgaagaaaggaaccaaattattatgcttttttaaacaaattaccagtttacataattaatcagggtgcgtttcaagttctaactttgtttattgtataatgcatcatttgaaaataccaaggaggaaataccctttgtttttaatgatgcaagagtggaagtaatgctagttggtggtatttgattgtaagaaatcaataaagtaattatgtttt

SEQ ID NO: 584 - protein, 145 aa, Homo sapiens [sequence omitted]

SEQ ID NO: 585 - DNA, 2277 bp, Homo sapiens
actgccactcttaactcttgaagtaaataaataatctttgctggcaggactatgctgaatctccttaggcactctctaattagatgtcctaggtcctcccaattcttagtccttttatacctgtttttctccttctcttattccatttagtttttcaattcatacaaaactgtatccaggccatcacctatcattctatacaacaaatgtttcttctaacatccccacaatatcaccccttaccacaagacctcccttcagcttaatctctcccactctaggttcccacgctgcccctaatcccgcttgaagcagccctgagaaacatcgcccattctctctccataccaccccccaaaaattttcgccaccccaacacttcaacactattttatttttcttattaatataagaaggcaggcatgtcaggcctctgagcccaagccaagccatcgcaacccctgtgacttgcacctatacgcccagatggcctgaagtaactgaagaatcacaaaagaagtgaatatgccctgccccaccttaactgatgacattccaccacaaaagaagtgtaaatggctggtccttgccttaactgatgacattaccttgtgaaagtcctcttcctggctcatcctggctcaaaaagcacccccactgagcaccttgagacccccactcctgcccgccagagaacaaaccccctttgactgtaattttcctttacctacccaaatcctataaaacggccccacccttatctcccttcactgactctcttttcggactcagcccgcctgcacccaggtgaaataaacagctttattgctcacacaaagcctgtttggtggtctcttcacacggacgcacatgaaatttagttgtatccataaggcatatggaggagactaattcctcttccaaagacatgtaccagagtcctggagaggctgagggctggaggtggaagaaaggctctgacaggggtcagaatctgttcaggaaacatagcaaatgcctgatacttttaattagagaaaggtttgaatctccacattcatatatttgcagtccagtgacctttcagtttttttatgcccaaagtgtcaagcatgttaatgttaccattgactgcctccctgaaggtgcagctaccaggggaactgccaggacttcaaagcccacaaccaaaagccagaaaacactaccaagtacaagccccggacactggacccagagcacaccctgggcatctgctctgagatcctctccctggacagagacagctgctccttcagaaacagaggagaccctgaacacaggcaggcctcctgagcttccagccagggccacagccacatggttcagtgcctcccacactctcccagccttggctaccaggagggtggccagaactcagtggttgacagctgacagacagacgtgggcttccatatcgtccgtgccctgggctcagaccatcagtgagaaaaaacctggagggtctctctgggaaactcgttcttccccaccgactactgcagggaccgaggaagccatgaacactacaagccttttggcgcctgctgctgagataatggccacacctggcagcccatcccaggccagccctaccttgggagcattcacccatggcacacagactccgagtccaaccaaggcaacagcccccagatatccacaaacaggtgatctctctgcagagtggccattcactgctggtgaagagccagtcctggtcccaagaccccatcaagtttcaaggtgtcctcagccactcttcaaggtgggagctatggcagctgctcctctcaccctggctattcagaggctcaacccatgcctgatggagctgtgccaattcttccagcaatgcctctgcatgagccagaggagtcccaggacagaggacatgagatactgtcttgaatactattcctggtttctgaagaatgcaacatatatctgtcagagggtgaaaagggtgtcccactcgcacaccttaaagcaaaagtgccttgagaatatctgcaagtctgtgtgaggccttgaaaataacactagggcataacaattacttcaggggatacgccatccaccctggctcttgtcccaagtgggctacatttgaagaattcacccaggctccagctagatcatcagttaatttaaagtggttattcttggaagtagcattttttttccctctcctgtgaatctgtgcaaaacattgaaggtagaagttttcttgttaga

SEQ ID NO: 586 - DNA, 3097 bp, Homo sapiens
gacccgcgcgggatgtgaccccctgaccccctgcctggcctcccctgccccccagggggcccgcctttgcctgcttttgggggggggtggggaggggcgcgcggatcatggcattggagttcccgggcttgcagccgccgccgccgcctcgttcacgcaccccgagcgccccttcttcccagagcagcagcggagaaggcgaagcggccggcgggggcgaggcagatggggctcaaggcgcgcagggcggcgggggcggctggcggcggcggcgacgggggcggcggaggcggcggggcggctaacccagccggaggggacgcggcggcggccggcgacgaggagcggaaagtggggctggcgcccggcgacgtggagcaagtcaccttggcgctcggggccggagccgacaaagacgggaccctgctgctggagggcggcggccgcgacgaggggcagcggaggaccccgcagggcatcgggctcctggccaagaccccgctgagccgcccagtcaagagaaacaacgccaagtaccggcgcatccaaactttgatctacgacgccctggagagaccgcggggctgggcgctgctttaccacgcgttggtgttcctgattgtcctggggtgcttgattctggctgtcctgaccacattcaaggagtatgagactgtctcgggagactggcttctgttactggagacatttgctattttcatctttggagccgagtttgctttgaggatctgggctgctggatgttgctgccgatacaaaggctggcggggccgactgaagtttgccaggaagcccctgtgcatgttggacatctttgtgctgattgcctctgtgccagtggttgctgtgggaaaccaaggcaatgttctggccacctccctgcgaagcctgcgcttcctgcagatcctgcgcatgctgcggatggaccggagaggtggcacctggaagcttctgggctcagccatctgtgcccacagcaaagaactcatcacggcctggtacatcggtttcctgacactcatcctttcttcatttcttgtctacctggttgagaaagacgtcccagaggtggatgcacaaggagaggagatgaaagaggagtttgagacctatgcagatgccctgtggtggggcctgatcacactggccaccattggctatggagacaagacacccaaaacgtgggaaggccgtctgattgccgccaccttttccttaattggcgtctccttttttgcccttccagcgggcatcctggggtccgggctggccctcaaggtgcaggagcaacaccgtcagaagcactttgagaaaaggaggaagccagctgctgagctcattcaggctgcctggaggtattatgctaccaaccccaacaggattgacctggtggcgacatggagattttatgaatcagtcgtctcttttcctttcttcaggaaagaacagctggaggcagcatccagccaaaagctgggtctcttggatcgggttcgcctttctaatcctcgtggtagcaatactaaaggaaagctatttacccctctgaatgtagatgccatagaagaaagtccttctaaagaaccaaagcctgttggcttaaacaataaagagcgtttccgcacggccttccgcatgaaagcctacgctttctggcagagttctgaagatgccgggacaggtgaccccatggcggaagacaggggctatgggaatgacttccccatcgaagacatgatccccaccctgaaggccgccatccgagccgtcagaattctacaattccgtctctataaaaaaaaattcaaggagactttgaggccttacgatgtgaaggatgtgattgagcagtattctgccgggcatctcgacatgctttccaggataaagtaccttcagacgagaatagatatgattttcacccctggacctccctccacgccaaaacacaagaagtctcagaaagggtcagcattcaccttcccatcccagcaatctcccaggaatgaaccatatgtagccagaccatccacatcagaaatcgaagaccaaagcatgatggggaagtttgtaaaagttgaaagacaggttcaggacatggggaagaagctggacttcctcgtggatatgcacatgcaacacatggaacggttgcaggtgcaggtcacggagtattacccaaccaagggcacctcctcgccagctgaagcagagaagaaggaggacaacaggtattccgatttgaaaaccatcatctgcaactattctgagacaggccccccggaaccaccctacagcttccaccaggtgaccattgacaaagtcagcccctatgggttttttgcacatgaccctgtgaacctgccccgagggggacccagttctggaaaggttcaggcaactcctccttcctcagcaacaacgtatgtggagaggcccacggtcctgcctatcttgactcttctcgactcccgagtgagctgccactcccaggctgacctgcagggcccctactcggaccgaatctccccccggcagagacgtagcatcacgcgagacagtgacacacctctgtccctgatgtcggtcaaccacgaggagctggagaggtctccaagtggcttcagcatctcccaggacagagatgattatgtgttcggccccaatggggggtcgagctggatgagggagaagcggtacctcgccgagggtgagacggacacagacacggaccccttcacgcccagcggctccatgcctctgtcgtccacaggggatgggatttctgattcagtatggaccccttccaataagcccatttaaaagaggtcactggctgacccctccttgtaatgtagacagactttgtatagttcacttactcttacacccgacgcttaccagcggggacaccaatggctgcatcaaatgcatgcgtgtgcgtggtggccccacccaggcaggggcttcccacagcctcttcctccccatgtcaccacaacaaagtgcttccttttcagcatggtttgcatgactttacactatataaatggttccgctaatctcttctaggata

SEQ ID NO: 587 - protein, 872 aa, Homo sapiens
MGLKARRAAGAAGGGGDGGGGGGGAANPAGGDAAAAGDEERKVGLAPGDVEQVTLALGAGADKDGTLLLEGGGRDEGQRRTPQGIGLLAKTPLSRPVKRNNAKYRRIQTLIYDALERPRGWALLYHALVFLIVLGCLILAVLTTFKEYETVSGDWLLLLETFAIFIFGAEFALRIWAAGCCCRYKGWRGRLKFARKPLCMLDIFVLIASVPVVAVGNQGNVLATSLRSLRFLQILRMLRMDRRGGTWKLLGSAICAHSKELITAWYIGFLTLILSSFLVYLVEKDVPEVDAQGEEMKEEFETYADALWWGLITLATIGYGDKTPKTWEGRLIAATFSLIGVSFFALPAGILGSGLALKVQEQHRQKHFEKRRKPAAELIQAAWRYYATNPNRIDLVATWRFYESVVSFPFFRKEQLEAASSQKLGLLDRVRLSNPRGSNTKGKLFTPLNVDAIEESPSKEPKPVGLNNKERFRTAFRMKAYAFWQSSEDAGTGDPMAEDRGYGNDFPIEDMIPTLKAAIRAVRILQFRLYKKKFKETLRPYDVKDVIEQYSAGHLDMLSRIKYLQTRIDMIFTPGPPSTPKHKKSQKGSAFTFPSQQSPRNEPYVARPSTSEIEDQSMMGKFVKVERQVQDMGKKLDFLVDMHMQHMERLQVQVTEYYPTKGTSSPAEAEKKEDNRYSDLKTIICNYSETGPPEPPYSFHQVTIDKVSPYGFFAHDPVNLPRGGPSSGKVQATPPSSATTYVERPTVLPILTLLDSRVSCHSQADLQGPYSDRISPRQRRSITRDSDTPLSLMSVNHEELERSPSGFSISQDRDDYVFGPNGGSSWMREKRYLAEGETDTDTDPFTPSGSMPLSSTGDGISDSVWTPSNKPI

SEQ ID NO: 588 - DNA, 10078 bp, Homo sapiens
gcagtttattctgggcctgtgtggaatagaaagacaattctttatttgactggtaggaaagaaaagagaagactcctcagggtttccaaggaggactggagcggctgctttagtgaagaagtgaagaatcaaggaagtaaaggacctgtctcaaagtcacacaactaggaaatcttgaggagtctgatacttttcatcctccagctataaaatcatcttgtagggggaagctgtacattggtggaaaataaaaggcaagcagttcctggcccgtgatattccagttagaggtgtctgactgacagcatgttggcaccgagggaagcgatgggcttcggctccaggtttctgtcctgagaccacagcagaatgtgccttggacaaaggcttggactccttgatcttctggtaacttcaaaaatctggtctcagggtggtgaactttttcttcgaattcctaacctgtgagcttacgatgatggtgcctgtccattaactgaacaactgtggttttgaacttcttgaggccagggactgtgtctgaaaacaccgacggtggctaactcaagggagacgtctggtgaacacccgtgggatctaaagaacaagctctgaaagtgttccagctgaaatttcagatcggacagactcgctgcggctccggaggcagtgattccaagctgctcgcgcacgctgctgccaagctgcaggatggtgcacgtagccaggctgctgctgctgctcctcactttcttcctccgcacggatgctgagacacctccaaggtttacacgaacacccgttgatcagacaggggtctctggcggagttgcctctttcatctgccaagctacgggagacccaagacctaaaattgtctggaacaaaaaaggaaagaaagtcagcaatcagagatttgaggtaatagagtttgacgatgggtctggatcagttctcagaatacaacccttacggactccgagggatgaggccatttatgaatgtgtggcctcaaataatgtgggagaaataagtgtatccaccagactcacagttttgcgggaagatcaaattcccaggggcttccctaccattgacatgggcccacagttgaaggtggttgagcgtactcgcacggccaccatgctttgtgcagccagtggtaatccggatccagaaatcacttggtttaaagatttcttacctgtggacacaagcaacaacaatggtcgtattaagcagttacgatcagaatctattggtggtacaccaataagaggagcccttcagattgagcagagtgaagagtctgaccaaggaaaatatgagtgtgttgccaccaacagcgcgggcactcgctattccgctcctgccaatttatatgtcagagagctgcgagaagttcgccgtgtcccaccaagattctctatcccacccactaatcatgaaatcatgccaggcggaagcgttaatatcacctgtgtggccgtggggtcaccaatgccttatgtaaagtggatgttgggggcagaagatctgacacctgaagatgatatgccaataggaagaaatgtgctagaactgaatgatgtaagacagtcagcaaattacacctgtgttgctatgtcaacactgggtgtcattgaagcaatagcacagatcactgtcaaagccttacccaaacctccaggaactcctgtagtgaccgagagcacagctacaagcatcacactgacgtgggactctgggaaccctgagcctgtttcttattacataattcagcataaacctaaaaactctgaggaactttacaaagaaattgatggggtggcgaccacacgctacagtgtcgctggactaagtccctactcggattatgaattcagggttgttgctgtcaataacattgggcgggggcctcccagcgaacctgtgctaacacaaacctcagagcaagcaccatccagtgccccgagggatgtccaggcacgaatgttgagttcgaccaccattttggtacagtggaaggaacctgaagagccaaatggacagatccaaggatatagagtttattatacaatggatcccactcaacatgtcaacaactggatgaaacacaatgtagctgacagccaaatcactactattggcaacttagtgccccagaaaacatattctgtcaaagtcctggcttttacctcaattggagatggtcccctttcaagtgacatacaagtcatcactcagacaggagtaccagggcagccactaaacttcaaagcagaacctgagtctgaaacaagtattttgctctcttggacacctccacgttcagataccattgccaactatgaactggtctacaaagatggggagcatggagaggagcaacgaattaccattgagccagggacatcatataggctgcaaggactgaaaccaaacagcttatactatttccgtctggctgcacgctcccctcaaggcctgggtgcttctactgcagaaatatcagctagaaccatgcagtcaaagccgtcagctcctcctcaagacattagttgcaccagcccaagttccactagtattttggtaagttggcaacctccaccagtggaaaaacagaatggcattatcactgaatactccatcaagtacactgcagtggatggggaagatgacaagcctcacgagattttgggaattccttcggacactaccaaataccttttggaacagctggaaaaatggactgaataccggatcactgtgacagcccatacagatgtcggccctggccctgagagcttgtccgtgttgattcgaaccaatgaagatgttcctagtggtcctcctcgcaaagtcgaggtagaggctgtcaactcaacatctgttaaagtctcatggcgctcacccgtgcccaataaacagcatggccagataagaggatatcaggtgcattatgtgaggatggaaaatggtgagcccaagggccagcccatgctgaaagatgtcatgctggctgatgcacagtgggaatttgatgatactactgaacatgacatgatcatttctgggctccagcctgaaacttcctactccctcaccgtcacagcctacacaaccaaaggagatggtgctcgcagcaagcccaaactggtgtccaccactggggcagttccagggaaacctcggcttgtgattaaccacactcagatgaatactgctcttattcagtggcaccctccggtggacacatttggacctcttcagggctaccgtctaaaatttggccgcaaggatatggagccacttactactcttgagttctctgaaaaagaagatcactttacagctacagacatccacaagggagcatcatacgtcttcaggctctcagccagaaacaaagtgggctttggggaggagatggtgaaggagatttccattccagaagaagtaccaactggattccctcaaaaccttcactcagaaggcaccacttcaacctccgtccagttatcttggcaaccacctgtcctggcagagagaaatggcattatcaccaagtatacccttctttatagggatatcaacatcccccttctcccgatggagcagcttattgttccagctgacaccactatgacactcactggcttaaaaccagataccacatacgatgtaaaagtacgtgctcatacgagcaaagggcccgggccatatagtcccagtgtccagttcaggacactgcctgtggatcaagtgtttgcaaaaaattttcatgtcaaagcagtaatgaagacttccgtgttgctgtcttgggagattccagagaattataactccgccatgcctttcaaaattctttatgatgatgggaaaatggtagaagaagtggatggccgagccacacagaagttaattgtcaacctgaagcctgagaaatcatattcatttgtgctgacaaatcgtggaaacagtgctggtgggctgcagcacagggtcacggcaaagactgcaccagatgtattacgtaccaagcctgccttcattgggaagaccaacttggatggcatgattactgtgcaactgcctgaagtacctgcaaatgagaatataaaaggttactacataataattgtgcctttgaagaaatctcgcgggaaatttatcaagccatgggagagtccagatgaaatggaattagatgagctgcttaaggagatatctaggaagcgcagaagcatccgttatgggagagaagttgaattaaagccatatattgccgctcactttgatgtccttcccactgagttcaccctgggggatgacaagcattatggtggatttacaaacaagcaactccaaagtggtcaagaatatgtcttctttgtgttagcagtaatggaacatgcagagtctaagatgtatgcaaccagcccttactccgaccccgtggtgtcaatggatctggatccgcagccaatcacggatgaagaagaaggcttgatctgggttgtaggtcctgtccttgcagtggtctttatcatctgcattgtcattgctattcttctttataaaaggaagagggcagagtccgactctagaaaaagcagcataccgaacaataaggagatcccttcacaccacccaacagaccctgtagaactgaggcgccttaactttcaaacaccgggtatggctagccatcctccaatacccatcttggaacttgcagaccacattgaaagattgaaagcaaatgacaacttgaagttttcccaggaatatgagtcaattgaccctggccagcagttcacttgggaacattcaaacttggaagtaaacaaaccaaagaatagatacgcgaatgtaatcgcatatgatcattcccgggttctcctatcagctatagaagggatcccaggaagtgactatgtgaatgccaactacatagatgggtataggaagcaaaatgcctatattgcaacacagggatctctccccgaaacatttggggacttttggagaatgatatgggaacaacggagtgccacagttgtcatgatgacaaaactagaagaaagatcaagggtgaagtgtgaccagtattggcctagcagaggcacagaaacccacggactcgttcaagtaacgctgcttgatactgtggagctggccacatattgtgttcgaacatttgcactttacaagaatggttcaagtgagaagagagaagtgagacaattccagttcaccgcctggcctgatcatggtgttccagaacaccctacaccttttctagctttcttacgtagagtcaaaacctgtaaccctcccgatgctggtccgatggttgtgcactgcagtgcgggagttggccggactggttgcttcatcgtcatagatgccatgttagaaagaataaagcatgaaaaaactgtagatatttatggccatgtaactttaatgagagcccagaggaactatatggttcaaacagaagaccaatacatctttatccatgatgcactgttagaagcagtgacttgtggaaataccgaagtgccagctagaaacttgtatgcctacattcagaagctgacacaaatagaaacgggagagaatgtcacaggaatggagctcgaatttaagcgtctagccagctcaaaagctcacacctcaaggtttatcagtgccaatcttccatgtaataaattcaaaaatcgccttgttaatattatgccatatgaatccacaagggtatgcctgcagcctatccgtggagtagaaggatctgattacatcaatgccagttttattgatggatacagacaacagaaagcctacatcgctacccaggggcccttggcagagaccactgaagacttctggcggatgctctgggaacacaattccaccatagttgtgatgctcaccaagctgcgtgaaatgggcagagagaaatgtcaccaatactggccagcagaacggtctgcaagataccagtactttgttgtagatcccatggctgagtacaacatgccacagtatatcctaagggaattcaaggtcacagatgccagggacggccagtcccgaacagtaaggcagttccagttcactgactggccagagcaaggagtgccaaagtccggagaaggatttattgacttcatcggccaagtccataaaacaaaagaacagtttggccaagatggacccatttcagtccattgcagcgcgggcgttggaagaactggagtcttcataacgctaagcattgttttggaaagaatgagatatgaaggagttgtagatatcttccagactgtcaaaatgttaagaacacaacgaccagctatggtacagacagaggatcaatatcagttttcctatcgtgccgcactagagtacctgggcagctttgaccactatgcaacgtagaaacccctgacccattctggatttttactacaggcccttcaatatccatggagtctcttctgagccatacagggcacttgagaagtccttcttaacttctagctaacaactacttagtgggactattacacacaaaacaaattaaaaacaaattattccaggtggaccaagaattcacagtttaataatctaacctgaaaaataatgaagagaatcctgactgatgaggcatctgaaggattttatttacagatacctcaaggattcaaaatcaagggaagaagaaatcacagcaaagaaccaccatcttattcaggattgcttgaaaggtgcaaggagaaattgccagaatgctgcagttcagcacaagatatgtgctggtgtggcttctcacaatgaaacggactctgctttgacatcgccccttcccaccatactgctcataataacattttagggggaaaggggagggaatgtttaaaaagaaagtccttgatttagttttttagtattgtaaagatactgctgacctgtgcttcatttctaactgtgtaaacttttttttaacaaaatgtatcattcgataaagtgaattttaaaaaagttacataactcttcatttttttatttccaaatcgtaggtttttttaagctgtagaactgttatctgtaatatcttgctgtagaaatatcaaatcatttgaaaatttgcacatttttgtgcaaaactcaatctacagtatcagtctcgtcagatatattaattttacacttcagttttgattggtgagaaagtacccattctcttcaaataatcaaagataattattattttgttttgtttttggaatcaacagggaggcgcaaagtataaagttgctgctaacatatatacatatatatccatattttataagggtgtctatgtatatatagacagtgtgtccacacaaaaaatagatacagttatcagtcagtcagttcttccatgatttagtttttttaaacgtagaaaagctattgtaaacatctctttccatttattcttaattttttgacatattggtatttctttaaagggaaatgaggaatgcacatcagtgattgattgtcaaacctcaccccctgatttcctacctaatctacccccacctaaccaatcaatcacatccacaaattgttttgtttgtttgttagtcaggcttccaacaaagttcaatatttctaacactctagtgcaataaaaattattattaaatagctaagaggtgtgcatgtgggaaaggtcagtgcatatccctttaggaggggagaatgttgtaatatatcagctatcgagttgtttaaaaaaagtgtattcaatcgtatattgtctatagtatgtgctatgaaatttgcatttatgatatgtaacaggggcaaagccaaattcatgttactctgttcagtcagaaacattttgtggcatacagcattcctgggaagtgctgtactttgtttcgttttggttttagttttgcatttagagtgccttataattgatgcctattttaatagcatttctttttagcttttggttcgtatttccattcactgttcgtatctgttactttctattaaagcattatctgtttaccacatgtacaaaaactctttgaataatatgcattcctagttttcagccaagtcggggatgttagtgattgtaccagcccaaagcacttggataatcagggcccttcttccttttataatcaatcatcaacatcagaaaaagctacttgttttatttatattcccttccaaatccgctctggaacatgcagtaactgcaccaaacttattttagtaacaaatatcattggcaactttggaatatatttgatattccattaggatttttctaaaaggggaaataaactatatatatatatgtatcttacccccaattcttccaacagaatttctataggaagccatggatgatggcataagtttgccacatattacatgattttaaataatcctcaaaatacccaaggaactcttaaagagttttggtatgagtatactactttggtttaattttagcttcatggatgttctgcatggaaggatttttgttttccacattttcccattgctagcagagtgaaatccaagagaccaaacatttgcaagcattgtatttgagcacttttgtaaaaaacaaagaaaaagaaaaaaaagaaaatatatataatactaaaaaaaagtatctagaaggctacctcagaatgagactctctaacctacatcagaaccagagaagaatgtgcactatgtgggtctgttatcattattttcttttagtttgtatctttttggagatttatccaagtgccagattactcagtgctataattttcttttagttaaacaaagggggtcagacagacattgcatcatccagacatgccttgttggacatgtagaatccgatggagcactgcacaccagaatgattggccaatgagcagcttctctccctgaaacaataactgcccatttggcaaagggaaagatgacaataatcagaagaagaaaatgaatgggatgcataccatagacgaacgaggcggagactattgcgggaatcttactgttcaggagctgttcctagaactaactcccttactgtcattgatgtgcattccactctgtgcttttctgtacaaccattcaagttttaatttcccaggtgaaccatctttatctgccattaccacaagctttcaagtttccagttattttcatcatcataaccagtacggtgctattatttacctatgtacgtgtagttatgtataattttgtaattagttacaatggtaaaaaaaatcaaaatatataaaaagtgatttgtacagaactttattttagctcttttttaaaaatgatttgcatggttagaaaacggcgaggacagccaggggagggaagggcctctagggaactttgcactttctatacctttgtactatgcactgccctattgattctacacccaataatgatattacttgaacccatctgtaagaaactgcttcggaaattcatttgtgtgtatgtaaataacacaacatagaaacaggaagggaaaaaagtctgcagtaatgcacgtattttttttctttcctgtttattttcggttttgctttaagtccttttatttttaattccctttttgtttttctttttgggttttggttccttttgggtttatgggtgccctgatactccagcagagatcagaaggctacagatccattctatccatccgttatgtggctttgccatcccagcttggagtgtctttacaaagataataacagttgtgttctttgctctcgttttggatgcatagactgaaaaattaaaacaaataacttgtaaaatggcttgttaaaaaatacaattacctctaattagtagtacgcgtaaatgttttacagaatgaaaggcgtgctttttattttcttacttcgttacattggtggcgaaagaagtctgtatgaaaatcagttctttgctgacacaagttccatttgttacaaatgaattctaataaaaatgtcagtgttatgca

SEQ ID NO: 589 - protein, 1912 aa, Homo sapiens
MVHVARLLLLLLTFFLRTDAETPPRFTRTPVDQTGVSGGVASFICQATGDPRPKIVWNKKGKKVSNQRFEVIEFDDGSGSVLRIQPLRTPRDEAIYECVASNNVGEISVSTRLTVLREDQIPRGFPTIDMGPQLKVVERTRTATMLCAASGNPDPEITWFKDFLPVDTSNNNGRIKQLRSESIGGTPIRGALQIEQSEESDQGKYECVATNSAGTRYSAPANLYVRELREVRRVPPRFSIPPTNHEIMPGGSVNITCVAVGSPMPYVKWMLGAEDLTPEDDMPIGRNVLELNDVRQSANYTCVAMSTLGVIEAIAQITVKALPKPPGTPVVTESTATSITLTWDSGNPEPVSYYIIQHKPKNSEELYKEIDGVATTRYSVAGLSPYSDYEFRVVAVNNIGRGPPSEPVLTQTSEQAPSSAPRDVQARMLSSTTILVQWKEPEEPNGQIQGYRVYYTMDPTQHVNNWMKHNVADSQITTIGNLVPQKTYSVKVLAFTSIGDGPLSSDIQVITQTGVPGQPLNFKAEPESETSILLSWTPPRSDTIANYELVYKDGEHGEEQRITIEPGTSYRLQGLKPNSLYYFRLAARSPQGLGASTAEISARTMQSKPSAPPQDISCTSPSSTSILVSWQPPPVEKQNGIITEYSIKYTAVDGEDDKPHEILGIPSDTTKYLLEQLEKWTEYRITVTAHTDVGPGPESLSVLIRTNEDVPSGPPRKVEVEAVNSTSVKVSWRSPVPNKQHGQIRGYQVHYVRMENGEPKGQPMLKDVMLADAQWEFDDTTEHDMIISGLQPETSYSLTVTAYTTKGDGARSKPKLVSTTGAVPGKPRLVINHTQMNTALIQWHPPVDTFGPLQGYRLKFGRKDMEPLTTLEFSEKEDHFTATDIHKGASYVFRLSARNKVGFGEEMVKEISIPEEVPTGFPQNLHSEGTTSTSVQLSWQPPVLAERNGIITKYTLLYRDINIPLLPMEQLIVPADTTMTLTGLKPDTTYDVKVRAHTSKGPGPYSPSVQFRTLPVDQVFAKNFHVKAVMKTSVLLSWEIPENYNSAMPFKILYDDGKMVEEVDGRATQKLIVNLKPEKSYSFVLTNRGNSAGGLQHRVTAKTAPDVLRTKPAFIGKTNLDGMITVQLPEVPANENIKGYYIIIVPLKKSRGKFIKPWESPDEMELDELLKEISRKRRSIRYGREVELKPYIAAHFDVLPTEFTLGDDKHYGGFTNKQLQSGQEYVFFVLAVMEHAESKMYATSPYSDPVVSMDLDPQPITDEEEGLIWVVGPVLAVVFIICIVIAILLYKRKRAESDSRKSSIPNNKEIPSHHPTDPVELRRLNFQTPGMASHPPIPILELADHIERLKANDNLKFSQEYESIDPGQQFTWEHSNLEVNKPKNRYANVIAYDHSRVLLSAIEGIPGSDYVNANYIDGYRKQNAYIATQGSLPETFGDFWRMIWEQRSATVVMMTKLEERSRVKCDQYWPSRGTETHGLVQVTLLDTVELATYCVRTFALYKNGSSEKREVRQFQFTAWPDHGVPEHPTPFLAFLRRVKTCNPPDAGPMVVHCSAGVGRTGCFIVIDAMLERIKHEKTVDIYGHVTLMRAQRNYMVQTEDQYIFIHDALLEAVTCGNTEVPARNLYAYIQKLTQIETGENVTGMELEFKRLASSKAHTSRFISANLPCNKFKNRLVNIMPYESTRVCLQPIRGVEGSDYINASFIDGYRQQKAYIATQGPLAETTEDFWRMLWEHNSTIVVMLTKLREMGREKCHQYWPAERSARYQYFVVDPMAEYNMPQYILREFKVTDARDGQSRTVRQFQFTDWPEQGVPKSGEGFIDFIGQVHKTKEQFGQDGPISVHCSAGVGRTGVFITLSIVLERMRYEGVVDIFQTVKMLRTQRPAMVQTEDQYQFSYRAALEYLGSFDHYAT

SEQ ID NO: 590 - DNA, 10039 bp, Homo sapiens
gcagtttattctgggcctgtgtggaatagaaagacaattctttatttgactggtaggaaagaaaagagaagactcctcagggtttccaaggaggactggagcggctgctttagtgaagaagtgaagaatcaaggaagtaaaggacctgtctcaaagtcacacaactaggaaatcttgaggagtctgatacttttcatcctccagctataaaatcatcttgtagggggaagctgtacattggtggaaaataaaaggcaagcagttcctggcccgtgatattccagttagaggtgtctgactgacagcatgttggcaccgagggaagcgatgggcttcggctccaggtttctgtcctgagaccacagcagaatgtgccttggacaaaggcttggactccttgatcttctggtaacttcaaaaatctggtctcagggtggtgaactttttcttcgaattcctaacctgtgagcttacgatgatggtgcctgtccattaactgaacaactgtggttttgaacttcttgaggccagggactgtgtctgaaaacaccgacggtggctaactcaagggagacgtctggtgaacacccgtgggatctaaagaacaagctctgaaagtgttccagctgaaatttcagatcggacagactcgctgcggctccggaggcagtgattccaagctgctcgcgcacgctgctgccaagctgcaggatggtgcacgtagccaggctgctgctgctgctcctcactttcttcctccgcacggatgctgagacacctccaaggtttacacgaacacccgttgatcagacaggggtctctggcggagttgcctctttcatctgccaagctacgggagacccaagacctaaaattgtctggaacaaaaaaggaaagaaagtcagcaatcagagatttgaggtaatagagtttgacgatgggtctggatcagttctcagaatacaacccttacggactccgagggatgaggccatttatgaatgtgtggcctcaaataatgtgggagaaataagtgtatccaccagactcacagttttgcgggaagatcaaattcccaggggcttccctaccattgacatgggcccacagttgaaggtggttgagcgtactcgcacggccaccatgctttgtgcagccagtggtaatccggatccagaaatcacttggtttaaagatttcttacctgtggacacaagcaacaacaatggtcgtattaagcagttacgatcaggagcccttcagattgagcagagtgaagagtctgaccaaggaaaatatgagtgtgttgccaccaacagcgcgggcactcgctattccgctcctgccaatttatatgtcagagttcgccgtgtcccaccaagattctctatcccacccactaatcatgaaatcatgccaggcggaagcgttaatatcacctgtgtggccgtggggtcaccaatgccttatgtaaagtggatgttgggggcagaagatctgacacctgaagatgatatgccaataggaagaaatgtgctagaactgaatgatgtaagacagtcagcaaattacacctgtgttgctatgtcaacactgggtgtcattgaagcaatagcacagatcactgtcaaagccttacccaaacctccaggaactcctgtagtgaccgagagcacagctacaagcatcacactgacgtgggactctgggaaccctgagcctgtttcttattacataattcagcataaacctaaaaactctgaggaactttacaaagaaattgatggggtggcgaccacacgctacagtgtcgctggactaagtccctactcggattatgaattcagggttgttgctgtcaataacattgggcgggggcctcccagcgaacctgtgctaacacaaacctcagagcaagcaccatccagtgccccgagggatgtccaggcacgaatgttgagttcgaccaccattttggtacagtggaaggaacctgaagagccaaatggacagatccaaggatatagagtttattatacaatggatcccactcaacatgtcaacaactggatgaaacacaatgtagctgacagccaaatcactactattggcaacttagtgccccagaaaacatattctgtcaaagtcctggcttttacctcaattggagatggtcccctttcaagtgacatacaagtcatcactcagacaggagtaccagggcagccactaaacttcaaagcagaacctgagtctgaaacaagtattttgctctcttggacacctccacgttcagataccattgccaactatgaactggtctacaaagatggggagcatggagaggagcaacgaattaccattgagccagggacatcatataggctgcaaggactgaaaccaaacagcttatactatttccgtctggctgcacgctcccctcaaggcctgggtgcttctactgcagaaatatcagctagaaccatgcagtcaaagccgtcagctcctcctcaagacattagttgcaccagcccaagttccactagtattttggtaagttggcaacctccaccagtggaaaaacagaatggcattatcactgaatactccatcaagtacactgcagtggatggggaagatgacaagcctcacgagattttgggaattccttcggacactaccaaataccttttggaacagctggaaaaatggactgaataccggatcactgtgacagcccatacagatgtcggccctggccctgagagcttgtccgtgttgattcgaaccaatgaagatgttcctagtggtcctcctcgcaaagtcgaggtagaggctgtcaactcaacatctgttaaagtctcatggcgctcacccgtgcccaataaacagcatggccagataagaggatatcaggtgcattatgtgaggatggaaaatggtgagcccaagggccagcccatgctgaaagatgtcatgctggctgatgcacagtgggaatttgatgatactactgaacatgacatgatcatttctgggctccagcctgaaacttcctactccctcaccgtcacagcctacacaaccaaaggagatggtgctcgcagcaagcccaaactggtgtccaccactggggcagttccagggaaacctcggcttgtgattaaccacactcagatgaatactgctcttattcagtggcaccctccggtggacacatttggacctcttcagggctaccgtctaaaatttggccgcaaggatatggagccacttactactcttgagttctctgaaaaagaagatcactttacagctacagacatccacaagggagcatcatacgtcttcaggctctcagccagaaacaaagtgggctttggggaggagatggtgaaggagatttccattccagaagaagtaccaactggattccctcaaaaccttcactcagaaggcaccacttcaacctccgtccagttatcttggcaaccacctgtcctggcagagagaaatggcattatcaccaagtatacccttctttatagggatatcaacatcccccttctcccgatggagcagcttattgttccagctgacaccactatgacactcactggcttaaaaccagataccacatacgatgtaaaagtacgtgctcatacgagcaaagggcccgggccatatagtcccagtgtccagttcaggacactgcctgtggatcaagtgtttgcaaaaaattttcatgtcaaagcagtaatgaagacttccgtgttgctgtcttgggagattccagagaattataactccgccatgcctttcaaaattctttatgatgatgggaaaatggtagaagaagtggatggccgagccacacagaagttaattgtcaacctgaagcctgagaaatcatattcatttgtgctgacaaatcgtggaaacagtgctggtgggctgcagcacagggtcacggcaaagactgcaccagatgtattacgtaccaagcctgccttcattgggaagaccaacttggatggcatgattactgtgcaactgcctgaagtacctgcaaatgagaatataaaaggttactacataataattgtgcctttgaagaaatctcgcgggaaatttatcaagccatgggagagtccagatgaaatggaattagatgagctgcttaaggagatatctaggaagcgcagaagcatccgttatgggagagaagttgaattaaagccatatattgccgctcactttgatgtccttcccactgagttcaccctgggggatgacaagcattatggtggatttacaaacaagcaactccaaagtggtcaagaatatgtcttctttgtgttagcagtaatggaacatgcagagtctaagatgtatgcaaccagcccttactccgaccccgtggtgtcaatggatctggatccgcagccaatcacggatgaagaagaaggcttgatctgggttgtaggtcctgtccttgcagtggtctttatcatctgcattgtcattgctattcttctttataaaaggaagagggcagagtccgactctagaaaaagcagcataccgaacaataaggagatcccttcacaccacccaacagaccctgtagaactgaggcgccttaactttcaaacaccgggtatggctagccatcctccaatacccatcttggaacttgcagaccacattgaaagattgaaagcaaatgacaacttgaagttttcccaggaatatgagtcaattgaccctggccagcagttcacttgggaacattcaaacttggaagtaaacaaaccaaagaatagatacgcgaatgtaatcgcatatgatcattcccgggttctcctatcagctatagaagggatcccaggaagtgactatgtgaatgccaactacatagatgggtataggaagcaaaatgcctatattgcaacacagggatctctccccgaaacatttggggacttttggagaatgatatgggaacaacggagtgccacagttgtcatgatgacaaaactagaagaaagatcaagggtgaagtgtgaccagtattggcctagcagaggcacagaaacccacggactcgttcaagtaacgctgcttgatactgtggagctggccacatattgtgttcgaacatttgcactttacaagaatggttcaagtgagaagagagaagtgagacaattccagttcaccgcctggcctgatcatggtgttccagaacaccctacaccttttctagctttcttacgtagagtcaaaacctgtaaccctcccgatgctggtccgatggttgtgcactgcagtgcgggagttggccggactggttgcttcatcgtcatagatgccatgttagaaagaataaagcatgaaaaaactgtagatatttatggccatgtaactttaatgagagcccagaggaactatatggttcaaacagaagaccaatacatctttatccatgatgcactgttagaagcagtgacttgtggaaataccgaagtgccagctagaaacttgtatgcctacattcagaagctgacacaaatagaaacgggagagaatgtcacaggaatggagctcgaatttaagcgtctagccagctcaaaagctcacacctcaaggtttatcagtgccaatcttccatgtaataaattcaaaaatcgccttgttaatattatgccatatgaatccacaagggtatgcctgcagcctatccgtggagtagaaggatctgattacatcaatgccagttttattgatggatacagacaacagaaagcctacatcgctacccaggggcccttggcagagaccactgaagacttctggcggatgctctgggaacacaattccaccatagttgtgatgctcaccaagctgcgtgaaatgggcagagagaaatgtcaccaatactggccagcagaacggtctgcaagataccagtactttgttgtagatcccatggctgagtacaacatgccacagtatatcctaagggaattcaaggtcacagatgccagggacggccagtcccgaacagtaaggcagttccagttcactgactggccagagcaaggagtgccaaagtccggagaaggatttattgacttcatcggccaagtccataaaacaaaagaacagtttggccaagatggacccatttcagtccattgcagcgcgggcgttggaagaactggagtcttcataacgctaagcattgttttggaaagaatgagatatgaaggagttgtagatatcttccagactgtcaaaatgttaagaacacaacgaccagctatggtacagacagaggatcaatatcagttttcctatcgtgccgcactagagtacctgggcagctttgaccactatgcaacgtagaaacccctgacccattctggatttttactacaggcccttcaatatccatggagtctcttctgagccatacagggcacttgagaagtccttcttaacttctagctaacaactacttagtgggactattacacacaaaacaaattaaaaacaaattattccaggtggaccaagaattcacagtttaataatctaacctgaaaaataatgaagagaatcctgactgatgaggcatctgaaggattttatttacagatacctcaaggattcaaaatcaagggaagaagaaatcacagcaaagaaccaccatcttattcaggattgcttgaaaggtgcaaggagaaattgccagaatgctgcagttcagcacaagatatgtgctggtgtggcttctcacaatgaaacggactctgctttgacatcgccccttcccaccatactgctcataataacattttagggggaaaggggagggaatgtttaaaaagaaagtccttgatttagttttttagtattgtaaagatactgctgacctgtgcttcatttctaactgtgtaaacttttttttaacaaaatgtatcattcgataaagtgaattttaaaaaagttacataactcttcatttttttatttccaaatcgtaggtttttttaagctgtagaactgttatctgtaatatcttgctgtagaaatatcaaatcatttgaaaatttgcacatttttgtgcaaaactcaatctacagtatcagtctcgtcagatatattaattttacacttcagttttgattggtgagaaagtacccattctcttcaaataatcaaagataattattattttgttttgtttttggaatcaacagggaggcgcaaagtataaagttgctgctaacatatatacatatatatccatattttataagggtgtctatgtatatatagacagtgtgtccacacaaaaaatagatacagttatcagtcagtcagttcttccatgatttagtttttttaaacgtagaaaagctattgtaaacatctctttccatttattcttaattttttgacatattggtatttctttaaagggaaatgaggaatgcacatcagtgattgattgtcaaacctcaccccctgatttcctacctaatctacccccacctaaccaatcaatcacatccacaaattgttttgtttgtttgttagtcaggcttccaacaaagttcaatatttctaacactctagtgcaataaaaattattattaaatagctaagaggtgtgcatgtgggaaaggtcagtgcatatccctttaggaggggagaatgttgtaatatatcagctatcgagttgtttaaaaaaagtgtattcaatcgtatattgtctatagtatgtgctatgaaatttgcatttatgatatgtaacaggggcaaagccaaattcatgttactctgttcagtcagaaacattttgtggcatacagcattcctgggaagtgctgtactttgtttcgttttggttttagttttgcatttagagtgccttataattgatgcctattttaatagcatttctttttagcttttggttcgtatttccattcactgttcgtatctgttactttctattaaagcattatctgtttaccacatgtacaaaaactctttgaataatatgcattcctagttttcagccaagtcggggatgttagtgattgtaccagcccaaagcacttggataatcagggcccttcttccttttataatcaatcatcaacatcagaaaaagctacttgttttatttatattcccttccaaatccgctctggaacatgcagtaactgcaccaaacttattttagtaacaaatatcattggcaactttggaatatatttgatattccattaggatttttctaaaaggggaaataaactatatatatatatgtatcttacccccaattcttccaacagaatttctataggaagccatggatgatggcataagtttgccacatattacatgattttaaataatcctcaaaatacccaaggaactcttaaagagttttggtatgagtatactactttggtttaattttagcttcatggatgttctgcatggaaggatttttgttttccacattttcccattgctagcagagtgaaatccaagagaccaaacatttgcaagcattgtatttgagcacttttgtaaaaaacaaagaaaaagaaaaaaaagaaaatatatataatactaaaaaaaagtatctagaaggctacctcagaatgagactctctaacctacatcagaaccagagaagaatgtgcactatgtgggtctgttatcattattttcttttagtttgtatctttttggagatttatccaagtgccagattactcagtgctataattttcttttagttaaacaaagggggtcagacagacattgcatcatccagacatgccttgttggacatgtagaatccgatggagcactgcacaccagaatgattggccaatgagcagcttctctccctgaaacaataactgcccatttggcaaagggaaagatgacaataatcagaagaagaaaatgaatgggatgcataccatagacgaacgaggcggagactattgcgggaatcttactgttcaggagctgttcctagaactaactcccttactgtcattgatgtgcattccactctgtgcttttctgtacaaccattcaagttttaatttcccaggtgaaccatctttatctgccattaccacaagctttcaagtttccagttattttcatcatcataaccagtacggtgctattatttacctatgtacgtgtagttatgtataattttgtaattagttacaatggtaaaaaaaatcaaaatatataaaaagtgatttgtacagaactttattttagctcttttttaaaaatgatttgcatggttagaaaacggcgaggacagccaggggagggaagggcctctagggaactttgcactttctatacctttgtactatgcactgccctattgattctacacccaataatgatattacttgaacccatctgtaagaaactgcttcggaaattcatttgtgtgtatgtaaataacacaacatagaaacaggaagggaaaaaagtctgcagtaatgcacgtattttttttctttcctgtttattttcggttttgctttaagtccttttatttttaattccctttttgtttttctttttgggttttggttccttttgggtttatgggtgccctgatactccagcagagatcagaaggctacagatccattctatccatccgttatgtggctttgccatcccagcttggagtgtctttacaaagataataacagttgtgttctttgctctcgttttggatgcatagactgaaaaattaaaacaaataacttgtaaaatggcttgttaaaaaatacaattacctctaattagtagtacgcgtaaatgttttacagaatgaaaggcgtgctttttattttcttacttcgttacattggtggcgaaagaagtctgtatgaaaatcagttctttgctgacacaagttccatttgttacaaatgaattctaataaaaatgtcagtgttatgca

SEQ ID NO: 591 - protein, 1899 aa, Homo sapiens
MVHVARLLLLLLTFFLRTDAETPPRFTRTPVDQTGVSGGVASFICQATGDPRPKIVWNKKGKKVSNQRFEVIEFDDGSGSVLRIQPLRTPRDEAIYECVASNNVGEISVSTRLTVLREDQIPRGFPTIDMGPQLKVVERTRTATMLCAASGNPDPEITWFKDFLPVDTSNNNGRIKQLRSGALQIEQSEESDQGKYECVATNSAGTRYSAPANLYVRVRRVPPRFSIPPTNHEIMPGGSVNITCVAVGSPMPYVKWMLGAEDLTPEDDMPIGRNVLELNDVRQSANYTCVAMSTLGVIEAIAQITVKALPKPPGTPVVTESTATSITLTWDSGNPEPVSYYIIQHKPKNSEELYKEIDGVATTRYSVAGLSPYSDYEFRVVAVNNIGRGPPSEPVLTQTSEQAPSSAPRDVQARMLSSTTILVQWKEPEEPNGQIQGYRVYYTMDPTQHVNNWMKHNVADSQITTIGNLVPQKTYSVKVLAFTSIGDGPLSSDIQVITQTGVPGQPLNFKAEPESETSILLSWTPPRSDTIANYELVYKDGEHGEEQRITIEPGTSYRLQGLKPNSLYYFRLAARSPQGLGASTAEISARTMQSKPSAPPQDISCTSPSSTSILVSWQPPPVEKQNGIITEYSIKYTAVDGEDDKPHEILGIPSDTTKYLLEQLEKWTEYRITVTAHTDVGPGPESLSVLIRTNEDVPSGPPRKVEVEAVNSTSVKVSWRSPVPNKQHGQIRGYQVHYVRMENGEPKGQPMLKDVMLADAQWEFDDTTEHDMIISGLQPETSYSLTVTAYTTKGDGARSKPKLVSTTGAVPGKPRLVINHTQMNTALIQWHPPVDTFGPLQGYRLKFGRKDMEPLTTLEFSEKEDHFTATDIHKGASYVFRLSARNKVGFGEEMVKEISIPEEVPTGFPQNLHSEGTTSTSVQLSWQPPVLAERNGIITKYTLLYRDINIPLLPMEQLIVPADTTMTLTGLKPDTTYDVKVRAHTSKGPGPYSPSVQFRTLPVDQVFAKNFHVKAVMKTSVLLSWEIPENYNSAMPFKILYDDGKMVEEVDGRATQKLIVNLKPEKSYSFVLTNRGNSAGGLQHRVTAKTAPDVLRTKPAFIGKTNLDGMITVQLPEVPANENIKGYYIIIVPLKKSRGKFIKPWESPDEMELDELLKEISRKRRSIRYGREVELKPYIAAHFDVLPTEFTLGDDKHYGGFTNKQLQSGQEYVFFVLAVMEHAESKMYATSPYSDPVVSMDLDPQPITDEEEGLIWVVGPVLAVVFIICIVIAILLYKRKRAESDSRKSSIPNNKEIPSHHPTDPVELRRLNFQTPGMASHPPIPILELADHIERLKANDNLKFSQEYESIDPGQQFTWEHSNLEVNKPKNRYANVIAYDHSRVLLSAIEGIPGSDYVNANYIDGYRKQNAYIATQGSLPETFGDFWRMIWEQRSATVVMMTKLEERSRVKCDQYWPSRGTETHGLVQVTLLDTVELATYCVRTFALYKNGSSEKREVRQFQFTAWPDHGVPEHPTPFLAFLRRVKTCNPPDAGPMVVHCSAGVGRTGCFIVIDAMLERIKHEKTVDIYGHVTLMRAQRNYMVQTEDQYIFIHDALLEAVTCGNTEVPARNLYAYIQKLTQIETGENVTGMELEFKRLASSKAHTSRFISANLPCNKFKNRLVNIMPYESTRVCLQPIRGVEGSDYINASFIDGYRQQKAYIATQGPLAETTEDFWRMLWEHNSTIVVMLTKLREMGREKCHQYWPAERSARYQYFVVDPMAEYNMPQYILREFKVTDARDGQSRTVRQFQFTDWPEQGVPKSGEGFIDFIGQVHKTKEQFGQDGPISVHCSAGVGRTGVFITLSIVLERMRYEGVVDIFQTVKMLRTQRPAMVQTEDQYQFSYRAALEYLGSFDHYAT

SEQ ID NO: 592 - DNA, 10051 bp, Homo sapiens
gcagtttattctgggcctgtgtggaatagaaagacaattctttatttgactggtaggaaagaaaagagaagactcctcagggtttccaaggaggactggagcggctgctttagtgaagaagtgaagaatcaaggaagtaaaggacctgtctcaaagtcacacaactaggaaatcttgaggagtctgatacttttcatcctccagctataaaatcatcttgtagggggaagctgtacattggtggaaaataaaaggcaagcagttcctggcccgtgatattccagttagaggtgtctgactgacagcatgttggcaccgagggaagcgatgggcttcggctccaggtttctgtcctgagaccacagcagaatgtgccttggacaaaggcttggactccttgatcttctggtaacttcaaaaatctggtctcagggtggtgaactttttcttcgaattcctaacctgtgagcttacgatgatggtgcctgtccattaactgaacaactgtggttttgaacttcttgaggccagggactgtgtctgaaaacaccgacggtggctaactcaagggagacgtctggtgaacacccgtgggatctaaagaacaagctctgaaagtgttccagctgaaatttcagatcggacagactcgctgcggctccggaggcagtgattccaagctgctcgcgcacgctgctgccaagctgcaggatggtgcacgtagccaggctgctgctgctgctcctcactttcttcctccgcacggatgctgagacacctccaaggtttacacgaacacccgttgatcagacaggggtctctggcggagttgcctctttcatctgccaagctacgggagacccaagacctaaaattgtctggaacaaaaaaggaaagaaagtcagcaatcagagatttgaggtaatagagtttgacgatgggtctggatcagttctcagaatacaacccttacggactccgagggatgaggccatttatgaatgtgtggcctcaaataatgtgggagaaataagtgtatccaccagactcacagttttgcgggaagatcaaattcccaggggcttccctaccattgacatgggcccacagttgaaggtggttgagcgtactcgcacggccaccatgctttgtgcagccagtggtaatccggatccagaaatcacttggtttaaagatttcttacctgtggacacaagcaacaacaatggtcgtattaagcagttacgatcagaatctattggtggtacaccaataagaggagcccttcagattgagcagagtgaagagtctgaccaaggaaaatatgagtgtgttgccaccaacagcgcgggcactcgctattccgctcctgccaatttatatgtcagagagctgcgagaagttcgccgtgtcccaccaagattctctatcccacccactaatcatgaaatcatgccaggcggaagcgttaatatcacctgtgtggccgtggggtcaccaatgccttatgtaaagtggatgttgggggcagaagatctgacacctgaagatgatatgccaataggaagaaatgtgctagaactgaatgatgtaagacagtcagcaaattacacctgtgttgctatgtcaacactgggtgtcattgaagcaatagcacagatcactgtcaaagccttacccaaacctccaggaactcctgtagtgaccgagagcacagctacaagcatcacactgacgtgggactctgggaaccctgagcctgtttcttattacataattcagcataaacctaaaaactctgaggaactttacaaagaaattgatggggtggcgaccacacgctacagtgtcgctggactaagtccctactcggattatgaattcagggttgttgctgtcaataacattgggcgggggcctcccagcgaacctgtgctaacacaaacctcagagcaagcaccatccagtgccccgagggatgtccaggcacgaatgttgagttcgaccaccattttggtacagtggaaggaacctgaagagccaaatggacagatccaaggatatagagtttattatacaatggatcccactcaacatgtcaacaactggatgaaacacaatgtagctgacagccaaatcactactattggcaacttagtgccccagaaaacatattctgtcaaagtcctggcttttacctcaattggagatggtcccctttcaagtgacatacaagtcatcactcagacaggagtaccagggcagccactaaacttcaaagcagaacctgagtctgaaacaagtattttgctctcttggacacctccacgttcagataccattgccaactatgaactggtctacaaagatggggagcatggagaggagcaacgaattaccattgagccagggacatcatataggctgcaaggactgaaaccaaacagcttatactatttccgtctggctgcacgctcccctcaaggcctgggtgcttctactgcagaaatatcagctagaaccatgcagtcaaagccgtcagctcctcctcaagacattagttgcaccagcccaagttccactagtattttggtaagttggcaacctccaccagtggaaaaacagaatggcattatcactgaatactccatcaagtacactgcagtggatggggaagatgacaagcctcacgagattttgggaattccttcggacactaccaaataccttttggaacagctggaaaaatggactgaataccggatcactgtgacagcccatacagatgtcggccctggccctgagagcttgtccgtgttgattcgaaccaatgaagatgttcctagtggtcctcctcgcaaagtcgaggtagaggctgtcaactcaacatctgttaaagtctcatggcgctcacccgtgcccaataaacagcatggccagataagaggatatcaggtgcattatgtgaggatggaaaatggtgagcccaagggccagcccatgctgaaagatgtcatgctggctgatgcacaggacatgatcatttctgggctccagcctgaaacttcctactccctcaccgtcacagcctacacaaccaaaggagatggtgctcgcagcaagcccaaactggtgtccaccactggggcagttccagggaaacctcggcttgtgattaaccacactcagatgaatactgctcttattcagtggcaccctccggtggacacatttggacctcttcagggctaccgtctaaaatttggccgcaaggatatggagccacttactactcttgagttctctgaaaaagaagatcactttacagctacagacatccacaagggagcatcatacgtcttcaggctctcagccagaaacaaagtgggctttggggaggagatggtgaaggagatttccattccagaagaagtaccaactggattccctcaaaaccttcactcagaaggcaccacttcaacctccgtccagttatcttggcaaccacctgtcctggcagagagaaatggcattatcaccaagtatacccttctttatagggatatcaacatcccccttctcccgatggagcagcttattgttccagctgacaccactatgacactcactggcttaaaaccagataccacatacgatgtaaaagtacgtgctcatacgagcaaagggcccgggccatatagtcccagtgtccagttcaggacactgcctgtggatcaagtgtttgcaaaaaattttcatgtcaaagcagtaatgaagacttccgtgttgctgtcttgggagattccagagaattataactccgccatgcctttcaaaattctttatgatgatgggaaaatggtagaagaagtggatggccgagccacacagaagttaattgtcaacctgaagcctgagaaatcatattcatttgtgctgacaaatcgtggaaacagtgctggtgggctgcagcacagggtcacggcaaagactgcaccagatgtattacgtaccaagcctgccttcattgggaagaccaacttggatggcatgattactgtgcaactgcctgaagtacctgcaaatgagaatataaaaggttactacataataattgtgcctttgaagaaatctcgcgggaaatttatcaagccatgggagagtccagatgaaatggaattagatgagctgcttaaggagatatctaggaagcgcagaagcatccgttatgggagagaagttgaattaaagccatatattgccgctcactttgatgtccttcccactgagttcaccctgggggatgacaagcattatggtggatttacaaacaagcaactccaaagtggtcaagaatatgtcttctttgtgttagcagtaatggaacatgcagagtctaagatgtatgcaaccagcccttactccgaccccgtggtgtcaatggatctggatccgcagccaatcacggatgaagaagaaggcttgatctgggttgtaggtcctgtccttgcagtggtctttatcatctgcattgtcattgctattcttctttataaaaggaagagggcagagtccgactctagaaaaagcagcataccgaacaataaggagatcccttcacaccacccaacagaccctgtagaactgaggcgccttaactttcaaacaccgggtatggctagccatcctccaatacccatcttggaacttgcagaccacattgaaagattgaaagcaaatgacaacttgaagttttcccaggaatatgagtcaattgaccctggccagcagttcacttgggaacattcaaacttggaagtaaacaaaccaaagaatagatacgcgaatgtaatcgcatatgatcattcccgggttctcctatcagctatagaagggatcccaggaagtgactatgtgaatgccaactacatagatgggtataggaagcaaaatgcctatattgcaacacagggatctctccccgaaacatttggggacttttggagaatgatatgggaacaacggagtgccacagttgtcatgatgacaaaactagaagaaagatcaagggtgaagtgtgaccagtattggcctagcagaggcacagaaacccacggactcgttcaagtaacgctgcttgatactgtggagctggccacatattgtgttcgaacatttgcactttacaagaatggttcaagtgagaagagagaagtgagacaattccagttcaccgcctggcctgatcatggtgttccagaacaccctacaccttttctagctttcttacgtagagtcaaaacctgtaaccctcccgatgctggtccgatggttgtgcactgcagtgcgggagttggccggactggttgcttcatcgtcatagatgccatgttagaaagaataaagcatgaaaaaactgtagatatttatggccatgtaactttaatgagagcccagaggaactatatggttcaaacagaagaccaatacatctttatccatgatgcactgttagaagcagtgacttgtggaaataccgaagtgccagctagaaacttgtatgcctacattcagaagctgacacaaatagaaacgggagagaatgtcacaggaatggagctcgaatttaagcgtctagccagctcaaaagctcacacctcaaggtttatcagtgccaatcttccatgtaataaattcaaaaatcgccttgttaatattatgccatatgaatccacaagggtatgcctgcagcctatccgtggagtagaaggatctgattacatcaatgccagttttattgatggatacagacaacagaaagcctacatcgctacccaggggcccttggcagagaccactgaagacttctggcggatgctctgggaacacaattccaccatagttgtgatgctcaccaagctgcgtgaaatgggcagagagaaatgtcaccaatactggccagcagaacggtctgcaagataccagtactttgttgtagatcccatggctgagtacaacatgccacagtatatcctaagggaattcaaggtcacagatgccagggacggccagtcccgaacagtaaggcagttccagttcactgactggccagagcaaggagtgccaaagtccggagaaggatttattgacttcatcggccaagtccataaaacaaaagaacagtttggccaagatggacccatttcagtccattgcagcgcgggcgttggaagaactggagtcttcataacgctaagcattgttttggaaagaatgagatatgaaggagttgtagatatcttccagactgtcaaaatgttaagaacacaacgaccagctatggtacagacagaggatcaatatcagttttcctatcgtgccgcactagagtacctgggcagctttgaccactatgcaacgtagaaacccctgacccattctggatttttactacaggcccttcaatatccatggagtctcttctgagccatacagggcacttgagaagtccttcttaacttctagctaacaactacttagtgggactattacacacaaaacaaattaaaaacaaattattccaggtggaccaagaattcacagtttaataatctaacctgaaaaataatgaagagaatcctgactgatgaggcatctgaaggattttatttacagatacctcaaggattcaaaatcaagggaagaagaaatcacagcaaagaaccaccatcttattcaggattgcttgaaaggtgcaaggagaaattgccagaatgctgcagttcagcacaagatatgtgctggtgtggcttctcacaatgaaacggactctgctttgacatcgccccttcccaccatactgctcataataacattttagggggaaaggggagggaatgtttaaaaagaaagtccttgatttagttttttagtattgtaaagatactgctgacctgtgcttcatttctaactgtgtaaacttttttttaacaaaatgtatcattcgataaagtgaattttaaaaaagttacataactcttcatttttttatttccaaatcgtaggtttttttaagctgtagaactgttatctgtaatatcttgctgtagaaatatcaaatcatttgaaaatttgcacatttttgtgcaaaactcaatctacagtatcagtctcgtcagatatattaattttacacttcagttttgattggtgagaaagtacccattctcttcaaataatcaaagataattattattttgttttgtttttggaatcaacagggaggcgcaaagtataaagttgctgctaacatatatacatatatatccatattttataagggtgtctatgtatatatagacagtgtgtccacacaaaaaatagatacagttatcagtcagtcagttcttccatgatttagtttttttaaacgtagaaaagctattgtaaacatctctttccatttattcttaattttttgacatattggtatttctttaaagggaaatgaggaatgcacatcagtgattgattgtcaaacctcaccccctgatttcctacctaatctacccccacctaaccaatcaatcacatccacaaattgttttgtttgtttgttagtcaggcttccaacaaagttcaatatttctaacactctagtgcaataaaaattattattaaatagctaagaggtgtgcatgtgggaaaggtcagtgcatatccctttaggaggggagaatgttgtaatatatcagctatcgagttgtttaaaaaaagtgtattcaatcgtatattgtctatagtatgtgctatgaaatttgcatttatgatatgtaacaggggcaaagccaaattcatgttactctgttcagtcagaaacattttgtggcatacagcattcctgggaagtgctgtactttgtttcgttttggttttagttttgcatttagagtgccttataattgatgcctattttaatagcatttctttttagcttttggttcgtatttccattcactgttcgtatctgttactttctattaaagcattatctgtttaccacatgtacaaaaactctttgaataatatgcattcctagttttcagccaagtcggggatgttagtgattgtaccagcccaaagcacttggataatcagggcccttcttccttttataatcaatcatcaacatcagaaaaagctacttgttttatttatattcccttccaaatccgctctggaacatgcagtaactgcaccaaacttattttagtaacaaatatcattggcaactttggaatatatttgatattccattaggatttttctaaaaggggaaataaactatatatatatatgtatcttacccccaattcttccaacagaatttctataggaagccatggatgatggcataagtttgccacatattacatgattttaaataatcctcaaaatacccaaggaactcttaaagagttttggtatgagtatactactttggtttaattttagcttcatggatgttctgcatggaaggatttttgttttccacattttcccattgctagcagagtgaaatccaagagaccaaacatttgcaagcattgtatttgagcacttttgtaaaaaacaaagaaaaagaaaaaaaagaaaatatatataatactaaaaaaaagtatctagaaggctacctcagaatgagactctctaacctacatcagaaccagagaagaatgtgcactatgtgggtctgttatcattattttcttttagtttgtatctttttggagatttatccaagtgccagattactcagtgctataattttcttttagttaaacaaagggggtcagacagacattgcatcatccagacatgccttgttggacatgtagaatccgatggagcactgcacaccagaatgattggccaatgagcagcttctctccctgaaacaataactgcccatttggcaaagggaaagatgacaataatcagaagaagaaaatgaatgggatgcataccatagacgaacgaggcggagactattgcgggaatcttactgttcaggagctgttcctagaactaactcccttactgtcattgatgtgcattccactctgtgcttttctgtacaaccattcaagttttaatttcccaggtgaaccatctttatctgccattaccacaagctttcaagtttccagttattttcatcatcataaccagtacggtgctattatttacctatgtacgtgtagttatgtataattttgtaattagttacaatggtaaaaaaaatcaaaatatataaaaagtgatttgtacagaactttattttagctcttttttaaaaatgatttgcatggttagaaaacggcgaggacagccaggggagggaagggcctctagggaactttgcactttctatacctttgtactatgcactgccctattgattctacacccaataatgatattacttgaacccatctgtaagaaactgcttcggaaattcatttgtgtgtatgtaaataacacaacatagaaacaggaagggaaaaaagtctgcagtaatgcacgtattttttttctttcctgtttattttcggttttgctttaagtccttttatttttaattccctttttgtttttctttttgggttttggttccttttgggtttatgggtgccctgatactccagcagagatcagaaggctacagatccattctatccatccgttatgtggctttgccatcccagcttggagtgtctttacaaagataataacagttgtgttctttgctctcgttttggatgcatagactgaaaaattaaaacaaataacttgtaaaatggcttgttaaaaaatacaattacctctaattagtagtacgcgtaaatgttttacagaatgaaaggcgtgctttttattttcttacttcgttacattggtggcgaaagaagtctgtatgaaaatcagttctttgctgacacaagttccatttgttacaaatgaattctaataaaaatgtcagtgttatgca

SEQ ID NO: 593 - protein, 1903 aa, Homo sapiens
MVHVARLLLLLLTFFLRTDAETPPRFTRTPVDQTGVSGGVASFICQATGDPRPKIVWNKKGKKVSNQRFEVIEFDDGSGSVLRIQPLRTPRDEAIYECVASNNVGEISVSTRLTVLREDQIPRGFPTIDMGPQLKVVERTRTATMLCAASGNPDPEITWFKDFLPVDTSNNNGRIKQLRSESIGGTPIRGALQIEQSEESDQGKYECVATNSAGTRYSAPANLYVRELREVRRVPPRFSIPPTNHEIMPGGSVNITCVAVGSPMPYVKWMLGAEDLTPEDDMPIGRNVLELNDVRQSANYTCVAMSTLGVIEAIAQITVKALPKPPGTPVVTESTATSITLTWDSGNPEPVSYYIIQHKPKNSEELYKEIDGVATTRYSVAGLSPYSDYEFRVVAVNNIGRGPPSEPVLTQTSEQAPSSAPRDVQARMLSSTTILVQWKEPEEPNGQIQGYRVYYTMDPTQHVNNWMKHNVADSQITTIGNLVPQKTYSVKVLAFTSIGDGPLSSDIQVITQTGVPGQPLNFKAEPESETSILLSWTPPRSDTIANYELVYKDGEHGEEQRITIEPGTSYRLQGLKPNSLYYFRLAARSPQGLGASTAEISARTMQSKPSAPPQDISCTSPSSTSILVSWQPPPVEKQNGIITEYSIKYTAVDGEDDKPHEILGIPSDTTKYLLEQLEKWTEYRITVTAHTDVGPGPESLSVLIRTNEDVPSGPPRKVEVEAVNSTSVKVSWRSPVPNKQHGQIRGYQVHYVRMENGEPKGQPMLKDVMLADAQDMIISGLQPETSYSLTVTAYTTKGDGARSKPKLVSTTGAVPGKPRLVINHTQMNTALIQWHPPVDTFGPLQGYRLKFGRKDMEPLTTLEFSEKEDHFTATDIHKGASYVFRLSARNKVGFGEEMVKEISIPEEVPTGFPQNLHSEGTTSTSVQLSWQPPVLAERNGIITKYTLLYRDINIPLLPMEQLIVPADTTMTLTGLKPDTTYDVKVRAHTSKGPGPYSPSVQFRTLPVDQVFAKNFHVKAVMKTSVLLSWEIPENYNSAMPFKILYDDGKMVEEVDGRATQKLIVNLKPEKSYSFVLTNRGNSAGGLQHRVTAKTAPDVLRTKPAFIGKTNLDGMITVQLPEVPANENIKGYYIIIVPLKKSRGKFIKPWESPDEMELDELLKEISRKRRSIRYGREVELKPYIAAHFDVLPTEFTLGDDKHYGGFTNKQLQSGQEYVFFVLAVMEHAESKMYATSPYSDPVVSMDLDPQPITDEEEGLIWVVGPVLAVVFIICIVIAILLYKRKRAESDSRKSSIPNNKEIPSHHPTDPVELRRLNFQTPGMASHPPIPILELADHIERLKANDNLKFSQEYESIDPGQQFTWEHSNLEVNKPKNRYANVIAYDHSRVLLSAIEGIPGSDYVNANYIDGYRKQNAYIATQGSLPETFGDFWRMIWEQRSATVVMMTKLEERSRVKCDQYWPSRGTETHGLVQVTLLDTVELATYCVRTFALYKNGSSEKREVRQFQFTAWPDHGVPEHPTPFLAFLRRVKTCNPPDAGPMVVHCSAGVGRTGCFIVIDAMLERIKHEKTVDIYGHVTLMRAQRNYMVQTEDQYIFIHDALLEAVTCGNTEVPARNLYAYIQKLTQIETGENVTGMELEFKRLASSKAHTSRFISANLPCNKFKNRLVNIMPYESTRVCLQPIRGVEGSDYINASFIDGYRQQKAYIATQGPLAETTEDFWRMLWEHNSTIVVMLTKLREMGREKCHQYWPAERSARYQYFVVDPMAEYNMPQYILREFKVTDARDGQSRTVRQFQFTDWPEQGVPKSGEGFIDFIGQVHKTKEQFGQDGPISVHCSAGVGRTGVFITLSIVLERMRYEGVVDIFQTVKMLRTQRPAMVQTEDQYQFSYRAALEYLGSFDHYAT

SEQ ID NO: 594 - DNA, 8845 bp, Homo sapiens
gcagtttattctgggcctgtgtggaatagaaagacaattctttatttgactggtaggaaagaaaagagaagactcctcagggtttccaaggaggactggagcggctgctttagtgaagaagtgaagaatcaaggaagtaaaggacctgtctcaaagtcacacaactaggaaatcttgaggagtctgatacttttcatcctccagctataaaatcatcttgtagggggaagctgtacattggtggaaaataaaaggcaagcagttcctggcccgtgatattccagttagaggtgtctgactgacagcatgttggcaccgagggaagcgatgggcttcggctccaggtttctgtcctgagaccacagcagaatgtgccttggacaaaggcttggactccttgatcttctggtaacttcaaaaatctggtctcagggtggtgaactttttcttcgaattcctaacctgtgagcttacgatgatggtgcctgtccattaactgaacaactgtggttttgaacttcttgaggccagggactgtgtctgaaaacaccgacggtggctaactcaagggagacgtctggtgaacacccgtgggatctaaagaacaagctctgaaagtgttccagctgaaatttcagatcggacagactcgctgcggctccggaggcagtgattccaagctgctcgcgcacgctgctgccaagctgcaggatggtgcacgtagccaggctgctgctgctgctcctcactttcttcctccgcacggatgctgagacacctccaaggtttacacgaacacccgttgatcagacaggggtctctggcggagttgcctctttcatctgccaagctacgggagacccaagacctaaaattgtctggaacaaaaaaggaaagaaagtcagcaatcagagatttgaggtaatagagtttgacgatgggtctggatcagttctcagaatacaacccttacggactccgagggatgaggccatttatgaatgtgtggcctcaaataatgtgggagaaataagtgtatccaccagactcacagttttgcgggaagatcaaattcccaggggcttccctaccattgacatgggcccacagttgaaggtggttgagcgtactcgcacggccaccatgctttgtgcagccagtggtaatccggatccagaaatcacttggtttaaagatttcttacctgtggacacaagcaacaacaatggtcgtattaagcagttacgatcagaatctattggtggtacaccaataagaggagcccttcagattgagcagagtgaagagtctgaccaaggaaaatatgagtgtgttgccaccaacagcgcgggcactcgctattccgctcctgccaatttatatgtcagagagctgcgagaagttcgccgtgtcccaccaagattctctatcccacccactaatcatgaaatcatgccaggcggaagcgttaatatcacctgtgtggccgtggggtcaccaatgccttatgtaaagtggatgttgggggcagaagatctgacacctgaagatgatatgccaataggaagaaatgtgctagaactgaatgatgtaagacagtcagcaaattacacctgtgttgctatgtcaacactgggtgtcattgaagcaatagcacagatcactgtcaaagccttacccaaacctccaggaactcctgtagtgaccgagagcacagctacaagcatcacactgacgtgggactctgggaaccctgagcctgtttcttattacataattcagcataaacctaaaaactctgaggaactttacaaagaaattgatggggtggcgaccacacgctacagtgtcgctggactaagtccctactcggattatgaattcagggttgttgctgtcaataacattgggcgggggcctcccagcgaacctgtgctaacacaaacctcagagcaagcaccatccagtgccccgagggatgtccaggcacgaatgttgagttcgaccaccattttggtacagtggaaggaacctgaagagccaaatggacagatccaaggatatagagtttattatacaatggatcccactcaacatgtcaacaactggatgaaacacaatgtagctgacagccaaatcactactattggcaacttagtgccccagaaaacatattctgtcaaagtcctggcttttacctcaattggagatggtcccctttcaagtgacatacaagtcatcactcagacaggagtaccagggcagccactaaacttcaaagcagaacctgagtctgaaacaagtattttgctctcttggacacctccacgttcagataccattgccaactatgaactggtctacaaagatggggagcatggagaggagcaacgaattaccattgagccagggacatcatataggctgcaaggactgaaaccaaacagcttatactatttccgtctggctgcacgctcccctcaaggcctgggtgcttctactgcagaaatatcagctagaaccatgcagtcaatgtttgcaaaaaattttcatgtcaaagcagtaatgaagacttccgtgttgctgtcttgggagattccagagaattataactccgccatgcctttcaaaattctttatgatgatgggaaaatggtagaagaagtggatggccgagccacacagaagttaattgtcaacctgaagcctgagaaatcatattcatttgtgctgacaaatcgtggaaacagtgctggtgggctgcagcacagggtcacggcaaagactgcaccagatgtattacgtaccaagcctgccttcattgggaagaccaacttggatggcatgattactgtgcaactgcctgaagtacctgcaaatgagaatataaaaggttactacataataattgtgcctttgaagaaatctcgcgggaaatttatcaagccatgggagagtccagatgaaatggaattagatgagctgcttaaggagatatctaggaagcgcagaagcatccgttatgggagagaagttgaattaaagccatatattgccgctcactttgatgtccttcccactgagttcaccctgggggatgacaagcattatggtggatttacaaacaagcaactccaaagtggtcaagaatatgtcttctttgtgttagcagtaatggaacatgcagagtctaagatgtatgcaaccagcccttactccgaccccgtggtgtcaatggatctggatccgcagccaatcacggatgaagaagaaggcttgatctgggttgtaggtcctgtccttgcagtggtctttatcatctgcattgtcattgctattcttctttataaaaggaagagggcagagtccgactctagaaaaagcagcataccgaacaataaggagatcccttcacaccacccaacagaccctgtagaactgaggcgccttaactttcaaacaccgggtatggctagccatcctccaatacccatcttggaacttgcagaccacattgaaagattgaaagcaaatgacaacttgaagttttcccaggaatatgagtcaattgaccctggccagcagttcacttgggaacattcaaacttggaagtaaacaaaccaaagaatagatacgcgaatgtaatcgcatatgatcattcccgggttctcctatcagctatagaagggatcccaggaagtgactatgtgaatgccaactacatagatgggtataggaagcaaaatgcctatattgcaacacagggatctctccccgaaacatttggggacttttggagaatgatatgggaacaacggagtgccacagttgtcatgatgacaaaactagaagaaagatcaagggtgaagtgtgaccagtattggcctagcagaggcacagaaacccacggactcgttcaagtaacgctgcttgatactgtggagctggccacatattgtgttcgaacatttgcactttacaagaatggttcaagtgagaagagagaagtgagacaattccagttcaccgcctggcctgatcatggtgttccagaacaccctacaccttttctagctttcttacgtagagtcaaaacctgtaaccctcccgatgctggtccgatggttgtgcactgcagtgcgggagttggccggactggttgcttcatcgtcatagatgccatgttagaaagaataaagcatgaaaaaactgtagatatttatggccatgtaactttaatgagagcccagaggaactatatggttcaaacagaagaccaatacatctttatccatgatgcactgttagaagcagtgacttgtggaaataccgaagtgccagctagaaacttgtatgcctacattcagaagctgacacaaatagaaacgggagagaatgtcacaggaatggagctcgaatttaagcgtctagccagctcaaaagctcacacctcaaggtttatcagtgccaatcttccatgtaataaattcaaaaatcgccttgttaatattatgccatatgaatccacaagggtatgcctgcagcctatccgtggagtagaaggatctgattacatcaatgccagttttattgatggatacagacaacagaaagcctacatcgctacccaggggcccttggcagagaccactgaagacttctggcggatgctctgggaacacaattccaccatagttgtgatgctcaccaagctgcgtgaaatgggcagagagaaatgtcaccaatactggccagcagaacggtctgcaagataccagtactttgttgtagatcccatggctgagtacaacatgccacagtatatcctaagggaattcaaggtcacagatgccagggacggccagtcccgaacagtaaggcagttccagttcactgactggccagagcaaggagtgccaaagtccggagaaggatttattgacttcatcggccaagtccataaaacaaaagaacagtttggccaagatggacccatttcagtccattgcagcgcgggcgttggaagaactggagtcttcataacgctaagcattgttttggaaagaatgagatatgaaggagttgtagatatcttccagactgtcaaaatgttaagaacacaacgaccagctatggtacagacagaggatcaatatcagttttcctatcgtgccgcactagagtacctgggcagctttgaccactatgcaacgtagaaacccctgacccattctggatttttactacaggcccttcaatatccatggagtctcttctgagccatacagggcacttgagaagtccttcttaacttctagctaacaactacttagtgggactattacacacaaaacaaattaaaaacaaattattccaggtggaccaagaattcacagtttaataatctaacctgaaaaataatgaagagaatcctgactgatgaggcatctgaaggattttatttacagatacctcaaggattcaaaatcaagggaagaagaaatcacagcaaagaaccaccatcttattcaggattgcttgaaaggtgcaaggagaaattgccagaatgctgcagttcagcacaagatatgtgctggtgtggcttctcacaatgaaacggactctgctttgacatcgccccttcccaccatactgctcataataacattttagggggaaaggggagggaatgtttaaaaagaaagtccttgatttagttttttagtattgtaaagatactgctgacctgtgcttcatttctaactgtgtaaacttttttttaacaaaatgtatcattcgataaagtgaattttaaaaaagttacataactcttcatttttttatttccaaatcgtaggtttttttaagctgtagaactgttatctgtaatatcttgctgtagaaatatcaaatcatttgaaaatttgcacatttttgtgcaaaactcaatctacagtatcagtctcgtcagatatattaattttacacttcagttttgattggtgagaaagtacccattctcttcaaataatcaaagataattattattttgttttgtttttggaatcaacagggaggcgcaaagtataaagttgctgctaacatatatacatatatatccatattttataagggtgtctatgtatatatagacagtgtgtccacacaaaaaatagatacagttatcagtcagtcagttcttccatgatttagtttttttaaacgtagaaaagctattgtaaacatctctttccatttattcttaattttttgacatattggtatttctttaaagggaaatgaggaatgcacatcagtgattgattgtcaaacctcaccccctgatttcctacctaatctacccccacctaaccaatcaatcacatccacaaattgttttgtttgtttgttagtcaggcttccaacaaagttcaatatttctaacactctagtgcaataaaaattattattaaatagctaagaggtgtgcatgtgggaaaggtcagtgcatatccctttaggaggggagaatgttgtaatatatcagctatcgagttgtttaaaaaaagtgtattcaatcgtatattgtctatagtatgtgctatgaaatttgcatttatgatatgtaacaggggcaaagccaaattcatgttactctgttcagtcagaaacattttgtggcatacagcattcctgggaagtgctgtactttgtttcgttttggttttagttttgcatttagagtgccttataattgatgcctattttaatagcatttctttttagcttttggttcgtatttccattcactgttcgtatctgttactttctattaaagcattatctgtttaccacatgtacaaaaactctttgaataatatgcattcctagttttcagccaagtcggggatgttagtgattgtaccagcccaaagcacttggataatcagggcccttcttccttttataatcaatcatcaacatcagaaaaagctacttgttttatttatattcccttccaaatccgctctggaacatgcagtaactgcaccaaacttattttagtaacaaatatcattggcaactttggaatatatttgatattccattaggatttttctaaaaggggaaataaactatatatatatatgtatcttacccccaattcttccaacagaatttctataggaagccatggatgatggcataagtttgccacatattacatgattttaaataatcctcaaaatacccaaggaactcttaaagagttttggtatgagtatactactttggtttaattttagcttcatggatgttctgcatggaaggatttttgttttccacattttcccattgctagcagagtgaaatccaagagaccaaacatttgcaagcattgtatttgagcacttttgtaaaaaacaaagaaaaagaaaaaaaagaaaatatatataatactaaaaaaaagtatctagaaggctacctcagaatgagactctctaacctacatcagaaccagagaagaatgtgcactatgtgggtctgttatcattattttcttttagtttgtatctttttggagatttatccaagtgccagattactcagtgctataattttcttttagttaaacaaagggggtcagacagacattgcatcatccagacatgccttgttggacatgtagaatccgatggagcactgcacaccagaatgattggccaatgagcagcttctctccctgaaacaataactgcccatttggcaaagggaaagatgacaataatcagaagaagaaaatgaatgggatgcataccatagacgaacgaggcggagactattgcgggaatcttactgttcaggagctgttcctagaactaactcccttactgtcattgatgtgcattccactctgtgcttttctgtacaaccattcaagttttaatttcccaggtgaaccatctttatctgccattaccacaagctttcaagtttccagttattttcatcatcataaccagtacggtgctattatttacctatgtacgtgtagttatgtataattttgtaattagttacaatggtaaaaaaaatcaaaatatataaaaagtgatttgtacagaactttattttagctcttttttaaaaatgatttgcatggttagaaaacggcgaggacagccaggggagggaagggcctctagggaactttgcactttctatacctttgtactatgcactgccctattgattctacacccaataatgatattacttgaacccatctgtaagaaactgcttcggaaattcatttgtgtgtatgtaaataacacaacatagaaacaggaagggaaaaaagtctgcagtaatgcacgtattttttttctttcctgtttattttcggttttgctttaagtccttttatttttaattccctttttgtttttctttttgggttttggttccttttgggtttatgggtgccctgatactccagcagagatcagaaggctacagatccattctatccatccgttatgtggctttgccatcccagcttggagtgtctttacaaagataataacagttgtgttctttgctctcgttttggatgcatagactgaaaaattaaaacaaataacttgtaaaatggcttgttaaaaaatacaattacctctaattagtagtacgcgtaaatgttttacagaatgaaaggcgtgctttttattttcttacttcgttacattggtggcgaaagaagtctgtatgaaaatcagttctttgctgacacaagttccatttgttacaaatgaattctaataaaaatgtcagtgttatgca

SEQ ID NO: 595 - protein, 1501 aa, Homo sapiens
MVHVARLLLLLLTFFLRTDAETPPRFTRTPVDQTGVSGGVASFICQATGDPRPKIVWNKKGKKVSNQRFEVIEFDDGSGSVLRIQPLRTPRDEAIYECVASNNVGEISVSTRLTVLREDQIPRGFPTIDMGPQLKVVERTRTATMLCAASGNPDPEITWFKDFLPVDTSNNNGRIKQLRSESIGGTPIRGALQIEQSEESDQGKYECVATNSAGTRYSAPANLYVRELREVRRVPPRFSIPPTNHEIMPGGSVNITCVAVGSPMPYVKWMLGAEDLTPEDDMPIGRNVLELNDVRQSANYTCVAMSTLGVIEAIAQITVKALPKPPGTPVVTESTATSITLTWDSGNPEPVSYYIIQHKPKNSEELYKEIDGVATTRYSVAGLSPYSDYEFRVVAVNNIGRGPPSEPVLTQTSEQAPSSAPRDVQARMLSSTTILVQWKEPEEPNGQIQGYRVYYTMDPTQHVNNWMKHNVADSQITTIGNLVPQKTYSVKVLAFTSIGDGPLSSDIQVITQTGVPGQPLNFKAEPESETSILLSWTPPRSDTIANYELVYKDGEHGEEQRITIEPGTSYRLQGLKPNSLYYFRLAARSPQGLGASTAEISARTMQSMFAKNFHVKAVMKTSVLLSWEIPENYNSAMPFKILYDDGKMVEEVDGRATQKLIVNLKPEKSYSFVLTNRGNSAGGLQHRVTAKTAPDVLRTKPAFIGKTNLDGMITVQLPEVPANENIKGYYIIIVPLKKSRGKFIKPWESPDEMELDELLKEISRKRRSIRYGREVELKPYIAAHFDVLPTEFTLGDDKHYGGFTNKQLQSGQEYVFFVLAVMEHAESKMYATSPYSDPVVSMDLDPQPITDEEEGLIWVVGPVLAVVFIICIVIAILLYKRKRAESDSRKSSIPNNKEIPSHHPTDPVELRRLNFQTPGMASHPPIPILELADHIERLKANDNLKFSQEYESIDPGQQFTWEHSNLEVNKPKNRYANVIAYDHSRVLLSAIEGIPGSDYVNANYIDGYRKQNAYIATQGSLPETFGDFWRMIWEQRSATVVMMTKLEERSRVKCDQYWPSRGTETHGLVQVTLLDTVELATYCVRTFALYKNGSSEKREVRQFQFTAWPDHGVPEHPTPFLAFLRRVKTCNPPDAGPMVVHCSAGVGRTGCFIVIDAMLERIKHEKTVDIYGHVTLMRAQRNYMVQTEDQYIFIHDALLEAVTCGNTEVPARNLYAYIQKLTQIETGENVTGMELEFKRLASSKAHTSRFISANLPCNKFKNRLVNIMPYESTRVCLQPIRGVEGSDYINASFIDGYRQQKAYIATQGPLAETTEDFWRMLWEHNSTIVVMLTKLREMGREKCHQYWPAERSARYQYFVVDPMAEYNMPQYILREFKVTDARDGQSRTVRQFQFTDWPEQGVPKSGEGFIDFIGQVHKTKEQFGQDGPISVHCSAGVGRTGVFITLSIVLERMRYEGVVDIFQTVKMLRTQRPAMVQTEDQYQFSYRAALEYLGSFDHYAT

SEQ ID NO: 596 - DNA, 2300 bp, Homo sapiens
ctctgccaggctcacgggacagctgcacctctcagcgtctccagctccaggacgcggtcgtcccaactccttccgagtggaaagagtgtaaaacttttgtccgtgcgcgggtggagctcagtaggaccacggcgcgtcctgccccggcttccccagcctcccagcagggttagctgcggtcagcgcactttccacttgggactcccggccagaaatttctcgggaatggagcggtcacagtgtggcagcagagaccgaggcgttagcggccgacctcacttggcccctgggctagtggtggctgcccctccgcccccgtccccggcgttgccggtaccatcggggatgcaggttcccccagcgttcctgcggccgcccagcctctttctgcgagcagcggccgcggccgccgccgccgctgccgccacctcgggaagcggaggctgcccgccggctcccgggctggagagcggggtaggcgcggtgggctgcggctacccgcggacgcccaagtgcgcccgctgtcgtaaccatggtgtggtgtcagcgctcaagggccacaagcgcttctgccgctggcgggactgcgcgtgtgccaagtgcaccctgatcgccgagcgccagcgcgtcatggccgcccaggtggcgctgcgcaggcagcaggcgcaggaggagagcgaagctcgggggctacagaggctcctgtgctcggggctctcctggccccccggtggtcgggcatccgggggcggcggcagagccgagaatccacagtccacgggcggccctgcggcgggggctgcgctgggactgggtgccttgagacaggccagtggttccgcgacccccgctttcgaatttttccagcaagattatcctgaggaaaaacaagaacaaaaagagagtaaatgtgagtcatgccagaatggacaagaagaactgatctccaaatcccatcagctttacctaggatcatcttctaggtctaatggtgtcattgggaaacaaagtatcgggtcatctatttcagaatactccaacaagcctgatagtatcctgtctcctcatcctggagagcaatcaggaggtgaagagagtcccaggtccttatcatcctctgatctggaatcaggaaatgaaagtgaatgggtcaaagacttgacttcgaccaaggcaagccttccgacagtgtcctcaagaccaagagatcctcttgatatccttactaagattttcccaaattacaggcgcagccggctagaaggcattctacggttctgcaaaggggatgtggtccaagccattgaacaggttttaaatggcaaagaacacaagccagacaacaggaacctagcaaactcagaagaactggaaaacacagcctttcagagagcttcaagttttagtcttgctggaattggttttggaactctaggtaataaatcagctttctctcctcttcaaactacttctgcttcttatggaggtgattcaagtctctacggcgtaaatcctagagtaggtatcagtccattaaggctggcatattcttctgcaggaagagggttatctggttttatgtcaccctacctaacacctgggttagtaccaaccttaccttttcggccagctttggattatgccttttcagggatgattagagattcttcctacctttccagtaaagactcaataacttgtggcagactgtacttcagaccaaatcaggacaatccgtaatgtatatgcccattctctctttctggagtttttccagcatacaatacatgcacgtgcacacacatacacacacatccattaatatacttcagtaagtatgtgagtggattatgaggtcttaaaatgctgggttttttttttcaagcaatataataggtcttagatctgaaaactcttcattaggatttatcaagtgaaagaagtaaatctgaacattatatgtgccttgaataaagctatttcaggaaatatttaatgaattttctccctaaattatcatttgtaaacatttttattttaaaactagtttttattttattgaaaagtggaatttttagtgataaaatacatttgtaagtgtaaagcaatacagcataatagaatagaatataaaccgaaaggaagaactgaacaattaaggcaattctatataattaccatttcaaaactgtttcttctattcctggttcataggaaagaaaaaagttattcaaagtatttttaaagcatttgatttgcagatgggtgattcgtaataaataaaacatttgagcattttg

SEQ ID NO: 597 - protein, 504 aa, Homo sapiens
MERSQCGSRDRGVSGRPHLAPGLVVAAPPPPSPALPVPSGMQVPPAFLRPPSLFLRAAAAAAAAAAATSGSGGCPPAPGLESGVGAVGCGYPRTPKCARCRNHGVVSALKGHKRFCRWRDCACAKCTLIAERQRVMAAQVALRRQQAQEESEARGLQRLLCSGLSWPPGGRASGGGGRAENPQSTGGPAAGAALGLGALRQASGSATPAFEFFQQDYPEEKQEQKESKCESCQNGQEELISKSHQLYLGSSSRSNGVIGKQSIGSSISEYSNKPDSILSPHPGEQSGGEESPRSLSSSDLESGNESEWVKDLTSTKASLPTVSSRPRDPLDILTKIFPNYRRSRLEGILRFCKGDVVQAIEQVLNGKEHKPDNRNLANSEELENTAFQRASSFSLAGIGFGTLGNKSAFSPLQTTSASYGGDSSLYGVNPRVGISPLRLAYSSAGRGLSGFMSPYLTPGLVPTLPFRPALDYAFSGMIRDSSYLSSKDSITCGRLYFRPNQDNP

SEQ ID NO: 598 - DNA, 2792 bp, Homo sapiens
aatttagagaagatgtagggagtgttcaacatgttcgttgtggaagagaaagagctaagagagaggagcttaaagacacaaacgggtagaatcaaggagtgtgctctcaaatgagaggaacaggagtgacattaaccttgaaatgctcggagactctactccttcatgacagtaggaggataattaacaatagatacaaatgcaggaattgatgagtgccatcagaaagctgtatcatgagctgcctgcacttctaaagtgtccagtggatttttaatcacatgagcctggaaatagggttatgaaaagaagctcagagcagagcaccgaaagtggccactaccagcatgaagagcccaacaattcaaactggtgaagtgagaaaaacagaatgcagctttcaaggttcgtttcaagcagttggcttgtgggactctgagagatgctgctgcccatgacatgcgggaattatcatgatcaactacccagcttggatttcatccagtggccaagagctttgtgtgggagacggcaagggttggatttttcaaaagagtaaaccaggataaatcatgaggaacctataacccttttggccacatgcaaaaaagcaagacccgtgaccaaggtgtagactaagaagtggagtcatgcttcacacggccatatcatgctggcagccattcctgggtctggctgtggtgttaatcttcatgggatccaccattggctgccccgctcgctgtgagtgctctgcccagaacaaatctgttagctgtcacagaaggcgattgatcgccatcccagagggcattcccatcgaaaccaaaatcttggacctcagtaaaaacaggctaaaaagcgtcaaccctgaagaattcatatcatatcctctgctggaagagatagacttgagtgacaacatcattgccaatgtggaaccaggagcattcaacaatctctttaacctgcgttccctccgcctaaaaggcaatcgtctaaagctggtccctttgggagtattcacggggctgtccaatctcactaagcttgacattagtgagaataagattgtcattttactagactacatgttccaagatctacataacctgaagtctctagaagtgggggacaatgatttggtttatatatcacacagggcattcagtgggcttcttagcttggagcagctcaccctggagaaatgcaacttaacagcagtaccaacagaagccctctcccacctccgcagcctcatcagcctgcatctgaagcatctcaatatcaacaatatgcctgtgtatgcctttaaaagattgttccacctgaaacacctagagattgactattggcctttactggatatgatgcctgccaatagcctctacggtctcaacctcacatccctttcagtcaccaacaccaatctgtctactgtacccttccttgcctttaaacacctggtatacctgactcaccttaacctctcctacaatcccatcagcactattgaagcaggcatgttctctgacctgatccgccttcaggagcttcatatagtgggggcccagcttcgcaccattgagcctcactccttccaagggctccgcttcctacgcgtgctcaatgtgtctcagaacctgctggaaactttggaagagaatgtcttctcctcccctagggctctggaggtcttgagcattaacaacaaccctctggcctgtgactgccgccttctctggatcttgcagcgacagcccaccctgcagtttggtggccagcaacctatgtgtgctggcccagacaccatccgtgagaggtctttcaaggatttccatagcactgccctttctttttactttacctgcaaaaaacccaaaatccgtgaaaagaagttgcagcatctgctagtagatgaagggcagacagtccagctagaatgcagtgcagatggagacccgcagcctgtgatttcctgggtgacaccccgaaggcgtttcatcaccaccaagtccaatggaagagccaccgtgttgggtgatggcaccttggaaatccgctttgcccaggatcaagacagcgggatgtatgtttgcatcgctagcaatgctgctgggaatgataccttcacagcctccttaactgtgaaaggattcgcttcagatcgttttctttatgcgaacaggacccctatgtacatgaccgactccaatgacaccatttccaatggcaccaatgccaatactttttccctggaccttaaaacaatactggtgtctacagctatgggctgcttcacattcctgggagtggttttattttgttttcttctcctttttgtgtggagccgagggaaaggcaagcacaaaaacagcattgaccttgagtatgtgcccagaaaaaacaatggtgctgttgtggaaggagaggtagctggacccaggaggttcaacatgaaaatgatttgaaggcccacccctcacattactgtctctttgtcaatgtgggtaatcagtaagacagtatggcacagtaaattactagattaagaggcagccatgtgcagctgcccctgtatcaaaagcagggtctatggaagcaggaggacttccaatggagactctccatcgaaaggcaggcaggcaggcatgtgtcagagcccttcacacagtgggatactaagtgtttgcgttgcaaatattggcgttctggggatctcagtaatgaacctgaatatttggctcacactcacggacaattattcagcattttctaccactgcaaaaaac

SEQ ID NO: 599 - protein, 606 aa, Homo sapiens
MLHTAISCWQPFLGLAVVLIFMGSTIGCPARCECSAQNKSVSCHRRRLIAIPEGIPIETKILDLSKNRLKSVNPEEFISYPLLEEIDLSDNIIANVEPGAFNNLFNLRSLRLKGNRLKLVPLGVFTGLSNLTKLDISENKIVILLDYMFQDLHNLKSLEVGDNDLVYISHRAFSGLLSLEQLTLEKCNLTAVPTEALSHLRSLISLHLKHLNINNMPVYAFKRLFHLKHLEIDYWPLLDMMPANSLYGLNLTSLSVTNTNLSTVPFLAFKHLVYLTHLNLSYNPISTIEAGMFSDLIRLQELHIVGAQLRTIEPHSFQGLRFLRVLNVSQNLLETLEENVFSSPRALEVLSINNNPLACDCRLLWILQRQPTLQFGGQQPMCAGPDTIRERSFKDFHSTALSFYFTCKKPKIREKKLQHLLVDEGQTVQLECSADGDPQPVISWVTPRRRFITTKSNGRATVLGDGTLEIRFAQDQDSGMYVCIASNAAGNDTFTASLTVKGFASDRFLYANRTPMYMTDSNDTISNGTNANTFSLDLKTILVSTAMGCFTFLGVVLFCFLLLFVWSRGKGKHKNSIDLEYVPRKNNGAVVEGEVAGPRRFNMKMI

SEQ ID NO: 600 - DNA, 1060 bp, Homo sapiens
ctattgatgggcccaagcgtaaccaggctcttctgattggccggtgtacttcagtttccgtccaaggtccgcctcctacctccttctgcttcggggagggcatgggatcagctacctgtttctgcctcaaccacggaccaataatatgagatctttgttcaccagttctacagtgatggggtgcttccttttggcttctggaatgggtgcgtttgcttctgaggatctccagtgtcacaacaaacacatgccagccctgttttacagggagccctggaggagttgggatagaggccacattgactgagggtagttgccagggtcctgcagttatacacaaagtccttaggataagaccatggccttgagagcatgtggcttgatcatcttccgaagatgcctcattcccaaagtggacaacaatgcaattgagtttttactgctgcaggcatcagatggcattcatcactggactcctcccaaaggccatgtggaaccaggagaggatgacttggaaacagccctgagggagacccaagaggaagcaggcatagaagcaggccagctgaccattattgaggggttcaaaagggaactcaattatgtggccaggaacaagcctaaaacagtcatttactggctggcggaggtgaaggactatgacgtggagatccgcctctcccatgagcaccaagcctaccgctggctggggctggaggaggcctgccagttggctcagttcaaggagatgaaggcagcgctccaagaaggacaccagtttctttgctccatagaggcctgagctgactggagcagagtcatttgcttcagcaggatccttgtgggccttctaagatgaagccaccctcaggtccagggaaggttgtgctggtatttggctcatgacagccaagagcagatttgtgaaatcggctcaactcccaggtgagagcaagcaaaaatcttggctgggtggaaaggaaggcaaaagagtaaaaattaaaaaggccaggcccagtaagtgtaccttgtactttataaataaacctcaagcagctca

SEQ ID NO: 601 - protein, 147 aa, Homo sapiens
MALRACGLIIFRRCLIPKVDNNAIEFLLLQASDGIHHWTPPKGHVEPGEDDLETALRETQEEAGIEAGQLTIIEGFKRELNYVARNKPKTVIYWLAEVKDYDVEIRLSHEHQAYRWLGLEEACQLAQFKEMKAALQEGHQFLCSIEA

SEQ ID NO: 602 - DNA, 989 bp, Homo sapiens
ctattgatgggcccaagcgtaaccaggctcttctgattggccggtgtacttcagtttccgtccaaggtccgcctcctacctccttctgcttcggttctacagtgatggggtgcttccttttggcttctggaatgggtgcgtttgcttctgaggatctccagtgtcacaacaaacacatgccagccctgttttacagggagccctggaggagttgggatagaggccacattgactgagggtagttgccagggtcctgcagttatacacaaagtccttaggataagaccatggccttgagagcatgtggcttgatcatcttccgaagatgcctcattcccaaagtggacaacaatgcaattgagtttttactgctgcaggcatcagatggcattcatcactggactcctcccaaaggccatgtggaaccaggagaggatgacttggaaacagccctgagggagacccaagaggaagcaggcatagaagcaggccagctgaccattattgaggggttcaaaagggaactcaattatgtggccaggaacaagcctaaaacagtcatttactggctggcggaggtgaaggactatgacgtggagatccgcctctcccatgagcaccaagcctaccgctggctggggctggaggaggcctgccagttggctcagttcaaggagatgaaggcagcgctccaagaaggacaccagtttctttgctccatagaggcctgagctgactggagcagagtcatttgcttcagcaggatccttgtgggccttctaagatgaagccaccctcaggtccagggaaggttgtgctggtatttggctcatgacagccaagagcagatttgtgaaatcggctcaactcccaggtgagagcaagcaaaaatcttggctgggtggaaaggaaggcaaaagagtaaaaattaaaaaggccaggcccagtaagtgtaccttgtactttataaataaacctcaagcagctca

SEQ ID NO: 603 - protein, 147 aa, Homo sapiens; identical to SEQ ID NO: 601

SEQ ID NO: 604 - DNA, 947 bp, Homo sapiens
ctattgatgggcccaagcgtaaccaggctcttctgattggccggtgtacttcagtttccgtccaaggtccgcctcctacctccttctgcttcggtgcgtttgcttctgaggatctccagtgtcacaacaaacacatgccagccctgttttacagggagccctggaggagttgggatagaggccacattgactgagggtagttgccagggtcctgcagttatacacaaagtccttaggataagaccatggccttgagagcatgtggcttgatcatcttccgaagatgcctcattcccaaagtggacaacaatgcaattgagtttttactgctgcaggcatcagatggcattcatcactggactcctcccaaaggccatgtggaaccaggagaggatgacttggaaacagccctgagggagacccaagaggaagcaggcatagaagcaggccagctgaccattattgaggggttcaaaagggaactcaattatgtggccaggaacaagcctaaaacagtcatttactggctggcggaggtgaaggactatgacgtggagatccgcctctcccatgagcaccaagcctaccgctggctggggctggaggaggcctgccagttggctcagttcaaggagatgaaggcagcgctccaagaaggacaccagtttctttgctccatagaggcctgagctgactggagcagagtcatttgcttcagcaggatccttgtgggccttctaagatgaagccaccctcaggtccagggaaggttgtgctggtatttggctcatgacagccaagagcagatttgtgaaatcggctcaactcccaggtgagagcaagcaaaaatcttggctgggtggaaaggaaggcaaaagagtaaaaattaaaaaggccaggcccagtaagtgtaccttgtactttataaataaacctcaagcagctca

SEQ ID NO: 605 - protein, 147 aa, Homo sapiens; identical to SEQ ID NO: 601

SEQ ID NO: 606 - DNA, 4205 bp, Homo sapiens
acagagccccgcgcggcgcggcggcagcttcactctggttcaagcgcaggggatcggcgggaagctctttcacccccgcttctgccgggctgtaactgcaatggagcaggttgagatgaactcagtcagatggccccacggcccgctcctttcttagcagcccactaatgctccagaaccctcaggagaagagccaggcctacccccgccgccgccggcctggctgctacgcataccgtcagaaccccgaggccatcgcagccgcagctatgtacaccttcctgcccgacaacttctcacctgccaagcccaagccttccaaagacctgaagccgctgctgggctccgcggttctggggctgctgcttgtgctggccgcggtggtggcctggtgctactacagcgtctccctacgcaaggcggagcgacttcgcgcggagctgctggacctgaaagctggcggcttctccatccgcaatcagaagggagagcaggtcttccgcctggccttccgctccggcgcgctggaccttgactcctgcagccgcgatggcgccctgctgggctgctcgctcacggccgacgggctgccgctgcacttcttcatccagactgtgcggcccaaggacacggtcatgtgctaccgcgtgcgctgggaggaggcagcgccgggccgggccgtggagcacgccatgttcttgggcgacgcggcggcccactggtatggtggcgccgagatgaggacgcaacactggcccatccgcctggatggccagcaggagccccagccgttcgtcaccagcgatgtctactcctccgacgccgcgtttgggggcatcctcgagcgctactggctatcttcgcgcgcggccgccatcaaagtcaatgactcagtgcccttccacctgggctggaacagcacggagcgctcgctgcggcttcaggcgcgctaccacgacacgccctacaagccacccgccggccgcgccgcagcgccagagctgagctaccgagtgtgcgtgggctcagacgtcacctccatccacaagtacatggtgcgtcgctacttcaacaagccgtcaagggtgccagcacccgaggccttccgagaccccatttggtccacatgggcgctgtacgggcgcgccgtggaccaggacaaggtgctgcgttttgcccaacagatccgcctgcaccacttcaacagcagccacctggaaatcgacgacatgtacacacctgcttatggcgacttcgacttcgatgaggtcaaattccccaacgccagcgacatgttccgccgcctgcgcgacgccggcttccgcgtcacgctctgggtgcacccttttgtcaactacaactcgtcgcgcttcggcgagggcgtggagcgcgagctgttcgtgcgcgaacccacgggccggttacctgcgctggtgcgctggtggaacggcatcggcgcggtgctagacttcacgcacccaaaggcccgcgactggttccagggacacctgcggcggctgcgctctcgctactccgtggcttccttcaagttcgacgcgggcgaggtcagctacctgccgcgggacttcagcacctaccggccgctgccggaccccagcgtctggagccggcgctacactgagatggcgctgcccttcttctcgctggcggaggtgcgcgtaggctaccagtcacagaacatctcctgcttcttccgcctggtggatcgcgactctgtgtggggctacgacctggggttgcgctcactcatccccgcggtgctcaccgtcagcatgctgggctacccattcatcctacccgatatggtgggcggcaacgccgtgccccagcggacagccggcggcgatgtgcccgagcgcgagctctacattcgctggctggaagtggccgcctttatgccggccatgcagttctctatcccgccctggcgctacgacgcggaagtggtggccatcgcgcagaagttcgccgccctgcgggcctcgcttgtggcaccgctgttgcttgagctggcgggcgaggtcaccgacacgggtgaccctatcgtgcgccccctttggtggattgcgcccggcgacgagacagctcaccgtatcgactcgcagttccttattggggacacgctgcttgtggccccggtgctggagccaggcaagcaggagcgcgacgtctatttgcccgccggcaagtggcgcagctacaagggtgagcttttcgacaagacgccggtgctgctcaccgattacccggtcgacctggatgagatcgcctactttacctgggcgtcctgacccagcccagggcccggtaaccgcaaagcccccagtcttcatgcagaccttgaaccctccgtcacacccgcaccatgtactcccaggaacctcccacctctataccacccattaagtggctgctgacttaaatgtgctggaaccagctgctgaaggtggggcctagggagggggcactgaagcaatctcctgctccaacgcacaatccttactgtgccctttccacccccacactcacaccaatctgcagaaacctcttccctggggtggaagccagagagcttagaggaaaaaggtcagctctcttcctgttatacatggttatacatggttggggtttaaaagcacaaagagaaacctccccctcctggctttcgtggccatctttgtccatcttaggtggggacttgatcttatttaaggtctccaaatagcccccaccacacttagaacgtgtgttttcttagtgttagaagccaggccctgagtccccagcactcacctgaactgtggctgatttggtcccagtccagctggggaggtgtttggctgacaaggaggcaagagatcccctcccagggaacaggaggactgggcttagcacagagccatcatcatgttcccaatttgtgaagagactcctaacactgcactaacccatttgtgtacatacatgggctcagccctgggccaaatgtgcctgatgggaacagacttgcagggccatgcaggccagacttcgtgccttaactgaagagtgtgcgtgtgtgtgtgtgagagagagagagagagagaaacacgcatcatgggtccctgatctatgaaatgaacacaacctctctgaggctggatgatctggaggaagggggcatggagcaaatttgaggctctgattgctgagccagcctcctcccaggcggtttccccaggactctcgtaggaaataaatagccctttcaagattcctcagctgcctcaccccctgcacatgtgcctggggtgtggcctagaagggagtgatgttcttactctggtggtctgtgcttctgaacacaggctacatgcacacactgacaactaccaataaacagacaggggaaggtctttcatctcagccattttctcttccccccgcccccccttagatggagtcttgctctgtcacccaggttggagtgcagtggcacaatcagctcactgcaacccctcctcctaggttcaagcgattgagtagctgagattacaggcatgcatcactatgcctggctttttgtattttttagtagagatggggtttaccatgttggccaggctagtctcaaactcctgacctagtgatgcacccaccttggcctcccaaagtgttgggattacaggcatgagccaccacgccagccattttctctttctaagaagagcaacctcagccggagtgagttttttctgactttgcagctgagtctggagaaaagtggcatgccagagcgggtcggtgggaaacagggtgaactttagcttccatcaacagctctggtagcaaaaccagtcccctaccccctagagaatgcatccgtttccccacctgatatggtttggctgtgtccccacctaaaactcatcttgaattgtagctcccataattgccatgtgttgtgggaaggacccagtgggagataattgaaatatgggggcagtttccgccatactgttctggtgatagtgaatagatctcatgagagctgatgattttataagaggtttccccttttgcttagttctcattctctcttgcctgccgccatgtaagacgtgcctttctgtcatgcttgtgaggcctccccagccacgtggagctgtgagttcattaaacctctttttctttataaattaaaa

SEQ ID NO: 607 - protein, 714 aa, Homo sapiens
MLQNPQEKSQAYPRRRRPGCYAYRQNPEAIAAAAMYTFLPDNFSPAKPKPSKDLKPLLGSAVLGLLLVLAAVVAWCYYSVSLRKAERLRAELLDLKAGGFSIRNQKGEQVFRLAFRSGALDLDSCSRDGALLGCSLTADGLPLHFFIQTVRPKDTVMCYRVRWEEAAPGRAVEHAMFLGDAAAHWYGGAEMRTQHWPIRLDGQQEPQPFVTSDVYSSDAAFGGILERYWLSSRAAAIKVNDSVPFHLGWNSTERSLRLQARYHDTPYKPPAGRAAAPELSYRVCVGSDVTSIHKYMVRRYFNKPSRVPAPEAFRDPIWSTWALYGRAVDQDKVLRFAQQIRLHHFNSSHLEIDDMYTPAYGDFDFDEVKFPNASDMFRRLRDAGFRVTLWVHPFVNYNSSRFGEGVERELFVREPTGRLPALVRWWNGIGAVLDFTHPKARDWFQGHLRRLRSRYSVASFKFDAGEVSYLPRDFSTYRPLPDPSVWSRRYTEMALPFFSLAEVRVGYQSQNISCFFRLVDRDSVWGYDLGLRSLIPAVLTVSMLGYPFILPDMVGGNAVPQRTAGGDVPERELYIRWLEVAAFMPAMQFSIPPWRYDAEVVAIAQKFAALRASLVAPLLLELAGEVTDTGDPIVRPLWWIAPGDETAHRIDSQFLIGDTLLVAPVLEPGKQERDVYLPAGKWRSYKGELFDKTPVLLTDYPVDLDEIAYFTWAS

SEQ ID NO: 608 - DNA, 1184 bp, Homo sapiens
aatgggcagtgcccatcctggagggggcatcagtgtggggtgggagcaggaaggctgttggggaaggaagctgagagatcctctgcaggaggggattatagcagctaagggcacctgccaggctggaggtgtggcctgtctaggggaagggtggtcactgatgtccagcaggagcccttgacaggtagagcccaccacggcatctccaagaccacaccatgttcctgttctcccgtaagaccaggacccctatcagtacctacagtgactcctacagggctcccacctccatcaaggaggtctataaggacccacccctgtgtgcctgggaagccaacaagtttctgactccgggtctgactcataccatggagcgacatgtggatcccgaagccctgcagaagatggccaaatgtgctgtacaggactacacttatagggggtccatatcaggccacccctacttgcctgagaagtactggctttctcaagaggaagcagacaaatgcagcccaaactacctgggcagtgactggtacaacacatggaggatggaaccttacaacagcagctgctgcaacaagtataccacctaccttcctcggctgcctaaggaggccaggatggagacagcagttcgaggaatgcccttggaatgccctcctaggccggagcggctcaatgcctacgagcgcgaagtgatggtgaacatgctgaactcactgtcgcggaaccagcagctgccgcggatcacgccccgatgcgggtgcgtggacccgctgcccggccgcctgcccttccatggttacgaaagtgcttgctcgggccgccactactgtctgcgcgggatggactactacgccagcggggcgccctgcaccgaccgccgcctgcggccttggtgccgggagcaaccgactatgtgtacctccctacgagcaccggcccggaatgcagtgtgctgttacaactcccccgccgtcatactacccatatccgaaccttagatgggacacaagtcacttcaagaagtctggtggtccccagagaaacaactatgttatccatcctgagtttgtgtctgagacctatcccgactatcgttgctggtagagcctgggcttgctgtgccaagggggcagagcaataaataaactcttcaaccccaaaaaaaaaaaaaaaaa

SEQ ID NO: 609 - protein, 262 aa, Homo sapiens
MFLFSRKTRTPISTYSDSYRAPTSIKEVYKDPPLCAWEANKFLTPGLTHTMERHVDPEALQKMAKCAVQDYTYRGSISGHPYLPEKYWLSQEEADKCSPNYLGSDWYNTWRMEPYNSSCCNKYTTYLPRLPKEARMETAVRGMPLECPPRPERLNAYEREVMVNMLNSLSRNQQLPRITPRCGCVDPLPGRLPFHGYESACSGRHYCLRGMDYYASGAPCTDRRLRPWCREQPTMCTSLRAPARNAVCCYNSPAVILPISEP

SEQ ID NO: 610 - DNA, 726 bp, Homo sapiens
tgacagccgccaacacagagccctggagaggtggggagctgctgaagggcgggagaagttgcggcgtggcgataggtctgggtgttctgggaggacccctaaaagggagcagctctgccaggtcagagcttgaggtagcatgtgtgccgcttccaggaggccaggatggagacagcagttcgaggaatgcccttggaatgccctcctaggccggagcggctcaatgcctacgagcgcgaagtgatggtgaacatgctgaactcactgtcgcggaaccagcagctgccgcggatcacgccccgatgcgggtgcgtggacccgctgcccggccgcctgcccttccatggttacgaaagtgcttgctcgggccgccactactgtctgcgcgggatggactactacgccagcggggcgccctgcaccgaccgccgcctgcggccttggtgccgggagcaaccgactatgtgtacctccctacgagcaccggcccggaatgcagtgtgctgttacaactcccccgccgtcatactacccatatccgaaccttagatgggacacaagtcacttcaagaagtctggtggtccccagagaaacaactatgttatccatcctgagtttgtgtctgagacctatcccgactatcgttgctggtagagcctgggcttgctgtgccaagggggcagagcaataaataaactcttcaaccccaaaaaaaaaaaaaaaaa

SEQ ID NO: 611 - protein, 127 aa, Homo sapiens
METAVRGMPLECPPRPERLNAYEREVMVNMLNSLSRNQQLPRITPRCGCVDPLPGRLPFHGYESACSGRHYCLRGMDYYASGAPCTDRRLRPWCREQPTMCTSLRAPARNAVCCYNSPAVILPISEP

SEQ ID NO: 612 - DNA, 578 bp, Homo sapiens
tgacagccgccaacacagagccctggagaggtggggagctgctgaagggcgggagaagttgcggcgtggcgataggtctgggtgttctgggaggacccctaaaagggagcagctctgccaggtcagagcttgaggtagcatgtgtgccgcttccaggaggccaggatggagacagcagttcgaggaatgcccttggaatgccctcctaggccggagcggctcaatgcctacgagcgcgaagtgatggtgaacatgctgaactcactgtcgcggaaccagcagctgccgcggatcacgccccgatgcggatgtgtacctccctacgagcaccggcccggaatgcagtgtgctgttacaactcccccgccgtcatactacccatatccgaaccttagatgggacacaagtcacttcaagaagtctggtggtccccagagaaacaactatgttatccatcctgagtttgtgtctgagacctatcccgactatcgttgctggtagagcctgggcttgctgtgccaagggggcagagcaataaataaactcttcaaccccaaaaaaaaaaaaaaaaaaaaaaa

SEQ ID NO: 613 - protein, 111 aa, Homo sapiens
METAVRGMPLECPPRPERLNAYEREVMVNMLNSLSRNQQLPRITPRCGCVPPYEHRPGMQCAVTTPPPSYYPYPNLRWDTSHFKKSGGPQRNNYVIHPEFVSETYPDYRCW

SEQ ID NO: 614 - DNA, 3641 bp, Homo sapiens
gagtcaccgcagtggctgagctgctgacaggaggcggcagcggagtaggaggcgaggcaagacctgcggctcggcccggccacagccgcggtagtgctaggcaagcccacggagtcacgccggcctcagccagtctgcgaacctctcgcccccgcccacccctgcatccgcccggcccctgcccgcccgagtggtccggggaggcctagtctgcaccacccgccgggctcctggggccgccgccccgcgcggtcctgtcggcgtccgcggccgcgcccggcccctggcccgctcgcccgccggcaccatgatggaggagatcgaccggttccaggtgcccaccgcgcactcggagatgcagccgctggacccagccgccgcctccatctctgacggagactgtgacgcccgggaggagaagcagcgggagctggcccggaagggctccctgaagaatggcagcatgggtagccctgtcaaccagcaacccaagaagaacaatgtcatggcccgaacaaggctggtcgtccccaataaaggctactcctcacttgaccagagccctgatgagaagccactggtagcccttgacacggacagcgatgatgactttgacatgtctagatactcctcctccggctactcctctgctgagcagatcaaccaagatttgaacatccagctgctgaaggacggctaccggttagatgagatccccgacgacgaggacctagacctcatcccccccaagtccgtgaaccccacgtgcatgtgctgccaggccacgtcctccaccgcctgccacattcagtagcgggcggggccactgcggtcgccggggcggggccgccaagggccgggtaggacgggcagaggccgaccccttcccagctcgtctgcctgcccccggccccgcgcccctacagccgccaacctcgtataacagtcattgcttcctcctatggtaggacgtgtacctctgtgtgttcatggagctggagaaaccaaaactgggtctctctccacccgggagctgaggaggggtgggggccgtttgttcagttacctgggggaacctcacccagcaccctgccccgcttcccagggctggccaagagagaagactggacggcagggaggtcaacattaacgagtggggggatcacaaagccaggggcttggccccaccccagcgaagccatgaactcccaagccccggcctcagcctaaccaggaaaggggctcggagggagaaaggcccagggcagtggggacgggtcccagcacctcggagcccccttcacacgccccctaccggcccatgtttctatttgcatttccccctcctcagatgggaagcctggcaaagctgcccaaccgggtagtgcccctcacccatcggatcactgccttcttcctcctcttgccccattcacccgcttccttgcactctgggagtggggcagggtaaggtgggccttacagacaggctgaggtttgggtggtgtgatctgtcctaattggcccctcaccaatgcatctatctgtctgccaccagcccaccccaccctgcccccaccctcacccacgcttctgctcattggtctcaatcccagcctggaagcagggagtaaggctggactccaatggcccattcccctcaccccagcccaagacgtgggaggctgcttcccagtaagaatccaggagcaagctttggtgaatccagtgggctgagtggctctatggatgtggttgtttggatgtggtagggagtgcttagcagaatgtgtgtgtatctctgaggctgtcagggggtgggtgggtgtgtgtctctgttggacctgtctctcctcagtctattcctgtcatagatgtgggtgtccctggtagggaagtgcctgtgtggtctgtttacagtgcagaaggcggctcagcagtgcaatgggctgacagccttggaccgggagtcagaagcctgggttctggttgtagctctggcccctccctgtgatcttcaacaagccacttgctttctctcgtcttcagtttcctcaactagaaaatgaacagcagctgaaattatgttgaagatccttttatacctgaaagagtttcttcatagaaatttctgtggtggggagggggcaatctctgtgtgtctcagtatacctaaaggttggggtggggcggagttgtgtgtctctgtagaaaggcgaaggggcagttcctatcaggactgtgtatgtctgagcacatgtggctctgtttgggattacgtgtttgtctgtgaatgtgtgtgtgtgttggagggttgtctattgtgtgtggctgtatagggtgtctgtagatcaagatgtgtatacagctgcttctgctattgctggtttgggggaggggactggaaagctgagactgaaaatcaagagggaagaggtgaggaaggcccacccctggggctgggcagtgtagacctgccaccgtgtgaagaaaaatgaaagcacagatagcctaagactgcacaggcctgtgcccacataccttatagcacaggcccaggtggatcatctcatgctaacaccccacatgtgctggtggatccactcccatggatccactcacatgctgcaggcatgcagtagactcacccacagcccactctctggacaccaatcctgggaggtgggagctggaatggggagcaatgagaggagggagtgagactgttggcttaggaagggtggtacctctccctgcatcatacccaggaactgccagctccaaaatattggggtacagctcaccaccccccactccgccaacccattcctacctcctctagtgcagggacccaagttagatgatgagaaaatgccaaacaaagggaggcaaggacagagaaggtacctgcaggacccacaaggcccatactggcccccatctgaacccacctctcccacccagatcaacatccccccaacccctgtgcccccatcatctggaccccagagccagccctcccactaccaccaccaccaccccggggctccttggctcacctttctagaacatgggtacctcctctttttgggggctcatttagactgctgcctttgctgctgacttgcagtgtgactcgggcccattgttcaatctctgtggccctgagacaccagggaaaatctccccccccacaggacatactagttccctggcaggcaagggcttccaactgaggcagtgcatgtgtggcagagagaggcaggaagctggcagtggcagcttctgtgtctagggaggggtgtggctccctccttccctgtctgggaggttggagggaagaatctaggccttagcttgccctcctgccacccttccccttgtagatactgccttaacactccctcctctctcagctgtggctgccacccagccaggtttctccgtgctcactaatttatttccaggaaggtgtgtggaagacatgagccgtgtataatattttttttaacattttcattgcagtattgaccatcatccttggttgtgtatcgtgtaacacaaataatgatattaaaagcatcaaacaagccaaaaaaaaaaaaaaaaaaaaaaaaaaaaaaaaaaaaaaaaaaaaaaaa

SEQ ID NO: 615 - protein, 168 aa, Homo sapiens
MMEEIDRFQVPTAHSEMQPLDPAAASISDGDCDAREEKQRELARKGSLKNGSMGSPVNQQPKKNNVMARTRLVVPNKGYSSLDQSPDEKPLVALDTDSDDDFDMSRYSSSGYSSAEQINQDLNIQLLKDGYRLDEIPDDEDLDLIPPKSVNPTCMCCQATSSTACHIQ

SEQ ID NO: 616 - DNA, 2664 bp, Homo sapiens
agaaattcaggagacacagacaagttcttccacgatgtcgtacagacgagaactagagaaataccgtgacctggatgaagatgaaatccttggagccctaacagaggaagagctgaggaccctggaaaatgagctggatgagctggaccctgataatgcactgctgcctgcaggcctgaggcagaaggatcagaccaccaaggcgcccacgggcccctttaaaagagaggagctcttggatcacttggaaaagcaagcaaaggagtttaaggaccgagaagatctggtcccctacacaggggaaaaacgaggaaaggtctgggttcctaagcagaagccactggatcctgtgctggaaagtgtgacgctggaaccggagctggaggaagccttggcaaatgcttcagatgcagaactctgtgacattgcagcgatcctgggcatgcacacgctcatgagtaaccagcagtactaccaggccctgagcagcagctccatcatgaacaaggaggggctcaacagcgtgattaaacccacacaatacaagcctgtgcccgacgaagaaccaaattcaacagacgtagaggaaacgctggaacggataaagaacaacgacccaaaacttgaagaagttaacctcaataatatccggaatatccccatccccaccctcaaggcatatgcagaagccctgaaagaaaactcatatgtgaagaagttcagcatcgtggggacacggagtaatgaccccgtggcgtatgcccttgctgagatgctcaaggagaacaaggtgttgaagacactgaatgtggaatccaacttcatttctggagctgggattctgcgcctggtagaagccctcccatacaacacttctctggtggaaatgaaaattgacaaccagagccagcccctgggcaacaaagtggaaatggagattgtgagcatgttggaaaaaaacgcaacacttctcaaattcggctaccactttacccagcaaggaccccggcttcgggcatccaacgcaatgatgaacaacaatgaccttgtgaggaagaggaggcttgcggacctgactgggcccatcattcccaagtgccggagtggtgtctagtgtgtggcggtggagtccatgcctttgaactggatgtgttctattgatgacctgtgctctgcaggggaaaccagaaggcaaaatgctggcagcatgaaacccttttgtggttcagttctttatgcactaaggttttaggttgactagtggttgtagttgaaaattttataaaataccgttaatgtgaagtttttctttagtcacagaagttgaatctggttattatttaaaaactagaagcccccaaaccagcagatcttactgaagatgatgttccagcagcagcgacttagccccaggagcccagtttcaatggccttgctgtgtggtgtttcaagtgcatttaaaatgtgtgacacagaaacggcacactcttccacatgcttttgaagtattataaaacactttattacaaatttgtcttagctattagcaaataaaactgattatcattctttattaaccctccttggaattttgaaaacctcgattaaagttgccaaattgattactggatccagaacacaattttcccctcagaacagatagacagactgaagccactgaactctgccaggagtcaacatgagattccttttgctggatatgcagaaatgataggaaaaaaaccaatggtgaaatttcaagtttcaaaaaccaacctttcattaccaatcccaggcaacaaacatgtccctgagtgttctttaagaacatttgggatttatgtacaatttaatactggagttagaactttttccttattgaatgccaaccttatgatggatgtgaaaatctacggccaaatacttttgaaaacacctttctatattgcacagtgggcaaatggcttatgtgaggtaagacactagagggataaatttccagatcaacatggctatggtatttagtaatggcccagcttagagacttcagctactgatctcatcacttattagacaaattgctgctgaccttacgcctgtatattaagcctccgcaggatgccggacaatggtgaagaaactccagatatcaaggaattgggaaatcctggccaaaccaccccaagatgattacactgaaatgtagtattagtactgctgccagatctctttttaacatcatgtgcgtctcttgggatccagcaaaagtgttaagccacaatgcccttgtgccttttaatataccacagtgccagttaaactaatatttttgtttgttgcttttgggagttattttcattagtgatttcagcaaatctcatgataaaggacaaggtcaagaactccagagcactgagcagagaggctggtgatgaaaaggtgaaggcctgcgcactgaactgtaaggcagtgggcagtacagggtaactggaggcggggccagggcctcagcgctatggaagagtgtccactgaggctgcacatggcccaggagtggcaccatgttgcagggacaaccatccccatttggcttctccttaaaacacaattgcagctgcattctgcatcgctgaaaactgcaatataatattaaatctgttggtc

SEQ ID NO: 617 - protein, 359 aa, Homo sapiens
MSYRRELEKYRDLDEDEILGALTEEELRTLENELDELDPDNALLPAGLRQKDQTTKAPTGPFKREELLDHLEKQAKEFKDREDLVPYTGEKRGKVWVPKQKPLDPVLESVTLEPELEEALANASDAELCDIAAILGMHTLMSNQQYYQALSSSSIMNKEGLNSVIKPTQYKPVPDEEPNSTDVEETLERIKNNDPKLEEVNLNNIRNIPIPTLKAYAEALKENSYVKKFSIVGTRSNDPVAYALAEMLKENKVLKTLNVESNFISGAGILRLVEALPYNTSLVEMKIDNQSQPLGNKVEMEIVSMLEKNATLLKFGYHFTQQGPRLRASNAMMNNNDLVRKRRLADLTGPIIPKCRSGV

SEQ ID NO: 618 - DNA, 4445 bp, Homo sapiens
agtgggctacgaacgtctggcacacatgcaaccgccccctcgggctgcctccgcctgccggctacttctttctcccgccttccgctctatgtccttccggggccacgcagaaagtgccgccgctttggccactcagagcccccgggccgcggtcgtcgtacgcctgaaggcgggtcgtgccggcggccgctctagtctccgcctccgctcaggccggtcctccggggcttctcaatggtttcccggtggcctctcaatggttttcccggcggcccttgcgccgacgccaggagacttccggagcttggtgacgtcacgagcgagcttttctacccaaatacgcggcgggggaataggctcgagggcggtgagcagtgacaattgctaggcggagacagtgcagggaagagagaccttagaaaggatcaggactggcgggaggtatttaactgaaaggaatatctgcttcactgttgcaaccaaaccagatgccttcttccacttcaccagaccaaggagatgacctggagaactgcattttaagattttctgacctggatttaaaagatatgagtcttattaatcccagcagcagtcttaaagcagaattagatggcagtacaaaaaagaaatactcgtttgcaaagaaaaaggcctttgccctttttgtcaaaaccaaagaagttccaacaaaaaggagttttgaatgtaaagaaaaattgtggaaatgctgtcggcagctattcacagaccaaaccagcatccatagacatgtggcaacacaacatgctgatgaaatttatcaccagacagcttctattttaaagcaactggctgtgacattgagcacctcaaagagtctttcgtctgcagatgaaaagaaccctttaaaagagtgccttccacatagccatgacgtgtctgcttggctccctgatataagctgctttaaccctgatgagctgataagtggccagggcagtgaagaaggggaggtgctcctttattactgctaccatgacctggaggatccccaatggatctgtgcctggcagacagctctgtgtcagcacctgcacctcacaggcaagattcgaattgctgcagaaggaatcaatgggacagttggtggaagcaaattggctaccagactttatgtggaagtcatgctttccttcccattgtttaaggatgacctgtgtaaagatgattttaagaccagcaaaggaggagctcactgttttccagaattgcgtgttggtgtatttgaagaaatcgtgcccatggggatcagccccaaaaagatctcctacaagaagcctggaatccatttatccccaggtgaatttcataaagaagtagaaaagtttttatctcaggcaaatcaagaacaaagtgatactatccttcttgattgcagaaacttctatgaaagcaaaataggacgattccaaggctgcttagccccagacatcaggaaattcagttacttccctagctacgttgacaaaaatctagaacttttcagagagaagagagtgctgatgtactgtaccgggggcatccgctgtgagcggggttcagcctacctcaaagccaagggagtgtgcaaggaggtgttccagctcaagggtggcatccacaagtacctggaagagtttcctgatggcttttacaaagggaagttgtttgtttttgatgaacgctatgctctgtcctacaacagtgatgtggtgtcagagtgttcatactgtggagcccgctgggaccagtataaactctgctctactccccagtgccgccagctcgttttgacctgccctgcctgtcaaggacaaggattcacagcctgttgtgtcacatgtcaagacaaggggagcaggaaagtttcaggccctatgcaagacagctttaaagaggaatgcgagtgcacagcccgacggccacgcatacctagggaactcttgcagcatgtgcgacagcctgtgagcccagagccagggcctgatgctgatgaggatgggccagtgcttatgtgagcagcacctttggcattttcccaggccctcggtaaaagtaggtttggggtgactatacagagaaagcatggcaagactgcagaaacagagaaatcgggaacttcagttctggccgctgccaccgtggcagccgtctacacttcacagcgggaggggaggagtcacgttgtctaccacttacctgagacattctgatttggatgatgctagagcacagaaaataggtgagctgcatgggatcccaaagctgctgagggatagagcctgagcctggtggccacagcatatgccctttctgttccatgcagctggggctgttagtagtcattgcccttgtcagcagaccttctaccctggtggcaaacacatgaaagctgtggccctgggagtggcctcctaaaacaagccacttaggtcatctgccatctacccttaacctctgtctctcgcctgaggggaatctgcaagctgtgcattgggcttacctcctgcttttgtagaaataaccatcctttggtatacatggaggatagttccagaacgcctgagtatacaaaaacccaatgcatactcaagtcccacagtgggccctacagaacccacgtatgtgataaatcagccctccatgtacgcaggtttcgccccctgccaatactgtattttcaacctgtatggttgaaaaaaatccatatataagtgcagccatgcagttcaaacccatattgttcaagggtcaactgtatagtttattgaacagccacacccattcctttacacatgatctatggcagagttgaatagttgcaacagacactatgtggcctgcaaaatcggaaatttttactgtctggccttttacagaaaagtttgccagcccctgatctagaccagcagctcatctgatagaggcagaggtggccttaaagatgtggccttcttcattttctgttggtttggtttcgtttctatgagagatttcctctgatagctctgctttccccagcacttactctctgagcttttaaatgttctctctgggagcttcatataagctcggtgacatttgagccacagtttttagatcagcacctggaatacatgacacattcttactgaggtcatccagcactgccatggtggctgcccagtcttctggccagtgtgccaggcacatgtccctgtcacacaggttccaagaaacacatacgcagccatgcatagaccaacagatttaatattatattgcagttttcagcgatgcagaatgcagctgcaattgtgttttaaggagaagccaaatggggatggttgtccctgcaacatggtgccactcctgggccatgtgcagcctcagtggacactcttccatagcgctgaggccctggccccgcctccagttaccctgtactgcccactgccttacagttcagtgcgcaggccttcaccttttcatcaccagcctctctgctcagtgctctggagttcttgaccttgtcctttatcatgagatttgctgaaatcactaatgaaaataactcccaaaagcaacaaacaaaaatattagtttaactggcactgtggtatattaaaaggcacaagggcattgtggcttaacacttttgctggatcccaagagacgcacatgatgttaaaaagagatctggcagcagtactaatactacatttcagtgtaatcatcttggggtggtttggccaggatttcccaattccttgatatctggagtttcttcaccattgtccggcatcctgcggaggcttaatatacaggcgtaaggtcagcagcaatttgtctaataagtgatgagatcagtagctgaagtctctaagctgggccattactaaataccatagccatgttgatctggaaatttatccctctagtgtcttacctcacataagccatttgcccactgtgcaatatagaaaggtgttttcaaaagtatttggccgtagattttcacatccatcataaggttggcattcaataaggaaaaagttctaactccagtattaaattgtacataaatcccaaatgttcttaaagaacactcagggacatgtttgttgcctgggattggtaatgaaaggttggtttttgaaacttgaaatttcaccattggtttttttcctatcatttctgcatatccagcaaaaggaatctcatgttgactcctggcagagttcagtggcttcagtctgtctatctgttctgaggggaaaattgtgttctggatccagtaatcaatttggcaactttaatcgaggttttcaaaattccaaggagggttaataaagaatgataatcagttttatttgctaatagctaagacaaatttgtaataaagtgttttataatacttcaaaagcaaaaaaaaaaaaaaaaaa

SEQ ID NO: 619 - protein, 516 aa, Homo sapiens
MPSSTSPDQGDDLENCILRFSDLDLKDMSLINPSSSLKAELDGSTKKKYSFAKKKAFALFVKTKEVPTKRSFECKEKLWKCCRQLFTDQTSIHRHVATQHADEIYHQTASILKQLAVTLSTSKSLSSADEKNPLKECLPHSHDVSAWLPDISCFNPDELISGQGSEEGEVLLYYCYHDLEDPQWICAWQTALCQHLHLTGKIRIAAEGINGTVGGSKLATRLYVEVMLSFPLFKDDLCKDDFKTSKGGAHCFPELRVGVFEEIVPMGISPKKISYKKPGIHLSPGEFHKEVEKFLSQANQEQSDTILLDCRNFYESKIGRFQGCLAPDIRKFSYFPSYVDKNLELFREKRVLMYCTGGIRCERGSAYLKAKGVCKEVFQLKGGIHKYLEEFPDGFYKGKLFVFDERYALSYNSDVVSECSYCGARWDQYKLCSTPQCRQLVLTCPACQGQGFTACCVTCQDKGSRKVSGPMQDSFKEECECTARRPRIPRELLQHVRQPVSPEPGPDADEDGPVLM

SEQ ID NO: 620 - DNA, 5381 bp, Homo sapiens
attgagaggccaccgggaaaccattgagaagccccggaggaccggcctgagcggaggcggagactagagcggccgccggcacgacccgccttcaggcgtacgacgaccgcggcccgggggctctgagtggccaaagcggcggcactttctgcgtggccccggaaggacatagagcggaaggcgggagaaagaagtagccggcaggcggaggcagcccgagggggcggttgcatgtgtgccagacgttcgtagcccactgagcttcctcacgccggctgtcgcagcgcctagccccacccggcggcctctcctgcgcttccggggccgtggcgagctagtgcgcctgcgtgccggcccatccgcgcgccttgcagctgtccttgcgtcggccagcggccagacagttcctgcagcgcttaccgcctggcctctcggttccgcggcgcaccggagggcagcatgtcgcggcggcggcacagcgacgagaacgacggtgggcagcctcacaaaaggagaaagacctctgatgcaaatgaaactgaagatcatttggaatctttaatatgtaaagtaggagaaaagagtgcctgctctttggagagcaacctagaaggcttggctggtgttttggaagctgatcttcctaactacaagagcaagatcttaaggcttctttgtacagttgcacgcctattacctgagaagctgacaatttatacaacattagttggactactgaatgccaggaattacaattttggtggagaatttgtagaagccatgattcgtcaacttaaagaatcattgaaagcaaacaattataatgaagccgtgtatttggtccgttttttatctgatcttgtgaattgtcatgtgattgccgccccatcaatggttgctatgtttgaaaattttgtaagcgtaactcaggaagaagatgtacctcaggtgcgacgagattggtatgtgtatgcatttctgtcatctttgccctgggttggaaaggagttgtacgaaaagaaagatgcagagatggaccgcatctttgccaacactgaaagctatcttaaaagacgccaaaagactcatgtacccatgttacaggtatggactgctgataaaccacatccacaagaagagtatttagattgcctgtgggcccagattcagaaattgaaaaaggatcgctggcaggaacggcacatcctaagaccttatcttgcctttgacagcatcctgtgtgaagcactgcagcacaatctgcctccttttacaccacctcctcacactgaagattcagtgtacccaatgccaagggtcatcttcagaatgtttgattacacagatgatcccgagggtcctgtcatgccagggagtcattcagtggaaagatttgtaatagaagagaatcttcactgcatcattaagtcccactggaaggaaaggaagacttgtgctgcacagttagtgagctatccagggaagaacaagatccccttgaactaccacatagttgaggtgatctttgcagagctgtttcaacttccagcaccccctcacattgatgtgatgtacacaacactcctcattgaactgtgcaaacttcaacctggctctctaccccaagttcttgcacaggcaactgaaatgctatacatgcgtttggacacaatgaacactacctgtgtagacaggtttattaattggttttctcatcatctaagtaacttccagttccgttggagctgggaagattggtcagattgtcttagtcaagatcctgaaagtcccaaaccgaagtttgtaagagaagttctagaaaaatgtatgaggttgtcttaccatcagcgtatattagatattgttcctcctaccttctcagctctgtgtcctgcaaacccaacctgcatttacaagtatggagatgaaagtagcaattctcttcctggacattctgttgccctctgtttagctgttgcctttaaaagtaaggcaaccaatgatgaaatcttcagcattctgaaagatgtaccaaatcctaaccaggatgatgacgacgatgaaggattcagttttaacccattgaaaatagaagtctttgtacagactctgctacacttggcagccaaatcattcagccactccttcagtgctcttgcaaagtttcatgaagtcttcaaaaccctagctgaaagtgatgaaggaaagttacatgtgctaagagttatgtttgaggtctggaggaaccatccacagatgattgctgtactagtggataagatgattcgtacacaaatagttgattgtgctgccgtagcaaattggatcttctcttcagaactatctcgtgactttaccagattgtttgtttgggaaattttgcactctacaattcgtaagatgaacaaacatgtcctgaagatccagaaagagctggaagaagctaaagagaaacttgctaggcaacacaaacggcgaagtgatgatgacgacagaagcagtgacaggaaagacggggttcttgaggaacaaatagaacgacttcaggaaaaagtggaatctgctcagagtgaacaaaagaatcttttcctcgttatatttcagcggtttatcatgatcttgaccgagcacctagtacgatgcgaaactgatgggaccagtgtattaacaccatggtataagaactgtatagagaggctgcagcagatcttcctacagcatcaccaaataatccagcagtacatggtgaccctggagaaccttctcttcactgctgaattagaccctcatatcttggccgtgttccagcagttctgtgccctgcaggcctaagggtcattttttcctcatgtcaaggttttttttgatatcttaaaataatttgtcttattttttgatggtttgaatgcttgctttcttgtagtatcctttcacttcttaaaggaaacaaaggggaagaggacagtgaatgaacatggcattacttttaattgccctgaaaagcaaatacttcctaacggcagtaatgtgactatgaccatgatatattatatatgtgacagatacaaattctctgtgatcagtttgttattttttttctccttaaggcacaaaataattggtttgaggtatgtgaaacactagaggtcaaccttacatagtatatagaactgatgggtttacccagctacccagtagcataacttttcacagctcggggatgaattaacatggctgaaataaaactaaaagtatggtttttaaactttggcatttcatgatttatcatctcactctactctaaaactggtggtttcttactgaaggtgttctccatttgaaattttatcttcaaagtatttttaagtagtatctttaagacatgacttgttagtaataaaagtgttactagttggaagagtagctctcaaatttgtcttaatgtaaatcacctgggaatctttcaagttattttgaaatttaaaccaccgtctgggggtggaacgcagacatcctcagtaatccttaaagtttccccaggtgattccaggtttggtcaccattatcttagagcatctactcacttcctctagccttggggttatttgtccaaggtcttgtagtgagttacagaatactaaagtggatgtagaagtggtcagattgactgaaactataccctgaattagatgtgagtttagattttgtttatatggaacctgatccaaaaaactacgaagtcctgagcttgtttcctgtatagtactgatgctgaaataagatgacagcagtttgtaaaataatacacaaatatgaggaattgtctgacattccaaatttcgaggatttttagacttttttcattaaaccttagaaaaaaattaccagtaatcctacaactactggtagtgttgttgtgcatttgcacaaaataggtataattttttcttattacatcccaagtttatgatgcattaagcgttttgcatattttgatatatttttgctttggtttaccatacattttagtggctacagaatgtagtctgcttaataaatgggaattcctagaatgtttaaataccatactatttaagacaaaatacaaaatatccagaaaaatccaggttgcgtggctggttagtaaaggactaaaacccaggttcttggctaaatgttttcgtttatactgtttatctttcccattgcttaagcacagcacaaactatgtaattatatataattacagttgacccttgaacaacatgggtttgaactgtgtgagtctccttacacacaggttttcttccacccctgagatggcaagaccagccccttgtcttcctcagcctgctcaacgtgaagatgatgaggatgaagacctttatgatgatccacttctacttattaaatagtaaatatatttttttcttatgattttattttcttttctctagcttcataagaatatagcatatgggctgggcgcagtggctcacgcctgtaatcccagcactttgggaggctgaggcgggcggatcacaaggtcaggagattgagaccatcctggctaacacagtgaaaccctgtctctactaaaaacacaaaaacttagccaggcgtggtggtacatggctgtagtcccagctacttgggaggctgagacaggagaatcgcttgaacctgggaggtggaggtttcagtgagccaagattgtgccactgcactccagcctgggtgatggagcgaggctctgtctcaaaaaagaaaaaaaatatatagcatataacatacaaaatgagtttatcaactgtttgttattggtaagtcagcagtgggctattggtggttaagttttgggggagtcaaaagttacatgcaaattttttactgtgcggggtgtcagcatccctaaccccatgttgttcaagggtcaactgtagtttaaaatgactcctgtctcaaaaaaccaaaggataacctttaagggattggtaactttgactcaaaactgctttgtaatcttttcacaatgtactgaaaagtgtggctagttatgtttgatccacattctagagaaatttgtaggttttaatttcttttctcttggtcctctcttcatgtataatggttgcttttaacagctgttcgctgatgtggtcctgctctgtcccagtctagcagctttagtgtatggaaaaattgaactaggaattgagttttgaagaaataaaggtgtaagagcaaacattcaacagttgctgtccccagtaatgaagttcatacagacaaaagatggcatgtcactgtacatcataccttgcaataaatattctgttaaattgtgctggtgcaatttaacatgcttttgtcaaagtaaa

SEQ ID NO: 621 - protein, 790 aa, Homo sapiens
MSRRRHSDENDGGQPHKRRKTSDANETEDHLESLICKVGEKSACSLESNLEGLAGVLEADLPNYKSKILRLLCTVARLLPEKLTIYTTLVGLLNARNYNFGGEFVEAMIRQLKESLKANNYNEAVYLVRFLSDLVNCHVIAAPSMVAMFENFVSVTQEEDVPQVRRDWYVYAFLSSLPWVGKELYEKKDAEMDRIFANTESYLKRRQKTHVPMLQVWTADKPHPQEEYLDCLWAQIQKLKKDRWQERHILRPYLAFDSILCEALQHNLPPFTPPPHTEDSVYPMPRVIFRMFDYTDDPEGPVMPGSHSVERFVIEENLHCIIKSHWKERKTCAAQLVSYPGKNKIPLNYHIVEVIFAELFQLPAPPHIDVMYTTLLIELCKLQPGSLPQVLAQATEMLYMRLDTMNTTCVDRFINWFSHHLSNFQFRWSWEDWSDCLSQDPESPKPKFVREVLEKCMRLSYHQRILDIVPPTFSALCPANPTCIYKYGDESSNSLPGHSVALCLAVAFKSKATNDEIFSILKDVPNPNQDDDDDEGFSFNPLKIEVFVQTLLHLAAKSFSHSFSALAKFHEVFKTLAESDEGKLHVLRVMFEVWRNHPQMIAVLVDKMIRTQIVDCAAVANWIFSSELSRDFTRLFVWEILHSTIRKMNKHVLKIQKELEEAKEKLARQHKRRSDDDDRSSDRKDGVLEEQIERLQEKVESAQSEQKNLFLVIFQRFIMILTEHLVRCETDGTSVLTPWYKNCIERLQQIFLQHHQIIQQYMVTLENLLFTAELDPHILAVFQQFCALQA

SEQ ID NO: 622 - DNA, 1491 bp, Homo sapiens
cactcagaaaggccgctgggtgcggggagcgcagaggcggtgcagggcggctggctcgcctcggcgtgcagtgcgcgtgcgtggagctgggagctaggtcctcggagtgggccagagatggcggcggccgacggggctttgccggaggcggcggctttagagcaacccgcggagctgcctgcctcggtgcgggcgagtatcgagcggaagcggcagcgggcactgatgctgcgccaggcccggctggctgcccggccctactcggcgacggcggctgcggctactggaggcatggctaatgtaaaagcagccccaaagataattgacacaggaggaggcttcattttagaagaggaagaagaagaagaacagaaaattggaaaagttgttcatcaaccaggacctgttatggaatttgattatgtaatatgcgaagaatgtgggaaagaatttatggattcttatcttatgaaccactttgatttgccaacttgtgataactgcagagatgctgatgataaacacaagcttataaccaaaacagaggcaaaacaagaatatcttctgaaagactgtgatttagaaaaaagagagccacctcttaaatttattgtgaagaagaatccacatcattcacaatggggtgatatgaaactctacttaaagttacagattgtgaagaggtctcttgaagtttggggtagtcaagaagcattagaagaagcaaaggaagtccgacaggaaaaccgagaaaaaatgaaacagaagaaatttgataaaaaagtaaaagaattgcggcgagcagtaagaagcagcgtgtggaaaagggagacgattgttcatcaacatgagtatggaccagaagaaaacctagaagatgacatgtaccgtaagacttgtactatgtgtggccatgaactgacatatgaaaaaatgtgattttttagttcagtgacctgttttatagaattttatatttaaataaaggaaatttagattggtccttttcaaaattcaaaaaaaaaagcaacatcttcatagatgaatgaaacccttgtataagtaatacttcagtaataattatgtatgttatggcttaaaagcaagtttcagtgaaggtcacctggcctggttgtgtgcacaatgtcatgtctgtgattgccttcttacaacagagatgggagctgagtgctagagtaggtgcagaagtggtaggtcagctacaaatttgaggacaagataccaaggcaaaccctagattggggtagagggaaaagggttcaacaaaggctgaactggattcttaaccaagaaacaaataatagcaatggtggtgcaccactgtaccccaggttctagtcatgtgttttttaggacgatttctgtctccacgatggtggaaacagtggggaactactgctggaaaaagccctaatagcagaaataaacattgagttgtacgagtctgaaaaaaaaaaaaaaaaaaaaaaa

SEQ ID NO: 623 - protein, 273 aa, Homo sapiens
MAAADGALPEAAALEQPAELPASVRASIERKRQRALMLRQARLAARPYSATAAAATGGMANVKAAPKIIDTGGGFILEEEEEEEQKIGKVVHQPGPVMEFDYVICEECGKEFMDSYLMNHFDLPTCDNCRDADDKHKLITKTEAKQEYLLKDCDLEKREPPLKFIVKKNPHHSQWGDMKLYLKLQIVKRSLEVWGSQEALEEAKEVRQENREKMKQKKFDKKVKELRRAVRSSVWKRETIVHQHEYGPEENLEDDMYRKTCTMCGHELTYEKM

SEQ ID NO: 624 - DNA, 1367 bp, Homo sapiens
atgagctactgccaggtagacagtgggtttggatctgggccaaatatcctgacttcccaaaacataagcttcaccactcgctccaccttctccaccaactaccggtccctgggttctgtccaggcacccagctacggtgtccggctggtcagcagcatagccagcgtctgtacaggcacgggggctctggttcccggatctccatgtcccgctccaccagctacctgagcagcatgggttccgggggcctggccgcggggatggccaggggtctggcaggaatgagaggcatccagaacaagaaggagaccgtgcaaaacctgaacaactgcctggcctcctacctggacagaatgaggagcctggaggccaagaactggaagctggagagtaaaatccaggagcacctgtagaagaagggaccccaggtcagagatgagccattacttcaagaccattgagggcctgaggactcagatcttcacaaatactgtggacaatgcctgcattgttctgcagattgacaatgctggtcttgctgctgatgactttagagtcaagtatgagacagagctggccatgcgccagtctgtggagagccacatccatgggctccggaggtcactgatgacaccagtgtcactcggctgcagctggagacagagatcgaagctctcaaggaggagctgctcttcatgaagaagaaccacgaagaggaagtaaaagtgttgggcattacaaaaggcctacaagcctagattgccagctctgggttgaccatggaggtagatgcccccagtctcgggaccttgccaagatcatggcagacatccggccccaatatgatgagctggctcggaagaactgagaggagctggacaaatactggtctcagcagattgaggagagcacctcagtggtcaccacgcagtccaccgaggttggagctgctgggatgatgctcacggagctgagatgtatagtccagtccttgaagatcaacctggactccatgagaaatctgaaggccagcttggagaacagcctgagggaggtcgaggcccgctatgccttgcagagggagcagctcaacgggatcctgctgcacctggagtcagagctggcacagacccgggcagagggacagtgccaggctcaagagtacaaggccctgctgaacatcaaggtcaagctggaggctgagagcactgcctactgctgcctgctggaggatggcaaggacttcaatcttggtgatgccctggacagcagcaactccatgcaaaccatccaaaagaccaccacccgccggatagtggatggcaaagtggtgtctgaccaacgacaccaaagttctgagacattaa

SEQ ID NO: 625 - DNA, 8306 bp, Homo sapiens
ggagagggagggagggagagagagagagagggagagagacggatatctcaggtcatctgcagctgcagcgagtctgaggagccgaggaaggcagggaagatggcgatcctccattgctgagacccggcagaagcacatgagactcccaaacaacttccacaacaataacccgagcaggaagaggagaaagagaaagaggataaggaggcggtggggctggagaacccgaagcacctcccggcgccgggacgcttcttctgttcctaatgtgagaggctagacccagatcatggaggtgcttcagtgtgatggctgtgatttccgagccccgtcttatgaagatctcaaggcacacattcaggatgtccacacggcatttctgcagccaactgatgttgctgaggacaatgtgaatgagctacgatgtgggtccgtgaatgccagtaatcagacagaggtggagttttcttctataaaggatgaatttgccattgcagaagatttatcaggtcaaaatgcaacttcattggggaccggaggttactatggccacagtccaggatattatggtcagcatattgccgctaatcccaaaccaacaaacaagttttttcaatgcaagttctgtgtacgctacttcaggtcaaaaaacctcctcatagaacacactagaaaggtccatggagctcaagctgaagggagttcatcaggaccccctgtcccgggatccttaaattataatatcatgatgcacgagggatttggaaaggtcttctcttgccagttttgcacatacaagtcaccaagaagggcaagaataattaagcatcagaagatgtatcacaaaaacaatttgaaggagaccactgctcccccacctgctcctgctccaatgccagaccctgtggttccgcccgtatcactgcaggacccctgcaaggaactgccagcagaggttgtggagcgcagcatcttagagtctatggtcaagcctttgaccaaatctcgaggcaacttttgttgtgagtggtgcagctaccagaccccccgccgagaacgctggtgtgaccacatgatgaagaaacaccgcagtatggtcaagatcctttccagtctcagacagcaacaagaaggaactaatctacctgatgtgccgaacaagagtgcccccagccccacttccaactccacctatctgaccatgaatgctgcaagccgggagatacccaatactaccgtctccaacttcaggggctccatgggcaactccatcatgagacccaattcttcagcttccaagttttcgcccatgtcttaccctcagatgaagccgaagtcacctcacaattctggtctagttaacttgacagagagatcccgttatggaatgactgacatgaccaattcttctgctgacctggaaactaacagcatgctaaatgactctagttctgatgaagagttaaatgaaatagacagtgagaatggtttaagtgctatggatcaccagacatcaggcctgtctgcagagcagctgatgggctcagatggcaacaaattattggagaccaaggggattccatttagaagattcatgaataggttccagtgccccttttgtcctttcctcaccatgcatcgacgtagcatctctcgtcacatagaaaacatccacttatctggaaagacagctgtctacaaatgtgacgaatgtccgtttacttgcaagagctcgttgaaacttggggctcacaaacagtgtcacacgggtacaacgtcagattgggatgctgtgaattcccagagtgaaagcatttcttcctcactgaatgaaggtgtggtgtcttatgagagctcaagcatcaatggtagaaagtcaggagtcatgttggatcccttgcagcagcaacagccaccgcagccaccaccaccgccgccgccaccaccaccatcacagccacagccactgcagcagccacagccaccacagctgcagccaccacatcaggtgccaccccagccacaaacacagccaccaccaacgcagcagccacagccacccacacaagccgcacctctgcacccatacaaatgcaccatgtgtaattactccaccacaactctgaaagggctaagagtccatcagcagcataaacattcattctgtgacaacttgccaaaattcgaggggcagccctcaagcctaccattggaaaatgagacagacagccacccctcttccagcaacactgtgaagaaaagtcagacctcaattcttgggttgtcctccaagaacaattttgtagctaaagcctctaggaagctcgccaatgactttcctctagatttgtcacccgtgaagaagagaaccaggattgacgagatagcaagcaaccttcagagcaaaattaaccaaaccaaacagcaggaagatgcagtgatcaatgttgaggatgatgaagaggaagaggaagacaacgaagtcgagatagaggttgagttggacagggaggaagaaccgacagaacccatcatagaggttcccacttccttttctgcccaacagatatgggtaagagataccagtgagccccagaaagagcccaacttcagaaacatcacccacgattacaatgccaccaatggggctgagattgagctcaccctttctgaagatgaagaggattattatggctcctcaacaaacttgaaagatcaccaagtttccaatactgctctgctgaatacccaaactcccatctatgggactgagcacaatagtgaaaacacagactttggtgactctggaaggctttactattgtaaacactgtgactttaacaacaaatctgcccggagtgttagcacccactaccaacgaatgcacccatacattaaattcagctttaggtacatcttggaccccaatgatcacagtgcagtgtacaggtgcctggaatgctacatcgattacaccaacttcgaagatctccagcagcattatggcgagcaccacccagaagccatgaatgtactcaactttgatcactcggacctgatctaccggtgtcggttttgttcatacacgagcccgaatgttagaagcctgatgccacattaccaaagaatgcatcccacggtgaagatcaacaacgcgatgatattttcaagctatgtcgtggagcagcaggaagggctgaatacagaatcccagaccctgagggagattctgaattcggctcccaagaacatggcgacttccacacctgtggctcgtggtggtggtttgccagctacgttcaacaaaaacactcctaagacctttactcctgaatgtgaaaatcagaaggaccctttggtcaacactgttgttgtttatgattgtgatgtttgttcgtttgcaagccccaacatgcattctgtcttggttcattatcagaagaaacaccccgaagaaaaggcttcctactttaggatccagaaaactatgcgaatggtgtctgtggacaggggctctgccctttctcaattatcatttgaggtgggtgctccaatgtctcccaaaatgtccaacatgggttccccaccccccccacaacccccgccaccagacctcagtactgagctttactactgcaaacactgttcctacagcaatcggtcagttgtgggagtgcttgtccactaccagaaaagacacccagaaataaaggttactgccaaatatatcagacaggctcctcccacagctgcaatgatgagaggggtcgaagggccccaaggctccccccggccacccgcccccatacaacagctgaaccgaagcagctctgagagagatggccctcctgtggagaatgagatgttcttttgccagcactgtgattatgggaaccggacggtcaaaggggtactcattcattatcagaagaagcaccgagacttcaaggccaatgcagatgtgatccggcagcatacggccaccattcgaagcctctgcgaccgaaatcagaagaagcctgccagctgcgtgcttgtctccccctctaatctggagcgggacaaaacgaaactccgagcactcaaatgtaggcagtgctcatatacctccccctacttctatgcactgaggaagcatatcaagaaagaccaccccgccctgaaagccacagtcacgtccatcatgcgatgggcatttctagatggcttgatagaagctggctaccactgcgagtggtgcatctactcccatacggagcccaacggtttgctcctgcattaccaacggaggcatccagaacactatgttgattacacctacatggctactaaactgtgggctgggccagacccatcccctccctctctcacaatgccagccgaagccaaaacctacagatgcagggactgtgttttcgaagctgtttccatctgggacatcactaatcactaccaagcattccacccctgggccatgaatggtgatgagtcagtgctactggacatcatcaaggagaaagatgctgtggagaagcccattctttcatccgaagagttggcaggccctgtgaattgtgaaaacagtatacccacccctttcccggagcaggaagctgaatgtccagaggatgcaagactgtcccctgagaaaagcctgcagctagcttcagccaaccccgccatatcctccaccccataccagtgcacggtatgccaatctgagtataacaacttgcacggccttctcactcattatgggaagaagcaccctggcatgaaagtgaaggctgctgactttgcccaggacattgacatcaacccaggtgccgtctacaaatgcaggcattgcccatacatcaacacccgcatccacggcgtactgacccactaccagaagcgacacccgtccatcaaggtgaccgctgaggactttgtgcacgacgtagagcagtctgctgacatatcccagaatgacgtggaggagacgagcaggatcttcaagcaagggtatggcgcctaccggtgcaaactgtgtccgtacacacacggcactttggagaaactaaaaatccactacgagaagtatcacaatcagcctgaatttgatgtcttttcccagtcgcccccgaagctgccagtccccctcgagcccgagatgaccactgaagtgagcccttcccaagtctccatcactgaggaggaggtgggagaggagcccgtgtccacttctcacttctctacctcccacctggtctcccacactgtgttccggtgccagctctgcaagtacttctgctccacgaggaaggggatcgccaggcactaccgcatcaagcacaataatgtccgagcccagccagaaggcaagaacaacctcttcaagtgtgccctgtgtgcctacaccaaccccatccgcaaaggtctggcagcccactaccagaagcgccacgacattgatgcgtattacactcactgcttggcagcctccaggaccatcagcgacaagcccaacaaagtgatcatcccatccccgcccaaggacgactcccctcagctgagcgaggaactccggcgggcagtggagaagaaaaagtgctccttgtgctctttccagtcgttcagcaagaagggcatcgtgtcccattacatgaaacgccacccaggggtgttcccaaagaagcagcacgccagcaagttggggggctacttcacggccgtctatgcagatgagcatgagaagcccacactgatggaagaagaggagagaggcaactttgagaaagccgaggtggagggtgaagctcaggaaatcgagtggctcccattccgctgcatcaaatgcttcaagctgtcctttagcactgcagagctgctgtgcatgcattacactgaccaccacagtcgggacctaaagagggacttcatcattctgggcaacggcccccgcttgcagaactccacctaccagtgtaagcactgtgatagcaaactgcaaagcacagccgagctgacctcacacttgaacattcacaatgaggaattccagaagcgtgccaaacgtcaggagaggaggaaacagcttttgagcaagcagaaatatgcagatggtgcttttgcagatttcaaacaagagaggccttttggtcacttagaagaggtgccaaagatcaaggagaggaaagtggtgggctacaaatgtaaattctgtgtggaagtgcacccaacgctccgagccatctgcaatcacctccgaaagcacgtccagtatggcaatgtcccagctgtgtcagctgctgtgaaggggctgcgttctcatgagaggagccacctggccctggccatgtttacccgcgaggacaagtacagctgccagtattgctcgtttgtttctgctttcaggcacaatttggatcgccatatgcaaacccaccacggacaccataaaccattccgatgcaaactctgctccttcaagtcctcctataacagccggctgaaaacacatatactcaaagctcatgctggtgagcatgcctacaagtgttcttggtgctcattctccaccatgacaatcagccagctgaaggaacactccctcaaggtccacggaaaagccctgaccctccccaggccacggatcgtcagtctcctctcctcacactcccaccactcctcccaaaaagctaccccggctgaagaagtggaagactccaatgactcatcatattcagagcccccagatgttcagcagcagttgaaccactatcagtcagctgccctggcaaggaacaacagccgtgttagccctgtgcctctttctggggctgctgctggcactgagcagaaaactgaagccgtgcttcactgcgaattctgtgaattctcctccggctacatccagagcatcaggcgtcattaccgggacaagcatggtgggaagaagcttttcaagtgcaaagactgctccttttacacaggctttaaatctgcttttactatgcacgtggaagctgggcactcagcagttcccgaggagggccccaaagatcttcgctgtcctctctgcctctatcacaccaaatacaagcgcaacatgattgaccacatcgtgctgcaccgagaagagcgtgttgtccccattgaagtttgccggtccaaactgtccaaatacttgcagggagtagttttccgctgtgataagtgtaccttcacctgctccagtgatgagagcctccagcaacatatagaaaagcacaatgaactgaaaccttacaaatgccagctctgctactatgagaccaagcacacggaggaactggacagccaccttcgggatgagcataaggtaagccgtaactttgagctggttggacgggttaacttggatcagctggaacagatgaaggagaaaatggagagctccagcagcgatgatgaggacaaggaagaagaaatgaacagcaaggctgaagacagagagctgatgagattttctgaccacggggctgctcttaacactgagaagcgttttccatgtgaattttgtggacgggcgttttcacagggctctgagtgggaaagacatgtgctgagacacggcatggcattgaatgacaccaagcaggtgagcagagaagaaatccacccaaaagagatcatggagaacagtgttaaaatgccctccatagaggaaaaggaagatgacgaggccattgggatagacttttccctaaagaatgaaacagtagccatctgtgtagtaactgccgacaaatctctcctggagaatgcagaggccaaaaaagaatgagcgtttggtgaaattcttaatcaaaccttacttgaacagtgatgaaaaagtgggagggctggcttgggctgagaagggagggacagaaaagagaagacagaacaaagctgctttttaggactgaacaatctattttcaaagcactggtacctgtgtgagtgagtatgtaaattaaagttatttaaatggttggaatatgtggctccttttccatcactacatcttttcttccggatcttcatcatggaagtttcatttgttgcggaatatggaagcacctcccaatggtacggtgcaccctgtggtggtcttggacagtatgtggaaacagaagctccatgacggtagaagacttctcattggggagcaactttttgacgcacaacttttggtgcgtttttctagttttaataccttaagctttttcaagacctaactgcagccgctttgggaaaaaaaaacaaaaaacaaaaaacagaaaacaaaaaaaaaaaaa

SEQ ID NO: 626 - protein, 2506 aa, Homo sapiens
MEVLQCDGCDFRAPSYEDLKAHIQDVHTAFLQPTDVAEDNVNELRCGSVNASNQTEVEFSSIKDEFAIAEDLSGQNATSLGTGGYYGHSPGYYGQHIAANPKPTNKFFQCKFCVRYFRSKNLLIEHTRKVHGAQAEGSSSGPPVPGSLNYNIMMHEGFGKVFSCQFCTYKSPRRARIIKHQKMYHKNNLKETTAPPPAPAPMPDPVVPPVSLQDPCKELPAEVVERSILESMVKPLTKSRGNFCCEWCSYQTPRRERWCDHMMKKHRSMVKILSSLRQQQEGTNLPDVPNKSAPSPTSNSTYLTMNAASREIPNTTVSNFRGSMGNSIMRPNSSASKFSPMSYPQMKPKSPHNSGLVNLTERSRYGMTDMTNSSADLETNSMLNDSSSDEELNEIDSENGLSAMDHQTSGLSAEQLMGSDGNKLLETKGIPFRRFMNRFQCPFCPFLTMHRRSISRHIENIHLSGKTAVYKCDECPFTCKSSLKLGAHKQCHTGTTSDWDAVNSQSESISSSLNEGVVSYESSSINGRKSGVMLDPLQQQQPPQPPPPPPPPPPSQPQPLQQPQPPQLQPPHQVPPQPQTQPPPTQQPQPPTQAAPLHPYKCTMCNYSTTTLKGLRVHQQHKHSFCDNLPKFEGQPSSLPLENETDSHPSSSNTVKKSQTSILGLSSKNNFVAKASRKLANDFPLDLSPVKKRTRIDEIASNLQSKINQTKQQEDAVINVEDDEEEEEDNEVEIEVELDREEEPTEPIIEVPTSFSAQQIWVRDTSEPQKEPNFRNITHDYNATNGAEIELTLSEDEEDYYGSSTNLKDHQVSNTALLNTQTPIYGTEHNSENTDFGDSGRLYYCKHCDFNNKSARSVSTHYQRMHPYIKFSFRYILDPNDHSAVYRCLECYIDYTNFEDLQQHYGEHHPEAMNVLNFDHSDLIYRCRFCSYTSPNVRSLMPHYQRMHPTVKINNAMIFSSYVVEQQEGLNTESQTLREILNSAPKNMATSTPVARGGGLPATFNKNTPKTFTPECENQKDPLVNTVVVYDCDVCSFASPNMHSVLVHYQKKHPEEKASYFRIQKTMRMVSVDRGSALSQLSFEVGAPMSPKMSNMGSPPPPQPPPPDLSTELYYCKHCSYSNRSVVGVLVHYQKRHPEIKVTAKYIRQAPPTAAMMRGVEGPQGSPRPPAPIQQLNRSSSERDGPPVENEMFFCQHCDYGNRTVKGVLIHYQKKHRDFKANADVIRQHTATIRSLCDRNQKKPASCVLVSPSNLERDKTKLRALKCRQCSYTSPYFYALRKHIKKDHPALKATVTSIMRWAFLDGLIEAGYHCEWCIYSHTEPNGLLLHYQRRHPEHYVDYTYMATKLWAGPDPSPPSLTMPAEAKTYRCRDCVFEAVSIWDITNHYQAFHPWAMNGDESVLLDIIKEKDAVEKPILSSEELAGPVNCENSIPTPFPEQEAECPEDARLSPEKSLQLASANPAISSTPYQCTVCQSEYNNLHGLLTHYGKKHPGMKVKAADFAQDIDINPGAVYKCRHCPYINTRIHGVLTHYQKRHPSIKVTAEDFVHDVEQSADISQNDVEETSRIFKQGYGAYRCKLCPYTHGTLEKLKIHYEKYHNQPEFDVFSQSPPKLPVPLEPEMTTEVSPSQVSITEEEVGEEPVSTSHFSTSHLVSHTVFRCQLCKYFCSTRKGIARHYRIKHNNVRAQPEGKNNLFKCALCAYTNPIRKGLAAHYQKRHDIDAYYTHCLAASRTISDKPNKVIIPSPPKDDSPQLSEELRRAVEKKKCSLCSFQSFSKKGIVSHYMKRHPGVFPKKQHASKLGGYFTAVYADEHEKPTLMEEEERGNFEKAEVEGEAQEIEWLPFRCIKCFKLSFSTAELLCMHYTDHHSRDLKRDFIILGNGPRLQNSTYQCKHCDSKLQSTAELTSHLNIHNEEFQKRAKRQERRKQLLSKQKYADGAFADFKQERPFGHLEEVPKIKERKVVGYKCKFCVEVHPTLRAICNHLRKHVQYGNVPAVSAAVKGLRSHERSHLALAMFTREDKYSCQYCSFVSAFRHNLDRHMQTHHGHHKPFRCKLCSFKSSYNSRLKTHILKAHAGEHAYKCSWCSFSTMTISQLKEHSLKVHGKALTLPRPRIVSLLSSHSHHSSQKATPAEEVEDSNDSSYSEPPDVQQQLNHYQSAALARNNSRVSPVPLSGAAAGTEQKTEAVLHCEFCEFSSGYIQSIRRHYRDKHGGKKLFKCKDCSFYTGFKSAFTMHVEAGHSAVPEEGPKDLRCPLCLYHTKYKRNMIDHIVLHREERVVPIEVCRSKLSKYLQGVVFRCDKCTFTCSSDESLQQHIEKHNELKPYKCQLCYYETKHTEELDSHLRDEHKVSRNFELVGRVNLDQLEQMKEKMESSSSDDEDKEEEMNSKAEDRELMRFSDHGAALNTEKRFPCEFCGRAFSQGSEWERHVLRHGMALNDTKQVSREEIHPKEIMENSVKMPSIEEKEDDEAIGIDFSLKNETVAICVVTADKSLLENAEAKKE

SEQ ID NO: 627 - DNA, 3151 bp, Homo sapiens
gctcttacgcggtctgtgggagaccggagcgggagacagcggtgacaggagcagcggccgggagcccttagggaggcagacagagcctgcagccaatgccccaggagccctcggttccaaccaactgatgcccctgtgcccactggcccacgccatgcagccccagtccgttctgcacagcggctacttccacccactacttcgggcctggcagacagccaccaccaccctcaatgcctccaacctcatctaccccatctttgtcacggatgttcctgatgacatacagcctatcaccagcctcccaggagtggccaggtatggtgtgaagcggctggaagagatgctgaggcccttggtggaagagggcctacgctgtgtcttgatctttggcgtccccagcagagttcccaaggacgagcggggttccgcagctgactccgaggagtccccagctattgaggcaatccatctgttgaggaagaccttccccaacctcctggtggcctgtgatgtctgcctgtgtccctacacctcccatggtcactgcgggctcctgagtgaaaacggagcattccgggctgaggagagccgccagcggctggctgaggtggcattggcgtatgccaaggcaggatgtcaggtggtagccccgtcggacatgatggatggacgcgtggaagccatcaaagaggccctgatggcacatggacttggcaacagggtatcggtgatgagctacagtgccaaatttgcttcctgtttctatggccctttccgggatgcagctaagtcaagcccagcttttggggaccgccgctgctaccagctgccccctggagcacgaggcctggctctccgagctgtggaccgggatgtacgggaaggagctgacatgctcatggtgaagccgggaatgccctacctggacatcgtgcgggaggtaaaggacaagcaccctgacctccctctcgccgtgtaccacgtctctggagagtttgccatgctgtggcatggagcccaggccggggcatttgatctcaaggctgccgtactggaggccatgactgccttccgcagagcaggtgctgacatcatcatcacctactacacaccgcagctgctgcagtggctgaaggaggaatgatggagacagtgccaggcccaagaactagaactttaaaacgttcccggggcctcagacaagtgaaaaccaaagtaaatgctgcttttagaactgtgccctcatgccctcttcctgctcacatgctagcggggcccagcagccctgggtggttttgccagcatgctaactcttgtaactcgcagctgcatcctatgagctctcccaagcttccccgcccctcccctgggtcagccgtgaggcccacctttgccaccctcagctctttcctctggtgtggcttcagcttgaaagcaacctggagtcgggggcacagcctttggggcctggctgggagagggtcttggagcattaggggaagaagagagcagtgggatcttggggcctgagaagccttggaacgcttctggcagcagagctgggtgtgggaatgaggcctagatcgatatccctgggttagagttgaaatttgccgcaattccactggaaggcatttcccacgaggccagaggttgccaggctgcctgaggtctcctattctactctgaaccataaacccagagaagaattactcattaaccagcataaatactgcctgaggatcaaaactcagaggcaaagagggagttcctgactgctagaggtgccaccaccacaaacactttttattcaggagatactttttgagaatctctgctctgttcctaggttcagtgctgggtcctgggaatacagcaggacagacctcagcttatctcttcatagaaattatacaaagagaattggggagacagctaagaagaaaacaaagaaataaagcagttacaaattgtgataagtgctttgaaggaaagaaggggtctgagacaacaacagggaaggggcctctcttgaaacagtagttgggaaggaggcagacatgcaccagtgatgtggtgacaggtgctctgaaggaggtcaccaggacctgacctctttgaaggatcagaaaatacttccctgaaggactgacatttgagcctagacctgaagggtgagccatcaagctaagacaattggggaagagcattccagggagagggaggagttgtgcaaaggccctggggctccttctagctggaggaatgcaaggctagcttgtctggagcactgagaggatggcctgaactgagtggagagagacagaccaggaccaaaccatgcagaggtcaagggccacattcaccttttcagagtgactcaatcaaatttgtagtttgtaaaagtattttaacagctctgcggcaaagtgcaaatgaaaagtcttgatggcatggactggagcggggacagtggggatggagaaaggggaatggattgtggatgtgtttagaaggtagattcgatgtgaaggatgaatctggcttgaccttctgggtggctgatgggccatttactgagatggggcagcctggaagaggaacagaagcagggtcggggtggagggagaatactaaacttagcttgagacattttgcaataaggaagctatatctagagtgcttatgtgactcacctaaggccactcaacaagtttgtggcagaactggattagaactgcacagaaaacagccaagctgggatttgaacccatgtagtccaactccaaggcctctgcccctaaccactgtgccataccacctcccaataatcaacagcaaaattataggtctaacaatgttttatagacacccctccatttatgtgatgggtttgcatcctgataaacccatcataagttgaaaatatgatcataagttgaaaatatgatcataagtcaaaaatgtatttaatatacctaacctaccaaacatcatagcttagcctagcctgccttaaacatgctcagaacacttacattagcctacagtgggcaaaactatccaacacaaaatctatattgtaataaagttgtaaagaattttgaataaaaattcaatatttgaagtacaaaaaaaaaaaaaaaaa

SEQ ID NO: 628 - protein, 339 aa, Homo sapiens
MPLCPLAHAMQPQSVLHSGYFHPLLRAWQTATTTLNASNLIYPIFVTDVPDDIQPITSLPGVARYGVKRLEEMLRPLVEEGLRCVLIFGVPSRVPKDERGSAADSEESPAIEAIHLLRKTFPNLLVACDVCLCPYTSHGHCGLLSENGAFRAEESRQRLAEVALAYAKAGCQVVAPSDMMDGRVEAIKEALMAHGLGNRVSVMSYSAKFASCFYGPFRDAAKSSPAFGDRRCYQLPPGARGLALRAVDRDVREGADMLMVKPGMPYLDIVREVKDKHPDLPLAVYHVSGEFAMLWHGAQAGAFDLKAAVLEAMTAFRRAGADIIITYYTPQLLQWLKEE

SEQ ID NO: 629 - DNA, 3317 bp, Homo sapiens
gctcttacgcggtctgtgggagaccggagcgggagacagcggtgacaggagcagcggccgggagcccttagggaggcagacagagcctgcagccaatgccccaggagccctcggttccaaccaactgatgcccctgtgcccactggcccacgccatgcagccccagtccgttctgcacagcggctacttccacccactacttcgggcctggcagacagccaccaccaccctcaatgcctccaacctcatctaccccatctttgtcacgccctgggcttggccaggcagggaagccagacactggatcccatcctcctcccaccatctccacttccatatttctttcctgcttcccaaccatccctctcagtcgcccccgcaccactggcccttcccacagctaccaatccatatcccacccccgctcttgcagggatgttcctgatgacatacagcctatcaccagcctcccaggagtggccaggtatggtgtgaagcggctggaagagatgctgaggcccttggtggaagagggcctacgctgtgtcttgatctttggcgtccccagcagagttcccaaggacgagcggggttccgcagctgactccgaggagtccccagctattgaggcaatccatctgttgaggaagaccttccccaacctcctggtggcctgtgatgtctgcctgtgtccctacacctcccatggtcactgcgggctcctgagtgaaaacggagcattccgggctgaggagagccgccagcggctggctgaggtggcattggcgtatgccaaggcaggatgtcaggtggtagccccgtcggacatgatggatggacgcgtggaagccatcaaagaggccctgatggcacatggacttggcaacagggtatcggtgatgagctacagtgccaaatttgcttcctgtttctatggccctttccgggatgcagctaagtcaagcccagcttttggggaccgccgctgctaccagctgccccctggagcacgaggcctggctctccgagctgtggaccgggatgtacgggaaggagctgacatgctcatggtgaagccgggaatgccctacctggacatcgtgcgggaggtaaaggacaagcaccctgacctccctctcgccgtgtaccacgtctctggagagtttgccatgctgtggcatggagcccaggccggggcatttgatctcaaggctgccgtactggaggccatgactgccttccgcagagcaggtgctgacatcatcatcacctactacacaccgcagctgctgcagtggctgaaggaggaatgatggagacagtgccaggcccaagaactagaactttaaaacgttcccggggcctcagacaagtgaaaaccaaagtaaatgctgcttttagaactgtgccctcatgccctcttcctgctcacatgctagcggggcccagcagccctgggtggttttgccagcatgctaactcttgtaactcgcagctgcatcctatgagctctcccaagcttccccgcccctcccctgggtcagccgtgaggcccacctttgccaccctcagctctttcctctggtgtggcttcagcttgaaagcaacctggagtcgggggcacagcctttggggcctggctgggagagggtcttggagcattaggggaagaagagagcagtgggatcttggggcctgagaagccttggaacgcttctggcagcagagctgggtgtgggaatgaggcctagatcgatatccctgggttagagttgaaatttgccgcaattccactggaaggcatttcccacgaggccagaggttgccaggctgcctgaggtctcctattctactctgaaccataaacccagagaagaattactcattaaccagcataaatactgcctgaggatcaaaactcagaggcaaagagggagttcctgactgctagaggtgccaccaccacaaacactttttattcaggagatactttttgagaatctctgctctgttcctaggttcagtgctgggtcctgggaatacagcaggacagacctcagcttatctcttcatagaaattatacaaagagaattggggagacagctaagaagaaaacaaagaaataaagcagttacaaattgtgataagtgctttgaaggaaagaaggggtctgagacaacaacagggaaggggcctctcttgaaacagtagttgggaaggaggcagacatgcaccagtgatgtggtgacaggtgctctgaaggaggtcaccaggacctgacctctttgaaggatcagaaaatacttccctgaaggactgacatttgagcctagacctgaagggtgagccatcaagctaagacaattggggaagagcattccagggagagggaggagttgtgcaaaggccctggggctccttctagctggaggaatgcaaggctagcttgtctggagcactgagaggatggcctgaactgagtggagagagacagaccaggaccaaaccatgcagaggtcaagggccacattcaccttttcagagtgactcaatcaaatttgtagtttgtaaaagtattttaacagctctgcggcaaagtgcaaatgaaaagtcttgatggcatggactggagcggggacagtggggatggagaaaggggaatggattgtggatgtgtttagaaggtagattcgatgtgaaggatgaatctggcttgaccttctgggtggctgatgggccatttactgagatggggcagcctggaagaggaacagaagcagggtcggggtggagggagaatactaaacttagcttgagacattttgcaataaggaagctatatctagagtgcttatgtgactcacctaaggccactcaacaagtttgtggcagaactggattagaactgcacagaaaacagccaagctgggatttgaacccatgtagtccaactccaaggcctctgcccctaaccactgtgccataccacctcccaataatcaacagcaaaattataggtctaacaatgttttatagacacccctccatttatgtgatgggtttgcatcctgataaacccatcataagttgaaaatatgatcataagttgaaaatatgatcataagtcaaaaatgtatttaatatacctaacctaccaaacatcatagcttagcctagcctgccttaaacatgctcagaacacttacattagcctacagtgggcaaaactatccaacacaaaatctatattgtaataaagttgtaaagaattttgaataaaaattcaatatttgaagtacaaaaaaaaaaaaaaaaa

SEQ ID NO: 630 - protein, 359 aa, Homo sapiens
MPPTSSTPSLSRPGLGQAGKPDTGSHPPPTISTSIFLSCFPTIPLSRPRTTGPSHSYQSISHPRSCRDVPDDIQPITSLPGVARYGVKRLEEMLRPLVEEGLRCVLIFGVPSRVPKDERGSAADSEESPAIEAIHLLRKTFPNLLVACDVCLCPYTSHGHCGLLSENGAFRAEESRQRLAEVALAYAKAGCQVVAPSDMMDGRVEAIKEALMAHGLGNRVSVMSYSAKFASCFYGPFRDAAKSSPAFGDRRCYQLPPGARGLALRAVDRDVREGADMLMVKPGMPYLDIVREVKDKHPDLPLAVYHVSGEFAMLWHGAQAGAFDLKAAVLEAMTAFRRAGADIIITYYTPQLLQWLKEE

SEQ ID NO: 631 - DNA, 2185 bp, Homo sapiens
agcggcgcagggcaccatgggaaacggacggaagctccattgagccaaataagttggccacgtggggcggaacggaaacctcgcagggtcagaccgtagcgacgcgggaagtccggacgcagtagctccctgaagcggaggcgaaggggagtttaagccccagcggcggcaatggcggagaggcccgaggacctaaacctgcccaatgccgtgatcaccaggatcatcaaggaggcgctcccggacggtgtcaacatctccaaggaggcccggagcgccatctcccgcgccgccagcgtcttcgtgctgtacgccacatcctgtgctaacaactttgcaatgaaaggaaagcggaagacgctgaatgccagtgatgtgctctcagccatggaagagatggagttccagcggttcgttatcccattgaaagaagctctggaagcatataggcgggagcagaaaggcaagaaggaggcctcagagcaaaagaagaaggacaaagacaaaaaaacagactcggaagagcaagacaagagcagggatgaggacaatgatgaagacgaagaaaggctggaagaagaagaacagaatgaagaggaagaagtagacaactgaaaagggcgggagactgtggcaccttggaaggtaccacttgaaatgagacgtgctacgtgtttctgtgaagcttttccatgctgggcagagtagtctcaggcaaaagtgcctgaaaagatcagaataaaaactgactagaaataccgtcaaaaccagcacttaccaaactcagagcatctgagtagcagaatcctgttttgcttcatcaatctgaaggttatggccttttgacaagagggattctgaacgactaaattagtcagtttgctcgcttttgtttacttaaatgtatggttagatggtttttgatctgcagtcttccctagtcccccaaataagtaataataacttccatgctgcctgctgtgttccagatcacagaggcagccaaggctcaggaaaaactggggctttgcttatggtcagcctatgtttgattgcacagtctttgacaatagtagcttactaagactgctcagaatgagtaagctttaggaaactactaaaatgctgtgggagaataacaaaatccgttctctctcttcacttgacagaagcattaactgaattttgtttttcatagacccacttggcccaaaacctttctatattgcctgtagatgatcggcctgctggtgtggtagtaatctgatcacagatattcttaaatcagcagtgtggaatggtattagtcaaacatggtgccagtgtcttttacaaaaacagatggcatagtgtcagatgtaccttactctctgctactgtacagctttaggatttgtcatcacctcccggaaggtgtaaaaccccaggcttcctcttcttgtagtccatctcccagacttgtgactatggcttttcattcttcaattcatgacgagtgccaaacttgattttctctaggcacagctttctccctctgtgcctcctgcttcctttctctctcctgcctctcctctgctccccatcccactttctcatctgcctccttttctcacttctgtcagtctgtaagctttgataacctgcttaatactccaaagtgtgagttcctctgatctcttgattccttagttctaatctcacgttttgtttttaagagatggagtctctcactctgtggcccaggctggagtgcagtggcatgatcatagctcattgcatccttgaaatcctgggctcaggtgatcctcccgcctgagcctcctgagtatctgggactacagatgcgtgccaccaagcctggctaattttgtctcatgtcttctaaaaattattttgtgaagccccttcacaaaaaaccttaagggaaatctgatggtgctcaggaatctaactctccctaaaccatcctctttaactgcttctaaaatatctctgttggcctttcttagcctttttctgtttccattcagtgctccaagcgctttttgtttctaagttgagtgcttggggtttgacaggtagtgacgtgtagtttgacactgttaacttgttaaatacagtgaaaagtttgtgagtgaagaatgctgagaagattgtaatgctttgtacaaataaaagtcttgtt

SEQ ID NO: 632 - protein, 147 aa, Homo sapiens
MAERPEDLNLPNAVITRIIKEALPDGVNISKEARSAISRAASVFVLYATSCANNFAMKGKRKTLNASDVLSAMEEMEFQRFVIPLKEALEAYRREQKGKKEASEQKKKDKDKKTDSEEQDKSRDEDNDEDEERLEEEEQNEEEEVDN

SEQ ID NO: 633 - DNA, 2099 bp, Homo sapiens
cctttaggacccgaggcaggctctgggcccgccgggtccgttaatctcaccgcgccgcaaggggccacgttttaccacttgatttagcaaccctaagcggtttggaatctgctttgctctcacaggacctcagcccgtcgtgatcagattctcccactttcttttttctttcctggaatggagtgggcagtctttttccatctctaccgaagttgatgttcatttttaatcttttcgcccctcacgcttttgtaataatggtactaagactgagtgttatttagattttattgttgttgtttgtgtttaacgcgaactatttaggcagcccagggataatgctggccatatagagatgcgcctgattaggtctcaggagtcaattcggactgggcagagcactagaatgctgcagggttggcctttggcctaaaccatttctagctatggacttgccagatgagagccagtgggacgaaaccacctgtggcttggctgtttgtcagcacccacaatgctgggcaactatccgccgcattgagaggggccatcctcgaatcctcggctcatcctgcaaaactcccctggatgctgaagataaactcccagtgctcaccgtggtagacatcttagattccggctttgcagctcatcatttaccagaatgtacctttactaaggcccattctttattgtctcagagttcaaagttttactccaaatttcatggcaggcctccgaagggtttacctgacaaaagtttgatcaactgtactaacagacttcccaaatttccagtgttgaatttgaatgagacgcaacttccctgccctgaagatgttagaaatatggttgtattgtggatcccagaagaaacagagatacatgtgagccagcatgggaagaagaaaagaaagaactcggcagtgaaaagcaagtcatttctgggtctctctggaaatcagtccgcaggaacacgagtaggaacaccagggatgatcgtgcctcccccaaccccagtgcaattgtctgaacaattcagttcagatttcctacctctctgggctcaatccgaagcgttacctcaggatctactgaaggaacttttgccaggtggaaagcaaaccatgctctgtccagagatgaagataaaattggccatgatgaaaaagaatcttcccttggaaaagaaccgacctgacagtgtgatttcttctaagatgtttctatctatacaccgcctcaccctggaaagaccagcactgcgatatcctgaacgtttgaagaaattacataacctgaagacagaaggttacaggaaacagcagcagcggcagcagcagcagcagcagcaacagaagaaggtgaaaacacctattaagaaacaggaggctaaaaagaaagccaagagtgatccagggatccagagcacttcacataaacatccagttaccaccgttcatgaccgtctctatggttacagaactctgccaggtcagaacagtgacatgaagcagcagcagcagatggaaaaaggaaccacttcgaaacaggattccacggagagaccaaagatgaactactatgaccatgcggatttccaccacagtgtaaaaagtcctgaattgtatgaaacagaacccactaacaaggacattagtgctccagtggacgctgtgccagaagcccaggctgccaggcaaaagaagatctcctttaacttttcagaaattatggctagcacaggctggaactctgagctcaaactacttaggattcttcaggacactgatgatgaggatgaggaggaccagtcctctggggcagagtgagaagcctctggaggaatagactgaaggcatcccctggggcagccgtgttccaaagcgggatggctggtatcctgagggcagcaacgtttcacataagggcaagaggagaggggcttctgctctctggagcctttaccagggcctgagctctgagcttagggattccattttctttgttcacctctacttgcctctaaaataaatgtaggagaaaaaaaaaaaaaaaaaaaaaaaaaaaaaaaaaaaaaaaaaaaaaaaaaaaaaaaa

SEQ ID NO: 634 - protein, 461 aa, Homo sapiens
MDLPDESQWDETTCGLAVCQHPQCWATIRRIERGHPRILGSSCKTPLDAEDKLPVLTVVDILDSGFAAHHLPECTFTKAHSLLSQSSKFYSKFHGRPPKGLPDKSLINCTNRLPKFPVLNLNETQLPCPEDVRNMVVLWIPEETEIHVSQHGKKKRKNSAVKSKSFLGLSGNQSAGTRVGTPGMIVPPPTPVQLSEQFSSDFLPLWAQSEALPQDLLKELLPGGKQTMLCPEMKIKLAMMKKNLPLEKNRPDSVISSKMFLSIHRLTLERPALRYPERLKKLHNLKTEGYRKQQQRQQQQQQQQKKVKTPIKKQEAKKKAKSDPGIQSTSHKHPVTTVHDRLYGYRTLPGQNSDMKQQQQMEKGTTSKQDSTERPKMNYYDHADFHHSVKSPELYETEPTNKDISAPVDAVPEAQAARQKKISFNFSEIMASTGWNSELKLLRILQDTDDEDEEDQSSGAE

SEQ ID NO: 635 - DNA, 2564 bp, Homo sapiens
agactccggttactggggagcaacacagccgcctcgggttgcagacgctcctgtccgggtcgcagtgggacgccatggagcgctccctgcaccgcgtctccctcgggagccggcgtgcccacccggacttgtccttctacctcaccacctttggtcagctgaggctgtccattgatgcccaggaccgggttctgctgcttcacattatagaaggtaaaggcctgatcagcaaacagcctggcacctgtgatccgtatgtgaagatttctttgatccctgaagatagtagactacgccaccagaagacgcagaccgttccagactgcagagacccggctttccacgagcacttcttctttcctgtccaagaggaggatgatcagaagcgtctcttggttactgtgtggaacagggccagccagtccagacagagtggactcattggctgcatgagctttggggtgaagtctctcctgactccagacaaggagatcagtggttggtactacctcctaggggagcacctgggccggaccaagcacttgaaggtggccaggcggcgactgcggccgctgagagacccgctgctgagaatgccaggaggtggggacactgagaatgggaagaaactaaagatcaccatcccgaggggaaaggacggctttggcttcaccatctgctgcgactctccagttcgagtccaggccgtggattccgggggtccggcggaacgggcagggctgcagcagctggacacggtgctgcagctgaatgagaggcctgtggagcactggaaatgtgtggagctggcccacgagatccggagctgccccagtgagatcatcctactcgtgtggcgcatggtcccccaggtcaagccaggaccagatggcggggtcctgcggcgggcctcctgcaagtcgacacatgacctccagtcaccccccaacaaacgggagaagaactgcacccatggggtccaggcacggcctgagcagcgccacagctgccacctggtatgtgacagctctgatgggctgctgctcggcggctgggagcgctacaccgaggtggccaagcgcgggggccagcacaccctgcctgcactgtcccgtgccactgcccccaccgaccccaactacatcatcctggccccgctgaatcctgggagccagctgctccggcctgtgtaccaggaggataccatccccgaagaatcagggagtcccagtaaagggaagtcctacacaggcctggggaagaagtcccggctgatgaagacagtgcagaccatgaagggccacgggaactaccaaaactgcccggttgtgaggccgcatgccacgcactcaagctatggcacctacgtcaccctggcccccaaagtcctggtgttccctgtctttgttcagcctctagatctctgtaatcctgcccggaccctcctgctgtcagaggagctgctgctgtatgaagggaggaacaaggctgccgaggtgacactgtttgcctattcggacctgctgctcttcaccaaggaggacgagcctggccgctgcgacgtcctgaggaaccccctctacctccagagtgtgaagctgcaggaaggttcttcagaagacctgaaattctgcgtgctctatctagcagagaaggcagagtgcttattcactttggaagcgcactcgcaggagcagaagaagagagtgtgctggtgcctgtcggagaacatcgccaagcagcaacagctggcagcatcacccccggacagcaagaaactccaccctttcggctctctccagcaggagatggggccggtcaactcaaccaatgccacccaggatagaagctttacctcaccaggacagactctgattggctgagcaaacccaagggcgggactctgcttctggcaacttaaccctttcttgggcatcccctaccacacagtaacctcacctcaactggacctgaaacagaggaccaagatggtgggtctagggtcatctgaagggagtggtcccaagggtgcatgtggatgtcaacagaaggaccacaatggtgtgagaggccttgtgggcatgcagagactggcagcagaaagtcccaagaggagaggactcagaggcttcttccttccaaggaggaggaggaggaggacattccacatctgggcttccagtggtggctcccggacctgccttgggggcagcaggagaggttgggagaggtcaccctgatgaagaacaatgccatgatctgctgctgccagaggacatctccgcccatccactcattttccacctgtacacattggctcattcattcgatggatatttcgggtgcatctactttatgccaggctctatgctaggagctggggatactgtggagaaaaagtcggatatggtctcgctctcatcaagatttcagtctagctgggagtgagcgttaaataagtcaataccaacacacacacgtgcacacacgtgatggcaagctgtgatcatctatgaaagaaaaaacacagatttctttaagagggaaaaaaaaaaaaaaaaaaa

SEQ ID NO: 636 - protein, 602 aa, Homo sapiens
MERSLHRVSLGSRRAHPDLSFYLTTFGQLRLSIDAQDRVLLLHIIEGKGLISKQPGTCDPYVKISLIPEDSRLRHQKTQTVPDCRDPAFHEHFFFPVQEEDDQKRLLVTVWNRASQSRQSGLIGCMSFGVKSLLTPDKEISGWYYLLGEHLGRTKHLKVARRRLRPLRDPLLRMPGGGDTENGKKLKITIPRGKDGFGFTICCDSPVRVQAVDSGGPAERAGLQQLDTVLQLNERPVEHWKCVELAHEIRSCPSEIILLVWRMVPQVKPGPDGGVLRRASCKSTHDLQSPPNKREKNCTHGVQARPEQRHSCHLVCDSSDGLLLGGWERYTEVAKRGGQHTLPALSRATAPTDPNYIILAPLNPGSQLLRPVYQEDTIPEESGSPSKGKSYTGLGKKSRLMKTVQTMKGHGNYQNCPVVRPHATHSSYGTYVTLAPKVLVFPVFVQPLDLCNPARTLLLSEELLLYEGRNKAAEVTLFAYSDLLLFTKEDEPGRCDVLRNPLYLQSVKLQEGSSEDLKFCVLYLAEKAECLFTLEAHSQEQKKRVCWCLSENIAKQQQLAASPPDSKKLHPFGSLQQEMGPVNSTNATQDRSFTSPGQTLIG

SEQ ID NO: 637 - DNA, 2914 bp, Homo sapiens
ttctcggctgatctctctgggtaggtgccctctgggggcagtacccctgcctgagtggcacttcccctcctggctttgtttggtttggcctcgatttagaacagggttggcagaggcaggctgacttgcatttctggttttgggtttgttgctgcactttccccaaggggtgggcgggctctgactgacagtcaccactgggacaggcctgggccccaccctcaccacccaggaaaggggaaatgcggcccgctccccactcagtgccactctgtgccactccgtgccaggccctgagggcacccggttgctgcttccttccgtctttccccaaggactatcagagatgccagcgtgacccctgacacgtgtgtgcagcagcctgcagctgccccaagccatggctgaacactgactcccagctgtggggcttcaccattacagactccccagggcttcaaagacttctcagcttcgagcatggcttttggctgtcagggcagctgtacaatagtggatgtttgagacggaggcagatgagaagagggagatggccttggaggaagggaaggggcctggtgccgaggattccccacccagcaaggagccctctcctggccaggagcttcctccaggacaagaccttccacccaacaaggactccccttctgggcaggaacccgctcccagccaagaaccactgtccagcaaagactcagctacctctgaaggatcccctccaggcccagatgctccgcccagcaaggatgtgccaccatgccaggaaccccctccagcccaagacctctcaccctgccaggacctacctgctggtcaagaacccctgcctcaccaggaccctctactcaccaaagacctccctgccatccaggaatcccccacccgggaccttccaccctgtcaagatctgcctcctagccaggtctccctgccagccaaggcccttactgaggacaccatgagctccggggacctactagcagctactggggacccacctgcggcccccaggccagccttcgtgatccctgaggtccggctggatagcacctacagccagaaggcaggggcagagcagggctgctcgggagatgaggaggatgcagaagaggccgaggaggtggaggagggggaggaaggggaggaggacgaggatgaggacaccagcgatgacaactacggagagcgcagtgaggccaagcgcagcagcatgatcgagacgggccagggggctgagggtggcctctcactgcgtgtgcagaactcgctgcggcgccggacgcacagcgagggcagcctgctgcaggagccccgagggccctgctttgcctccgacaccaccttgcactgctcagacggtgagggcgccgcctccacctggggcatgccttcgcccagcaccctcaagaaagagctgggccgcaatggtggctccatgcaccacctttccctcttcttcacaggacacaggaagatgagcggggctgacaccgttggggatgatgacgaagcctcccggaagagaaagagcaaaaacctagccaaggacatgaagaacaagctggggatcttcagacggcggaatgagtcccctggagcccctcccgcgggcaaggcagacaaaatgatgaagtcattcaagcccacctcagaggaagccctcaagtggggcgagtccttggagaagctgctggttcacaaatacgggttagcagtgttccaagccttccttcgcactgagttcagtgaggagaatctggagttctggttggcttgtgaggacttcaagaaggtcaagtcacagtccaagatggcatccaaggccaagaagatctttgctgaatacatcgcgatccaggcatgcaaggaggtcaacctggactcctacacgcgggagcacaccaaggacaacctgcagagcgtcacgcggggctgcttcgacctggcacagaagcgcatcttcgggctcatggaaaaggactcgtaccctcgctttctccgttctgacctctacctggaccttattaaccagaagaagatgagtcccccgctttaggggccactggagtcgagctcagcgttcacaccaggcgggctgggtcccctgcccacctgcctccctgccccctgtgacggagggggcaagcaagcccccagaggctgtgtctctggacagacggatagacatacggaagcgaggcctggaccaagagaggcccaggctactggaggagtagaaggatgggccccgtggggtccccactgccccggtacgagggggcccaagaccctggcaggtcaggggccctggccaagccagatctggagctgctgctccctgctgcggagaccgcggaggcttcgcgttgaccaagttccttaaagaactggctgatggggcaggaggtccaggcctgggctctcgggccctcctagagggccattggagcttgcagctcagacccccactttgagttttatttatttaaatagtagttggatgcttggcacgtcgtcctgtaataggaaacccttgcctcatcagttttcctgatttacaagtgcaatattttagccaatgccttgggagaagctgccatgcaaaggtggacaccattctccagcttcaggggatatgctcgtcccgggcaccggtggcaggcagctggccttctggactaaggcagcctggggggacactgcagtctggctacacacagagatctggcaccccctgggtggagtgtccctcgggggctttgggaaagcatggcaccctcagaccacacagtagccaagttctggagcaaataaaaggcctgtgttatttcttgttcttgaaaaaaaaaaaaaaaaaaaaaaaaaaaaaaaaaaaaaaaaaaaaaaaaaaaaa

SEQ ID NO: 638 - protein, 519 aa, Homo sapiens
MFETEADEKREMALEEGKGPGAEDSPPSKEPSPGQELPPGQDLPPNKDSPSGQEPAPSQEPLSSKDSATSEGSPPGPDAPPSKDVPPCQEPPPAQDLSPCQDLPAGQEPLPHQDPLLTKDLPAIQESPTRDLPPCQDLPPSQVSLPAKALTEDTMSSGDLLAATGDPPAAPRPAFVIPEVRLDSTYSQKAGAEQGCSGDEEDAEEAEEVEEGEEGEEDEDEDTSDDNYGERSEAKRSSMIETGQGAEGGLSLRVQNSLRRRTHSEGSLLQEPRGPCFASDTTLHCSDGEGAASTWGMPSPSTLKKELGRNGGSMHHLSLFFTGHRKMSGADTVGDDDEASRKRKSKNLAKDMKNKLGIFRRRNESPGAPPAGKADKMMKSFKPTSEEALKWGESLEKLLVHKYGLAVFQAFLRTEFSEENLEFWLACEDFKKVKSQSKMASKAKKIFAEYIAIQACKEVNLDSYTREHTKDNLQSVTRGCFDLAQKRIFGLMEKDSYPRFLRSDLYLDLINQKKMSPPL

SEQ ID NO: 639 - DNA, 3741 bp, Homo sapiens
ttggggaggtgagaggtgatttcctgccattcttctgtggggcgggcttcccagggtgctcatgccaggctgacgggtccagtgcgggctcccgctgctgggggagagctgggttttcatggggcggcagccgaggcaggacccgcagccatgaaccgcttcaatgggctctgcaaggtgtgctcggagcgccgctaccgccagatcaccatcccgaggggaaaggacggctttggcttcaccatctgctgcgactctccagttcgagtccaggccgtggattccgggggtccggcggaacgggcagggctgcagcagctggacacggtgctgcagctgaatgagaggcctgtggagcactggaaatgtgtggagctggcccacgagatccggagctgccccagtgagatcatcctactcgtgtggcgcatggtcccccaggtcaagccaggaccagatggcggggtcctgcggcgggcctcctgcaagtcgacacatgacctccagtcaccccccaacaaacgggagaagaactgcacccatggggtccaggcacggcctgagcagcgccacagctgccacctggtatgtgacagctctgatgggctgctgctcggcggctgggagcgctacaccgaggtggccaagcgcgggggccagcacaccctgcctgcactgtcccgtgccactgcccccaccgaccccaactacatcatcctggccccgctgaatcctgggagccagctgctccggcctgtgtaccaggaggataccatccccgaagaatcagggagtcccagtaaagggaagtcctacacaggcctggggaagaagtcccggctgatgaagacagtgcagaccatgaagggccacgggaactaccaaaactgcccggttgtgaggccgcatgccacgcactcaagctatggcacctacgtcaccctggcccccaaagtcctggtgttccctgtctttgttcagcctctagatctctgtaatcctgcccggaccctcctgctgtcagaggagctgctgctgtatgaagggaggaacaaggctgccgaggtgacactgtttgcctattcggacctgctgctcttcaccaaggaggacgagcctggccgctgcgacgtcctgaggaaccccctctacctccagagtgtgaagctgcaggaaggttcttcagaagacctgaaattctgcgtgctctatctagcagagaaggcagagtgcttattcactttggaagcgcactcgcaggagcagaagaagagagtgtgctggtgcctgtcggagaacatcgccaagcagcaacagctggcagcatcacccccggacagcaagatgtttgagacggaggcagatgagaagagggagatggccttggaggaagggaaggggcctggtgccgaggattccccacccagcaaggagccctctcctggccaggagcttcctccaggacaagaccttccacccaacaaggactccccttctgggcaggaacccgctcccagccaagaaccactgtccagcaaagactcagctacctctgaaggatcccctccaggcccagatgctccgcccagcaaggatgtgccaccatgccaggaaccccctccagcccaagacctctcaccctgccaggacctacctgctggtcaagaacccctgcctcaccaggaccctctactcaccaaagacctccctgccatccaggaatcccccacccgggaccttccaccctgtcaagatctgcctcctagccaggtctccctgccagccaaggcccttactgaggacaccatgagctccggggacctactagcagctactggggacccacctgcggcccccaggccagccttcgtgatccctgaggtccggctggatagcacctacagccagaaggcaggggcagagcagggctgctcgggagatgaggaggatgcagaagaggccgaggaggtggaggagggggaggaaggggaggaggacgaggatgaggacaccagcgatgacaactacggagagcgcagtgaggccaagcgcagcagcatgatcgagacgggccagggggctgagggtggcctctcactgcgtgtgcagaactcgctgcggcgccggacgcacagcgagggcagcctgctgcaggagccccgagggccctgctttgcctccgacaccaccttgcactgctcagacggtgagggcgccgcctccacctggggcatgccttcgcccagcaccctcaagaaagagctgggccgcaatggtggctccatgcaccacctttccctcttcttcacaggacacaggaagatgagcggggctgacaccgttggggatgatgacgaagcctcccggaagagaaagagcaaaaacctagccaaggacatgaagaacaagctggggatcttcagacggcggaatgagtcccctggagcccctcccgcgggcaaggcagacaaaatgatgaagtcattcaagcccacctcagaggaagccctcaagtggggcgagtccttggagaagctgctggttcacaaatacgggttagcagtgttccaagccttccttcgcactgagttcagtgaggagaatctggagttctggttggcttgtgaggacttcaagaaggtcaagtcacagtccaagatggcatccaaggccaagaagatctttgctgaatacatcgcgatccaggcatgcaaggaggtcaacctggactcctacacgcgggagcacaccaaggacaacctgcagagcgtcacgcggggctgcttcgacctggcacagaagcgcatcttcgggctcatggaaaaggactcgtaccctcgctttctccgttctgacctctacctggaccttattaaccagaagaagatgagtcccccgctttaggggccactggagtcgagctcagcgttcacaccaggcgggctgggtcccctgcccacctgcctccctgccccctgtgacggagggggcaagcaagcccccagaggctgtgtctctggacagacggatagacatacggaagcgaggcctggaccaagagaggcccaggctactggaggagtagaaggatgggccccgtggggtccccactgccccggtacgagggggcccaagaccctggcaggtcaggggccctggccaagccagatctggagctgctgctccctgctgcggagaccgcggaggcttcgcgttgaccaagttccttaaagaactggctgatggggcaggaggtccaggcctgggctctcgggccctcctagagggccattggagcttgcagctcagacccccactttgagttttatttatttaaatagtagttggatgcttggcacgtcgtcctgtaataggaaacccttgcctcatcagttttcctgatttacaagtgcaatattttagccaatgccttgggagaagctgccatgcaaaggtggacaccattctccagcttcaggggatatgctcgtcccgggcaccggtggcaggcagctggccttctggactaaggcagcctggggggacactgcagtctggctacacacagagatctggcaccccctgggtggagtgtccctcgggggctttgggaaagcatggcaccctcagaccacacagtagccaagttctggagcaaataaaaggcctgtgttatttcttgttcttgaaaaaaaaaaaaaaaaaaaaaaaaaaaaaaaaaaaaaaaaaaaaaaaaaaaaa

SEQ ID NO: 640 - protein, 917 aa, Homo sapiens
MNRFNGLCKVCSERRYRQITIPRGKDGFGFTICCDSPVRVQAVDSGGPAERAGLQQLDTVLQLNERPVEHWKCVELAHEIRSCPSEIILLVWRMVPQVKPGPDGGVLRRASCKSTHDLQSPPNKREKNCTHGVQARPEQRHSCHLVCDSSDGLLLGGWERYTEVAKRGGQHTLPALSRATAPTDPNYIILAPLNPGSQLLRPVYQEDTIPEESGSPSKGKSYTGLGKKSRLMKTVQTMKGHGNYQNCPVVRPHATHSSYGTYVTLAPKVLVFPVFVQPLDLCNPARTLLLSEELLLYEGRNKAAEVTLFAYSDLLLFTKEDEPGRCDVLRNPLYLQSVKLQEGSSEDLKFCVLYLAEKAECLFTLEAHSQEQKKRVCWCLSENIAKQQQLAASPPDSKMFETEADEKREMALEEGKGPGAEDSPPSKEPSPGQELPPGQDLPPNKDSPSGQEPAPSQEPLSSKDSATSEGSPPGPDAPPSKDVPPCQEPPPAQDLSPCQDLPAGQEPLPHQDPLLTKDLPAIQESPTRDLPPCQDLPPSQVSLPAKALTEDTMSSGDLLAATGDPPAAPRPAFVIPEVRLDSTYSQKAGAEQGCSGDEEDAEEAEEVEEGEEGEEDEDEDTSDDNYGERSEAKRSSMIETGQGAEGGLSLRVQNSLRRRTHSEGSLLQEPRGPCFASDTTLHCSDGEGAASTWGMPSPSTLKKELGRNGGSMHHLSLFFTGHRKMSGADTVGDDDEASRKRKSKNLAKDMKNKLGIFRRRNESPGAPPAGKADKMMKSFKPTSEEALKWGESLEKLLVHKYGLAVFQAFLRTEFSEENLEFWLACEDFKKVKSQSKMASKAKKIFAEYIAIQACKEVNLDSYTREHTKDNLQSVTRGCFDLAQKRIFGLMEKDSYPRFLRSDLYLDLINQKKMSPPL

SEQ ID NO: 641 - DNA, 1582 bp, Homo sapiens
ggatggacgcctctcccccggagcagcactttggggccagcttgggccctggggatgagccacaggggacccacagcctatgcgtgtgagcatgtaacccgggagccagctgggcccctcgcggggtgggcagaaggacgggctggcccaggaccctcttctttgagacatcccggactccatctcggatgaaagtgctttgagaaaccacagagttttctgtttaatggaagaaagaaatccagcctctctccagagtggcggtggccggctagacaggagccaaggacatgaagaacaagctggggatcttcagacggcggaatgagtcccctggagcccctcccgcgggcaaggcagacaaaatgatgaagtcattcaagcccacctcagaggaagccctcaagtggggcgagtccttggagaagctgctggttcacaaatacgggttagcagtgttccaagccttccttcgcactgagttcagtgaggagaatctggagttctggttggcttgtgaggacttcaagaaggtcaagtcacagtccaagatggcatccaaggccaagaagatctttgctgaatacatcgcgatccaggcatgcaaggaggtcaacctggactcctacacgcgggagcacaccaaggacaacctgcagagcgtcacgcggggctgcttcgacctggcacagaagcgcatcttcgggctcatggaaaaggactcgtaccctcgctttctccgttctgacctctacctggaccttattaaccagaagaagatgagtcccccgctttaggggccactggagtcgagctcagcgttcacaccaggcgggctgggtcccctgcccacctgcctccctgccccctgtgacggagggggcaagcaagcccccagaggctgtgtctctggacagacggatagacatacggaagcgaggcctggaccaagagaggcccaggctactggaggagtagaaggatgggccccgtggggtccccactgccccggtacgagggggcccaagaccctggcaggtcaggggccctggccaagccagatctggagctgctgctccctgctgcggagaccgcggaggcttcgcgttgaccaagttccttaaagaactggctgatggggcaggaggtccaggcctgggctctcgggccctcctagagggccattggagcttgcagctcagacccccactttgagttttatttatttaaatagtagttggatgcttggcacgtcgtcctgtaataggaaacccttgcctcatcagttttcctgatttacaagtgcaatattttagccaatgccttgggagaagctgccatgcaaaggtggacaccattctccagcttcaggggatatgctcgtcccgggcaccggtggcaggcagctggccttctggactaaggcagcctggggggacactgcagtctggctacacacagagatctggcaccccctgggtggagtgtccctcgggggctttgggaaagcatggcaccctcagaccacacagtagccaagttctggagcaaataaaaggcctgtgttatttcttgttcttga

SEQ ID NO: 642 - protein, 168 aa, Homo sapiens
MKNKLGIFRRRNESPGAPPAGKADKMMKSFKPTSEEALKWGESLEKLLVHKYGLAVFQAFLRTEFSEENLEFWLACEDFKKVKSQSKMASKAKKIFAEYIAIQACKEVNLDSYTREHTKDNLQSVTRGCFDLAQKRIFGLMEKDSYPRFLRSDLYLDLINQKKMSPPL

SEQ ID NO: 643 - DNA, 4643 bp, Homo sapiens
aactttggctcagcctgtcttcatccactgtatcctgacacctctcctactccttctctttaatgtacagctgagactgggatacccttagactgaaaggaaggacacggctatgtagaaaagaattgactgaaggggaggagtactcgtgaaccccttgcttcagcctcccaatgttctgagagaggaggagccaggcgcagtggctcatgcctgtaatcccagcactttgggaggttgagatgggcagatcgcaaggtcaggagatcgagaccatcctggctaacaggtcacattcagacagcacacctttgcccaattttctttctggatctcaccgtcctgagtgttgtacctgcaggttgctcacagcctctggagcccaagatagtctcccctttgggaggaggctctacagtggtccctggcgaagttgtgaagaggtctgccacgtctctgtgctcagtgtcctctctacatcctgtggcttgagcctgagcttgcccatattccctggctggatggagtggctaagccctgatatcgctctgcccagaagagatgagtggactcaaacttctccagccaggaagaggatcacgcatgccaaagtccagggtgcaggtcagctgaggctgtccattgatgcccaggaccgggttctgctgcttcacattatagaaggtaaaggcctgatcagcaaacagcctggcacctgtgatccgtatgtgaagatttctttgatccctgaagatagtagactacgccaccagaagacgcagaccgttccagactgcagagacccggctttccacgagcacttcttctttcctgtccaagaggaggatgatcagaagcgtctcttggttactgtgtggaacagggccagccagtccagacagagtggactcattggctgcatgagctttggggtgaagtctctcctgactccagacaaggagatcagtggttggtactacctcctaggggagcacctgggccggaccaagcacttgaaggtggccaggcggcgactgcggccgctgagagacccgctgctgagaatgccaggaggtggggacactgagaatgggaagaaactaaagatcaccatcccgaggggaaaggacggctttggcttcaccatctgctgcgactctccagttcgagtccaggccgtggattccgggggtccggcggaacgggcagggctgcagcagctggacacggtgctgcagctgaatgagaggcctgtggagcactggaaatgtgtggagctggcccacgagatccggagctgccccagtgagatcatcctactcgtgtggcgcatggtcccccaggtcaagccaggaccagatggcggggtcctgcggcgggcctcctgcaagtcgacacatgacctccagtcaccccccaacaaacgggagaagaactgcacccatggggtccaggcacggcctgagcagcgccacagctgccacctggtatgtgacagctctgatgggctgctgctcggcggctgggagcgctacaccgaggtggccaagcgcgggggccagcacaccctgcctgcactgtcccgtgccactgcccccaccgaccccaactacatcatcctggccccgctgaatcctgggagccagctgctccggcctgtgtaccaggaggataccatccccgaagaatcagggagtcccagtaaagggaagtcctacacaggcctggggaagaagtcccggctgatgaagacagtgcagaccatgaagggccacgggaactaccaaaactgcccggttgtgaggccgcatgccacgcactcaagctatggcacctacgtcaccctggcccccaaagtcctggtgttccctgtctttgttcagcctctagatctctgtaatcctgcccggaccctcctgctgtcagaggagctgctgctgtatgaagggaggaacaaggctgccgaggtgacactgtttgcctattcggacctgctgctcttcaccaaggaggacgagcctggccgctgcgacgtcctgaggaaccccctctacctccagagtgtgaagctgcaggaaggttcttcagaagacctgaaattctgcgtgctctatctagcagagaaggcagagtgcttattcactttggaagcgcactcgcaggagcagaagaagagagtgtgctggtgcctgtcggagaacatcgccaagcagcaacagctggcagcatcacccccggacagcaagatgtttgagacggaggcagatgagaagagggagatggccttggaggaagggaaggggcctggtgccgaggattccccacccagcaaggagccctctcctggccaggagcttcctccaggacaagaccttccacccaacaaggactccccttctgggcaggaacccgctcccagccaagaaccactgtccagcaaagactcagctacctctgaaggatcccctccaggcccagatgctccgcccagcaaggatgtgccaccatgccaggaaccccctccagcccaagacctctcaccctgccaggacctacctgctggtcaagaacccctgcctcaccaggaccctctactcaccaaagacctccctgccatccaggaatcccccacccgggaccttccaccctgtcaagatctgcctcctagccaggtctccctgccagccaaggcccttactgaggacaccatgagctccggggacctactagcagctactggggacccacctgcggcccccaggccagccttcgtgatccctgaggtccggctggatagcacctacagccagaaggcaggggcagagcagggctgctcgggagatgaggaggatgcagaagaggccgaggaggtggaggagggggaggaaggggaggaggacgaggatgaggacaccagcgatgacaactacggagagcgcagtgaggccaagcgcagcagcatgatcgagacgggccagggggctgagggtggcctctcactgcgtgtgcagaactcgctgcggcgccggacgcacagcgagggcagcctgctgcaggagccccgagggccctgctttgcctccgacaccaccttgcactgctcagacggtgagggcgccgcctccacctggggcatgccttcgcccagcaccctcaagaaagagctgggccgcaatggtggctccatgcaccacctttccctcttcttcacaggacacaggaagatgagcggggctgacaccgttggggatgatgacgaagcctcccggaagagaaagagcaaaaacctagccaaggacatgaagaacaagctggggatcttcagacggcggaatgagtcccctggagcccctcccgcgggcaaggcagacaaaatgatgaagtcattcaagcccacctcagaggaagccctcaagtggggcgagtccttggagaagctgctggttcacaaatacgggttagcagtgttccaagccttccttcgcactgagttcagtgaggagaatctggagttctggttggcttgtgaggacttcaagaaggtcaagtcacagtccaagatggcatccaaggccaagaagatctttgctgaatacatcgcgatccaggcatgcaaggaggtcaacctggactcctacacgcgggagcacaccaaggacaacctgcagagcgtcacgcggggctgcttcgacctggcacagaagcgcatcttcgggctcatggaaaaggactcgtaccctcgctttctccgttctgacctctacctggaccttattaaccagaagaagatgagtcccccgctttaggggccactggagtcgagctcagcgttcacaccaggcgggctgggtcccctgcccacctgcctccctgccccctgtgacggagggggcaagcaagcccccagaggctgtgtctctggacagacggatagacatacggaagcgaggcctggaccaagagaggcccaggctactggaggagtagaaggatgggccccgtggggtccccactgccccggtacgagggggcccaagaccctggcaggtcaggggccctggccaagccagatctggagctgctgctccctgctgcggagaccgcggaggcttcgcgttgaccaagttccttaaagaactggctgatggggcaggaggtccaggcctgggctctcgggccctcctagagggccattggagcttgcagctcagacccccactttgagttttatttatttaaatagtagttggatgcttggcacgtcgtcctgtaataggaaacccttgcctcatcagttttcctgatttacaagtgcaatattttagccaatgccttgggagaagctgccatgcaaaggtggacaccattctccagcttcaggggatatgctcgtcccgggcaccggtggcaggcagctggccttctggactaaggcagcctggggggacactgcagtctggctacacacagagatctggcaccccctgggtggagtgtccctcgggggctttgggaaagcatggcaccctcagaccacacagtagccaagttctggagcaaataaaaggcctgtgttatttcttgttcttgaaaaaaaaaaaaaaaaaaaaaaaaaaaaaaaaaaaaaaaaaaaaaaaaaaaaa

SEQ ID NO: 644 - protein, 1198 aa, Homo sapiens
MPVIPALWEVEMGRSQGQEIETILANRSHSDSTPLPNFLSGSHRPECCTCRLLTASGAQDSLPFGRRLYSGPWRSCEEVCHVSVLSVLSTSCGLSLSLPIFPGWMEWLSPDIALPRRDEWTQTSPARKRITHAKVQGAGQLRLSIDAQDRVLLLHIIEGKGLISKQPGTCDPYVKISLIPEDSRLRHQKTQTVPDCRDPAFHEHFFFPVQEEDDQKRLLVTVWNRASQSRQSGLIGCMSFGVKSLLTPDKEISGWYYLLGEHLGRTKHLKVARRRLRPLRDPLLRMPGGGDTENGKKLKITIPRGKDGFGFTICCDSPVRVQAVDSGGPAERAGLQQLDTVLQLNERPVEHWKCVELAHEIRSCPSEIILLVWRMVPQVKPGPDGGVLRRASCKSTHDLQSPPNKREKNCTHGVQARPEQRHSCHLVCDSSDGLLLGGWERYTEVAKRGGQHTLPALSRATAPTDPNYIILAPLNPGSQLLRPVYQEDTIPEESGSPSKGKSYTGLGKKSRLMKTVQTMKGHGNYQNCPVVRPHATHSSYGTYVTLAPKVLVFPVFVQPLDLCNPARTLLLSEELLLYEGRNKAAEVTLFAYSDLLLFTKEDEPGRCDVLRNPLYLQSVKLQEGSSEDLKFCVLYLAEKAECLFTLEAHSQEQKKRVCWCLSENIAKQQQLAASPPDSKMFETEADEKREMALEEGKGPGAEDSPPSKEPSPGQELPPGQDLPPNKDSPSGQEPAPSQEPLSSKDSATSEGSPPGPDAPPSKDVPPCQEPPPAQDLSPCQDLPAGQEPLPHQDPLLTKDLPAIQESPTRDLPPCQDLPPSQVSLPAKALTEDTMSSGDLLAATGDPPAAPRPAFVIPEVRLDSTYSQKAGAEQGCSGDEEDAEEAEEVEEGEEGEEDEDEDTSDDNYGERSEAKRSSMIETGQGAEGGLSLRVQNSLRRRTHSEGSLLQEPRGPCFASDTTLHCSDGEGAASTWGMPSPSTLKKELGRNGGSMHHLSLFFTGHRKMSGADTVGDDDEASRKRKSKNLAKDMKNKLGIFRRRNESPGAPPAGKADKMMKSFKPTSEEALKWGESLEKLLVHKYGLAVFQAFLRTEFSEENLEFWLACEDFKKVKSQSKMASKAKKIFAEYIAIQACKEVNLDSYTREHTKDNLQSVTRGCFDLAQKRIFGLMEKDSYPRFLRSDLYLDLINQKKMSPPL

SEQ ID NO: 645 - DNA, 1773 bp, Homo sapiens
atggtaacgaggaggccagtcacaaatagctgggactggcttcctgccggggcggccccagaggctgtcccttgcagacacatgcccctttcacggctccctctcagggttggccagaaggaatttttttttccgctccccctcctggtccctcccatttcctggctcctcctgtctgagtcccagccccggcttgtgcctgggagtccagtcatcaggccaggattccagagagcgtgtgtggctgcagcctgcaccgttgctgcccgctgcccaggacgcggggtgggggacaggagccagagtggtgcctcctacagaccaatctgcggccccaaggtggggggccctacagagatgctccgaggcatgtacctcactcgcaacgggaacctgcagaggcgacacacgatgaaggaagccaaggacatgaagaacaagctggggatcttcagacggcggaatgagtcccctggagcccctcccgcgggcaaggcagacaaaatgatgaagtcattcaagcccacctcagaggaagccctcaagtggggcgagtccttggagaagctgctggttcacaaatacgggttagcagtgttccaagccttccttcgcactgagttcagtgaggagaatctggagttctggttggcttgtgaggacttcaagaaggtcaagtcacagtccaagatggcatccaaggccaagaagatctttgctgaatacatcgcgatccaggcatgcaaggaggtcaacctggactcctacacgcgggagcacaccaaggacaacctgcagagcgtcacgcggggctgcttcgacctggcacagaagcgcatcttcgggctcatggaaaaggactcgtaccctcgctttctccgttctgacctctacctggaccttattaaccagaagaagatgagtcccccgctttaggggccactggagtcgagctcagcgttcacaccaggcgggctgggtcccctgcccacctgcctccctgccccctgtgacggagggggcaagcaagcccccagaggctgtgtctctggacagacggatagacatacggaagcgaggcctggaccaagagaggcccaggctactggaggagtagaaggatgggccccgtggggtccccactgccccggtacgagggggcccaagaccctggcaggtcaggggccctggccaagccagatctggagctgctgctccctgctgcggagaccgcggaggcttcgcgttgaccaagttccttaaagaactggctgatggggcaggaggtccaggcctgggctctcgggccctcctagagggccattggagcttgcagctcagacccccactttgagttttatttatttaaatagtagttggatgcttggcacgtcgtcctgtaataggaaacccttgcctcatcagttttcctgatttacaagtgcaatattttagccaatgccttgggagaagctgccatgcaaaggtggacaccattctccagcttcaggggatatgctcgtcccgggcaccggtggcaggcagctggccttctggactaaggcagcctggggggacactgcagtctggctacacacagagatctggcaccccctgggtggagtgtccctcgggggctttgggaaagcatggcaccctcagaccacacagtagccaagttctggagcaaataaaaggcctgtgttatttcttgttcttgaaaaaaaaaaaaaaaaaaaaaaaaaaaaaaaaaaaaaaaaaaaaaaaaaaaaa

SEQ ID NO: 646 - protein, 311 aa, Homo sapiens
MVTRRPVTNSWDWLPAGAAPEAVPCRHMPLSRLPLRVGQKEFFFPLPLLVPPISWLLLSESQPRLVPGSPVIRPGFQRACVAAACTVAARCPGRGVGDRSQSGASYRPICGPKVGGPTEMLRGMYLTRNGNLQRRHTMKEAKDMKNKLGIFRRRNESPGAPPAGKADKMMKSFKPTSEEALKWGESLEKLLVHKYGLAVFQAFLRTEFSEENLEFWLACEDFKKVKSQSKMASKAKKIFAEYIAIQACKEVNLDSYTREHTKDNLQSVTRGCFDLAQKRIFGLMEKDSYPRFLRSDLYLDLINQKKMSPPL

SEQ ID NO: 647 - DNA, 11025 bp, Homo sapiens
gagcatcttttggggggagggaattcagcggatcagtcttaagaggagcttttttttggagcgagaaatcatataaaataaaatgaaataaaacaaggaggaaggcaaccagctgttaggggaaaaataaggcagataaaggagcggggagagaaattaattgccaaccaggaggagttgggctgtatttttcaaaggtggggagagtggagcacacaccttgaggaggaaagcgagaaagaaaagaaaaaagcaagtggaaaggggggctcgcccaagaagggtgaagaagcgaagaaagtcgaggcgccgaggctcccaaagctggcagctccgggtggcggtgcaggggcgaagggggggcggggggaaccgtcggacatgcggctctggagttgggtgctgcacctggggctgctgagcgccgcgctgggctgcgggctggccgagcgtccccgccgggcccggagagacccgcgggccggccgacccccgcgccccgccgccggcccggccacctgcgccacccgggcggcccgcggccgccgcgcctcgccgccgccgccgccgccgccgggcggtgcctgggaagccgtgcgcgtcccccggcggcggcagcagcgggaggcgaggggcgccaccgaggagccgagcccgccgagccgggcgctctatttcagcgggcgaggcgagcagctgcgcctccgggccgacctcgagctgccccgggacgcgttcacgctgcaagtgtggctgcgagcggaggggggccagaggtctccggcagtgatcacagggctgtatgacaaatgttcttatatctcacgtgaccgaggatgggtcgtgggcattcacaccatcagtgaccaagacaacaaagacccacgctactttttctccttgaagacagaccgagcccggcaagtgaccaccatcaatgcccaccgcagctacctcccaggccagtgggtatacctagctgccacctatgatgggcagttcatgaagctctatgtgaatggtgcccaggtggccacctctggggaacaagtgggtggcatattcagcccactgacccagaagtgcaaagtgctcatgttagggggcagtgccctgaatcacaactaccggggctacatcgagcacttcagtctgtggaaggtggccaggactcagcgggagatactgtctgacatggaaacccatggcgcccacactgctctacctcagctcctcctccaggagaactgggacaatgtgaagcatgcctggtcccccatgaaggatggcagcagccccaaagtggaattcagcaatgcccacggctttctgctggacacgagtctggagcctcctctgtgcggacagacattgtgtgacaacacagaggtcattgccagctacaatcagctctcaagtttccgccagcccaaggtggtgcgctaccgcgtggtcaacctctatgaagatgatcataagaacccgacggtgacgcgcgagcaggtggacttccagcaccatcagctggctgaggccttcaagcaatacaacatctcctgggagctggacgtgctggaggtgagcaactcctcccttcgccgccgcctcatcctggccaactgtgacatcagcaagattggggatgagaactgtgaccccgagtgcaaccacacgctgacgggccacgacggcggggattgccgccacctgcgccaccctgccttcgtgaagaagcagcacaacggggtgtgtgacatggactgcaactatgaacggttcaactttgatggtggagagtgctgtgaccctgaaatcaccaatgtcactcagacttgctttgaccccgactctccacacagagcctacttggatgttaatgagctgaagaacattcttaaattggatggatcaacacatctcaatattttctttgcaaaatcctcagaggaggagttggcaggagtagcaacttggccatgggacaaggaggccctgatgcacttaggtggcattgtcttgaacccatctttctatggcatgcctgggcacacccacaccatgatccatgagattggtcacagcctgggcctctatcacgtcttccgaggcatctcagaaatccagtcctgcagtgacccctgcatggagacagagccctccttcgagactggagacctctgcaatgataccaacccagcccctaaacacaagtcctgtggtgacccagggccaggaaatgacacctgtggctttcatagcttcttcaacactccttacaacaacttcatgagctatgcagatgacgactgtacggactccttcacgcccaatcaagtcgccagaatgcactgttacctggacctggtctaccagggctggcagccctccaggaaaccagcgcctgttgccctcgccccccaagttctgggccacacaacggactctgtgacactggagtggttcccacctatagatggccatttctttgaaagagaattgggatcagcatgtcatctttgcctggaagggagaatcctggtgcagtatgcttccaacgcttcctccccaatgccctgcagcccatcaggacactggagccctcgtgaagcagaaggtcatcctgatgttgaacagccctgtaagtccagtgtccgcacctggagcccaaattcagctgtcaacccacacacggttcctccagcctgccctgagcctcaaggctgctacctcgagctggagttcctctaccccttggtccctgagtctctgaccatttgggtgacctttgtctccactgactgggactctagtggagctgtcaatgacatcaaactgttggctgtcagtgggaagaacatctccctgggtcctcagaatgtcttctgtgatgtcccactgaccatcagactctgggacgtgggcgaggaggtgtatggcatccaaatctacacgctggatgagcacctggagatcgatgctgccatgttgacctccactgcagacaccccactctgtctacagtgtaagcccctgaagtataaggtggtccgggaccctcctctccagatggatgtggcctccatcctacatctcaataggaaattcgtagacatggatctaaatcttggcagtgtgtaccagtattgggtcataactatttcaggaactgaagagagtgagccatcacctgctgtcacatacatccatggaagtgggtactgtggcgatggcattatacaaaaagaccaaggtgaacaatgcgacgacatgaataagatcaatggtgatggctgctcccttttctgccgacaagaagtctccttcaattgtattgatgaacccagccggtgctatttccatgatggtgatggggtatgtgaggagtttgaacaaaaaaccagcattaaggactgtggtgtctacacgccccagggattcctggatcagtgggcatccaatgcttcagtatctcatcaagaccagcaatgcccaggctgggtcatcatcggacagccagcagcatcccaggtgtgtcgaaccaaggtgatagatctcagtgaaggcatttcccagcatgcctggtacccttgcaccatcagctacccatattcccagctggctcagaccactttttggctccgggcgtatttttctcaaccaatggttgccgcagctgtcattgtccacctggtgacggatgggacatattatggggaccaaaagcaggagaccatcagcgtgcagctgcttgataccaaagatcagagccacgatctaggcctccatgtcctgagctgcaggaacaatcccctgattatccctgtggtccatgacctcagccagcccttctaccacagccaggcggtacgtgtgagcttcagttcgcccctggtcgccatctcgggggtggccctccgttccttcgacaactttgaccccgtcaccctgagcagctgccagagaggggagacctacagccctgccgagcagagctgcgtgcacttcgcatgtgagaaaactgactgtccagagctggctgtggagaatgcttctctcaattgctccagcagcgaccgctaccacggtgcccagtgtactgtgagctgccggacaggctacgtgctccagatacggcgggatgatgagctgatcaagagccagacgggacccagcgtcacagtgacctgtacagagggcaagtggaataagcaggtggcctgtgagccagtcgactgcagcatcccagatcaccatcaagtctatgctgcctccttctcctgccctgagggcaccacctttggcagtcaatgttccttccagtgccgtcaccctgcacaattgaaaggcaacaacagcctcctgacctgcatggaggatgggctgtggtccttcccagaggccctgtgtgagctcatgtgcctcgctccaccccctgtgcccaatgcagacctccagaccgcccggtgccgagagaataagcacaaggtgggctccttctgcaaatacaaatgcaagcctggataccatgtgcctggatcctctcggaagtcaaagaaacgggccttcaagactcagtgtacccaggatggcagctggcaggagggagcttgtgttcctgtgacctgtgacccacctccaccaaaattccatgggctctaccagtgtactaatggcttccagttcaacagtgagtgtaggatcaagtgtgaagacagtgatgcctcccagggacttgggagcaatgtcattcattgccggaaagatggcacctggaacggctccttccatgtctgccaggagatgcaaggccagtgctcggttccaaacgagctcaacagcaacctcaaactgcagtgccctgatggctatgccatagggtcggagtgtgccacctcgtgcctggaccacaacagcgagtccatcatcctgccaatgaacgtgaccgtgcgtgacatcccccactggctgaaccccacacgggtagagagagttgtctgcactgctggtctcaagtggtatcctcaccctgctctgattcactgtgtcaaaggctgtgagcccttcatgggagacaattattgtgatgccatcaacaaccgagccttttgcaactatgacggtggggattgctgcacctccacagtgaagaccaaaaaggtcaccccattccctatgtcctgtgatctacaaggtgactgtgcttgtcgggacccccaggcccaagaacacagccggaaagacctccggggatacagccatggctaaggaaggacaagaagttgtcaaagaattcccaacgccaggacccacatccctttggtattgatttcacagtcagctgctcaacggaatggcctctccacaccagggatccttagcacccaaccggtctgcctttaattttacccaggaaggactcacattggggcgaatgaaccaagtttcgccatgctggatgatgaaatggattcccatcccaaagtctgagatggattgcatatacagtgtgcagtcccagagcctcctaaaattctagccatttgtcacacaaccacagcaagaaacgtgttctatatctagagtgtgcccatctgtgtttagtacacatgcatgcatacacacccatacaaacatctgtgtgagggcagttctggagatgagcagagagagaccggaataaactcaatcttttctttcccaagctcctagccaacactatccttgggagaaagaaatttgcagaaactgctaagaccaagtgtggagatgtcaagctagttcacactctgaggctcagaatatgtaggacatgcacaattgtgcagtcctttgggattggaagtgaaacagtctgtgatcccctaccttctagggaactaggacctaggaagaggtaaagattatcaggtatgcaaagcgccccaattcttctgctgccatgggggattttaccccaactccagggttcgaggccaatctgagaatggcttaggattgcaatgtcaaggtattatatcagccccttgcttgaggcttgaggtcataatatccctctaggacttacctgttcccccagatcttgccttgggaccacatttgctgctacttttcctgctgctctatcctatacattgaataatccaagatggtagaactaggttaggaaaaattccacacaaccaaacagtctgccttaaaagtgacccacatttttccatagctcctcactttttagcccttctgcaagagaaaaaccctcatgggtccacatggtgagaagttaagtttcctgtaagtgggcctctcaccctggaaaggagttgagggacatcagatgctggaaccctcactgaaagtccagaatgtctaagccagtgttagattttgtaaacaagtggaacagtgttaaatttctatgatgttggagccatccagagactactggaattgtcgagacttttggattattatccttatccttatcctaatcttcctagcccttcaggctagagtaggcttcgatcctgagaaccttgctgttgctctgaggagatataattctgggagaaagaatcttttataagaacagtacagattgttctcaagagggccatcagaaggaagccaaagagttcacagcctcagcaccaacaactcaacatggtcatcatgttttctatatggtttttccagctagcagtactcccttccatacctgtgactgggcagtgcttttctctctcccatgtctagcctccaaaagttaagtgaaaattagtcaactgcacgtggaagcccccaccactttggggatctctttatttcttttcagccagggacctgtccactccctttgaattaatatgggaagaaattaatacaggatgaactggagagaagggttgagtgtggcatactttctgaaacctggagctgggaattgcggagaagggaaggtctagactagttacatcacatagggattactgtaaatcaagtcatctcaagtctagtgaagacagccaacagaaacaaaacctagcatagggatagaaaataccatgcacgtgtgcagccccacctaattcctgcatccaaggcaggtgttgttaatctatcatagcacttaaaaaaaaaaaaaaaaagagaccaaaaataactttaggaaccaccatattatatcactcccaatagcactgacctggtgatcaaaaacacttgagaagacatctattggccatctctggccaattacactaagaaacatatcaaggtgcttttggcacaggtgcccacaaatacggatgcagtgctgagatagtttatgagacttgtaccatttcacaaactctgaaattgggttccatattggcaaggctgccacagttgttaagaataatcctctatgtttcttcctcacaaaaccatatctcatttatatccagaccattacttcactataattacaaggacaaattattagcaagaaataagaatagtattagaagaattgatcctattttgaacccctctccagtatcttcacactcttgtcaactctccaggcctctctcttgccctgagttatcagcctgtgtggtgttaactaccttagaaggtacaagctaagaaatgtaacagtatcaaccctcccagttgcttaattatacccataggtaatacaaaaagctctgaagacccaaagatgacattactaatgatgtgatttcaggagccacagaagaaccttaccagcttccctcaaatcagtccttatcctctttctatcttcactcccatcatcatctattttcacactatccagctaagcaaagattcctggaggctgacttgtatcttcagactcacagagtgaattcagctcttctgaatcaagacccacccagtctctttcattcagacctgttgctaacaaatttatatttgccaaggatattaggcaaaagaggctacttgattggtggccaacctcgtgcccacatggaaggtatctttaatagggtcttttcaaaccttagtggaggagggtcagctcaatttgggcaatgcatttgttcccagtttcattttcttcctgggaattaactcgtcatttcattccttcagtcatcttctgtgtaggtgaccggagcactgagaggcagctctgatgcactattgtgtgtcagcagctcaaaggccctaaaacactgaaggttctgcatctgaagtattagattgttagcagcaaaatatgaaagatgaggtggacagtcctctaagccctatttagggaagcttttccaagccacaatcttaactacctacccaaaggatttgcattacccccagattctgtgccaacaaccttttaaggaaatacagtccttgggaaatgagttttgatggtgaattggggtgttaaggaagggaaagattgtcatagatggtagggctttgaaaatgcagggtatcagctgccactcctggcttcaacacattgagtcactgcctagacggttctcttggtcttattcccatcctggccaatgcttaaatactatttgttgaaaataattctttgagacagatttcagctacctcccttccaggttcgatttaacttggttgtaattgtcaatttgttgttataggtcttacctgtgtgaaagaaagaaaaagaaagaaagaaagaaagagaaaggaaattataaggtcaagttaacagttttgaggttttgtgtttttttctggaactacttcaagtgagaaaataaaaaaaaatggtgacaaagctgtacagatagagataatagaagacaaagagattaaaaggaaataaaaatgcatgattaaaaactaagaataaaaaacctatttttatgtttcctaaaggaaattgtttattctacagcctcagtaggtagacacaaacataaagatttccctagaagacatagagtgggatttgataacactgtctgttattttctgtacattgtggtaggtccaggaaatatgacattttcccccttgatgtgttattgttgttgttgggtggggtgggcattttgtttatttgtttggtggcaatcagtggtagtagggagtgggagggcttatattggtttttccagctattaaggggacatattgtgtcgttgtgcttttcacgttataaaatgtttatatttaccagtacagcactgggctttataaagactgcactcagaaccacactgcacagtccagttttttaaaaagctgctacatgacagacaggtaatcccactgagtgagttttgagaaacaaatcaaacgaagtaaacaagaaacataaaaaccaaatagcaaatgaataaaagcctgttcttgtaacttattcaacttttgccaaattcctaccaatcacttgctttttaaaagaaatgtataatagccaaaagagaaattatgtccctgttgtacagaagttagaatttttgactccaggcagcagtttgctcagtgatcttgaacaagttatccaattgcctctacatttgcatcagtttctctagctgcaaaatggggataatactatatacctacctcacagtgggagggcaggagattttgaggccctgaggttttaggtgggctgtgagggccaacgcttgacacaaagtccatgggttattattcaagaatgcacaggcccatcggccttttagaaagacaagacagggagtgcttgtttgatatttcaaggaataaagccggagctcctgaattgtagtccaccttaaaagagagacctgtattggagaatattttatttttttggcaaatttgatcttaccctttaccagttctataatttggttaaaagctgattatgtcctacaatgtcaaagtcagctaactgtcgtctacttaagacttctggtcatttccaacttatagaggaagggagtctctaaaatctcttcttcagaaggcacctcacttctcagacttaaaattccacatcaagtgttccattaaaagaagataaggcattctgagtgcaaacaaatgggggcttcttaaactacacaccagcagtcagtgaggaaaactttgaacaattattgagttgctttcttgggtctctataatcaataacctgtctgcagatatctatctatataaagatattatatataaatataaatttacatatatatgcacatgtatatatagttgtacatatatgtgtgtatatatatacttaaatgtaatatttacaaaataaaactgtgatctcgtctagagaaaatgtattcatattacaaactgctcttccatatttatgtaccatattatacctttttattattgttataattattatgggtatttctaattaatatgatgttgaaacctgtttggcaccttctggaagctaccaaaaaaatgacactccattgaagtgcttaaaagctgttctcataagaattctactggcctattgtaaaaaagaaaaaaaaaaagaaaaagaagaaagacacaaagaaaataatctaaacaccaaaaactaaacacaattccaatcctttttctgtacctcacgcgcataaatttgctgctcctatttttttttctgtttatgtgtttttatggatctaagttaaatcttttggcaatatataaaaatgtaaatagtaaactttatttattaagaatgtcatcttttttaatttatatttacacaattgttcatctaatttattttttctatacagttttaaatactcagacatattttgctgttcatgatatttttatcctgttctcatggatttgttttcccatactgttttctctgatctcaattacaggttggatctcacaaataataatgtcagagacagaaatattttgccactgttgattactatactttaaagttctatattatgaaaatatataatagcttgtacgcttcaaaaaaaaaaaaaaaaaaaaaaaaaaaaaaaaaaaaaaaaaaaaaaaaaaaaaaaa

SEQ ID NO: 648 - protein, 1627 aa, Homo sapiens
MRLWSWVLHLGLLSAALGCGLAERPRRARRDPRAGRPPRPAAGPATCATRAARGRRASPPPPPPPGGAWEAVRVPRRRQQREARGATEEPSPPSRALYFSGRGEQLRLRADLELPRDAFTLQVWLRAEGGQRSPAVITGLYDKCSYISRDRGWVVGIHTISDQDNKDPRYFFSLKTDRARQVTTINAHRSYLPGQWVYLAATYDGQFMKLYVNGAQVATSGEQVGGIFSPLTQKCKVLMLGGSALNHNYRGYIEHFSLWKVARTQREILSDMETHGAHTALPQLLLQENWDNVKHAWSPMKDGSSPKVEFSNAHGFLLDTSLEPPLCGQTLCDNTEVIASYNQLSSFRQPKVVRYRVVNLYEDDHKNPTVTREQVDFQHHQLAEAFKQYNISWELDVLEVSNSSLRRRLILANCDISKIGDENCDPECNHTLTGHDGGDCRHLRHPAFVKKQHNGVCDMDCNYERFNFDGGECCDPEITNVTQTCFDPDSPHRAYLDVNELKNILKLDGSTHLNIFFAKSSEEELAGVATWPWDKEALMHLGGIVLNPSFYGMPGHTHTMIHEIGHSLGLYHVFRGISEIQSCSDPCMETEPSFETGDLCNDTNPAPKHKSCGDPGPGNDTCGFHSFFNTPYNNFMSYADDDCTDSFTPNQVARMHCYLDLVYQGWQPSRKPAPVALAPQVLGHTTDSVTLEWFPPIDGHFFERELGSACHLCLEGRILVQYASNASSPMPCSPSGHWSPREAEGHPDVEQPCKSSVRTWSPNSAVNPHTVPPACPEPQGCYLELEFLYPLVPESLTIWVTFVSTDWDSSGAVNDIKLLAVSGKNISLGPQNVFCDVPLTIRLWDVGEEVYGIQIYTLDEHLEIDAAMLTSTADTPLCLQCKPLKYKVVRDPPLQMDVASILHLNRKFVDMDLNLGSVYQYWVITISGTEESEPSPAVTYIHGSGYCGDGIIQKDQGEQCDDMNKINGDGCSLFCRQEVSFNCIDEPSRCYFHDGDGVCEEFEQKTSIKDCGVYTPQGFLDQWASNASVSHQDQQCPGWVIIGQPAASQVCRTKVIDLSEGISQHAWYPCTISYPYSQLAQTTFWLRAYFSQPMVAAAVIVHLVTDGTYYGDQKQETISVQLLDTKDQSHDLGLHVLSCRNNPLIIPVVHDLSQPFYHSQAVRVSFSSPLVAISGVALRSFDNFDPVTLSSCQRGETYSPAEQSCVHFACEKTDCPELAVENASLNCSSSDRYHGAQCTVSCRTGYVLQIRRDDELIKSQTGPSVTVTCTEGKWNKQVACEPVDCSIPDHHQVYAASFSCPEGTTFGSQCSFQCRHPAQLKGNNSLLTCMEDGLWSFPEALCELMCLAPPPVPNADLQTARCRENKHKVGSFCKYKCKPGYHVPGSSRKSKKRAFKTQCTQDGSWQEGACVPVTCDPPPPKFHGLYQCTNGFQFNSECRIKCEDSDASQGLGSNVIHCRKDGTWNGSFHVCQEMQGQCSVPNELNSNLKLQCPDGYAIGSECATSCLDHNSESIILPMNVTVRDIPHWLNPTRVERVVCTAGLKWYPHPALIHCVKGCEPFMGDNYCDAINNRAFCNYDGGDCCTSTVKTKKVTPFPMSCDLQGDCACRDPQAQEHSRKDLRGYSHG

SEQ ID NO: 649 - DNA, 5041 bp, Homo sapiens
cgcgcgccgggcacgcgcgccggcgaccatggcgttcgccgggctggagcgagtacattaacccctggaggcggcggcggcggcgagggagcgagcctcgagcgggcgggccccagcctgagggaagggaggaaggggcggggagagcgccagagggaggccggtcggccgcgggcgggcgggcagcgcagcgccgagcggggcccgcgggcccatgaggaggcctggggaccatgggctccaggatcaagcagaatccagagaccacatttgaagtatatgttgaagtggcctatcccaggacaggtggcactctttcagatcctgaggtgcagaggcaattcccggaggactacagtgaccaggaagttctacagactttgaccaagttttgtttccccttctatgtggacagcctcacagttagccaagttggccagaacttcacattcgtgctcactgacattgacagcaaacagagattcgggttctgccgcttatcttcaggagcgaagagctgcttctgtatcttaagctatctcccctggttcgaggtattttataagctgcttaacatcctggcagattacacgacaaaaagacaggaaaatcagtggaatgagcttcttgaaactctgcacaaacttcccatccctgacccaggagtgtctgtccatctcagcgtgcattcttattttactgtgcctgataccagagaacttcccagcatacctgagaatagaaatctgacagaatattttgtggctgtggatgttaacaacatgttgcatctgtacgccagtatgctgtacgaacgccggatactcatcatttgcagcaaactcagcactctgactgcctgcatccacgggtctgcggcgatgctctaccccatgtactggcagcacgtgtacatccccgtgctgccgccgcatctgctggactactgctgtgctcccatgccctacctcataggaatccatttaagtttaatggagaaagtcagaaacatggccctggatgatgtcgtgatcctgaatgtggacaccaacaccctggaaacccccttcgatgacctccagagcctcccaaacgacgtgatctcttccctgaagaacaggctgaaaaaggtctccacaaccactggggatggtgtggccagagcgttcctcaaggcccaggctgctttcttcggtagctaccgaaacgctctgaaaatcgagccggaggagccgatcactttctgtgaggaagccttcgtgtcccactaccgctccggagccatgaggcagttcctgcagaacgccacacagctgcagctcttcaagcagtttattgatggtcgattagatcttctcaattccggcgaaggtttcagtgatgtttttgaagaggaaatcaacatgggcgagtacgctggcagtgacaaactgtaccatcagtggctctccactgtccggaaaggaagtggagcaattctgaatactgtaaagaccaaagcaaatccggccatgaagactgtctacaagttcgcaaaagatcatgcaaaaatgggaataaaagaggtgaaaaaccgcttgaagcaaaaggacattgccgagaatggctgcgcccccaccccagaagagcagctgccaaagactgcaccgtccccactggtggaggccaaggaccccaagctccgagaagaccggcggccaatcacagtccactttggacaggtgcgcccacctcgtccacatgttgttaagagaccaaagagcaacatcgcagtggaaggccggaggacgtctgtgccgagccctgagcagccgcagccgtatcggacactcagggagtcagacagcgcggaaggcgacgaggcagagagtccagagcagcaagtgcggaagtccacaggccctgtcccagctccccctgaccgggctgccagcatcgaccttctggaagacgtcttcagcaacctggacatggaggccgcactgcagccactgggccaggccaagagcttagaggaccttcgtgcccccaaagacctgagggagcagccagggacctttgactatcagaggctggatctgggcgggagtgagaggagccgcggggtgacagtggccttgaagcttacccacccgtacaacaagctctggagcctgggccaggacgacatggccatccccagcaagcccccagctgcctcccctgagaagccctcggccctgctcgggaactccctggccctgcctcgaaggccccagaaccgggacagcatcctgaaccccagtgacaaggaggaggtgcccacccctactctgggcagcatcaccatcccccggccccaaggcaggaagaccccagagctgggcatcgtgcctccaccgcccattccccgcccggccaagctccaggctgccggcgccgcacttggtgacgtctcagagcggctgcagacggatcgggacaggcgagctgccctgagtccagggctcctgcctggtgttgtcccccaaggccccactgaactgctccagccgctcagccctggccccggggctgcaggcacgagcagtgacgccctgctcgccctcctggacccgctcagcacagcctggtcaggcagcaccctcccgtcacgccccgccaccccgaatgtagccaccccattcaccccccaattcagcttcccccctgcagggacacccaccccattcccacagccaccactcaacccctttgtcccatccatgccagcagccccacccaccctgcccctggtctccacaccagccgggcctttcggggcccctccagcttccctggggccggcttttgcgtccggcctcctgctgtccagtgctggcttctgtgcccctcacaggtctcagcccaacctctccgccctctccatgcccaacctctttggccagatgcccatgggcacccacacgagccccctacagccgctgggtcccccagcagttgccccgtcgaggatccgaacgttgcccctggcccgctcaagtgccagggctgctgagaccaagcaggggctggccctgaggcctggagaccccccgcttctgcctcccaggccccctcaaggcctggagccaacactgcagccctctgctcctcaacaggccagagacccctttgaggatttgttacagaaaaccaagcaagacgtgagcccgagtccggccctggccccggccccagactcggtggagcagctcaggaagcagtgggagaccttcgagtgagccgggccctgagggtgggggatgcaccgaggcccgagggtccgtccactgctgcggttccgaggctcccccgccactctctctctgcccaggttctgctggtgggaagggatgggacccctctctgctgccccctcctcccctccacactgcccatctctgatgtctggccctggggaatggcaccagttccagcctgggaatcaacccagttcctgagtgcccatcccaccccgcggttgcctctcctcggcacccttgattgggttttgcactaaagaggtcagctgggccaatgatattgctccagaccgagtcctacccaccttcccccggaagtgtcccaagaggctccgaaggcctcccctccgagcccagctctcctgtctcctccacagccaggccctgcacgcccacctcctcggacacaggtgacagggttaccctccagtttgagctcatctgcacgagacacaggtagcttggggttgaagttaggactcctcctgggctggaggatttacctggtggggcacttccagactgtttctagcaatatacacacacgttctttcctgtgtcttcaccccaaaacttcagttgattctgacctgggaggatctggggaccagggggtcttgggctgccttgtgatacacagccccagccaccctgcacgggggctgcgagcaccagcaactttgatttatagaaggaaaatggaaacccccatctgagtattttgggaggagcccccagccctcatccagctctggcacgctgatacctccaggtactcccctcactgtcaaagctggggctcagcctcttgtcatctggagctttgtgggcaaagctgagaagctgcaacccagatttcaacccaaaaaggtcaagctgaatgcctcagactgatgtggaaggcagctggccttcctgggttggaacgaggcagtggccctgagccccttctccagggccaggtagaaaggacaaacttggtctctgcctcggggaagcaggaggagggctagaagccagtccctccccacctgcccagagctccaggccagcacagaaattcctgaggccaacgtcaccaaagttagattgaatgtttattatctttctttttcctttttaccttattgatttgatgaatcttgaaatggattcatttccataaaccaagttaaagtatggcccgaccatttaagaaaacaaccatctgagacacgcaggaaattgtgagcatttcgacccgagctctcatttcctatttgtgaagggtcagacacagtctacccaggggtgtctgggggacaagggggtctctggagatgtcacccagggagccccctctatgtctgagaggctgccactgctgcacatgctcagtgaggcttggcggccatcctggcacatggctcttcctgggtcaaccgtgacctgtctggctcaggaatgggctctggctgctgggggagccgtgtcactcctgggccatgggggcacctcctgggcacttaggtgtttcagcatagattccagtttcgcaccctgggcagacccccaggccccatccgggatagggcagaggaggtgctggcggccccagggaaggagggtgtgtaccccaaggccccctggctgtgctgaggggctggggtgagcgctccatgttcacatgagcactgctgcctcttcacttgtgggactttttgcaaacccaaggatgaactttgtgtgcattcaataaaatcatcttggggaagagg

SEQ ID NO: 650 - protein, 1009 aa, Homo sapiens
MGSRIKQNPETTFEVYVEVAYPRTGGTLSDPEVQRQFPEDYSDQEVLQTLTKFCFPFYVDSLTVSQVGQNFTFVLTDIDSKQRFGFCRLSSGAKSCFCILSYLPWFEVFYKLLNILADYTTKRQENQWNELLETLHKLPIPDPGVSVHLSVHSYFTVPDTRELPSIPENRNLTEYFVAVDVNNMLHLYASMLYERRILIICSKLSTLTACIHGSAAMLYPMYWQHVYIPVLPPHLLDYCCAPMPYLIGIHLSLMEKVRNMALDDVVILNVDTNTLETPFDDLQSLPNDVISSLKNRLKKVSTTTGDGVARAFLKAQAAFFGSYRNALKIEPEEPITFCEEAFVSHYRSGAMRQFLQNATQLQLFKQFIDGRLDLLNSGEGFSDVFEEEINMGEYAGSDKLYHQWLSTVRKGSGAILNTVKTKANPAMKTVYKFAKDHAKMGIKEVKNRLKQKDIAENGCAPTPEEQLPKTAPSPLVEAKDPKLREDRRPITVHFGQVRPPRPHVVKRPKSNIAVEGRRTSVPSPEQPQPYRTLRESDSAEGDEAESPEQQVRKSTGPVPAPPDRAASIDLLEDVFSNLDMEAALQPLGQAKSLEDLRAPKDLREQPGTFDYQRLDLGGSERSRGVTVALKLTHPYNKLWSLGQDDMAIPSKPPAASPEKPSALLGNSLALPRRPQNRDSILNPSDKEEVPTPTLGSITIPRPQGRKTPELGIVPPPPIPRPAKLQAAGAALGDVSERLQTDRDRRAALSPGLLPGVVPQGPTELLQPLSPGPGAAGTSSDALLALLDPLSTAWSGSTLPSRPATPNVATPFTPQFSFPPAGTPTPFPQPPLNPFVPSMPAAPPTLPLVSTPAGPFGAPPASLGPAFASGLLLSSAGFCAPHRSQPNLSALSMPNLFGQMPMGTHTSPLQPLGPPAVAPSRIRTLPLARSSARAAETKQGLALRPGDPPLLPPRPPQGLEPTLQPSAPQQARDPFEDLLQKTKQDVSPSPALAPAPDSVEQLRKQWETFE

SEQ ID NO: 651 - DNA, 2166 bp, Homo sapiens
cgcgcgccgggcacgcgcgccggcgaccatggcgttcgccgggctggagcgagtacattaacccctggaggcggcggcggcggcgagggagcgagcctcgagcgggcgggccccagcctgagggaagggaggaaggggcggggagagcgccagagggaggccggtcggccgcgggcgggcgggcagcgcagcgccgagcggggcccgcgggcccatgaggaggcctggggaccatgggctccaggatcaagcagaatccagagaccacatttgaagtatatgttgaagtggcctatcccaggacaggtggcactctttcagatcctgaggtgcagaggcaattcccggaggactacagtgaccaggaagttctacagactttgaccaagttttgtttccccttctatgtggacagcctcacagttagccaagttggccagaacttcacattcgtgctcactgacattgacagcaaacagagattcgggttctgccgcttatcttcaggagcgaagagctgcttctgtatcttaagctatctcccctggttcgaggtattttataagctgcttaacatcctggcagattacacgacaaaaagacaggaaaatcagtggaatgagcttcttgaaactctgcacaaacttcccatccctgacccaggagtgtctgtccatctcagcgtgcattcttattttactgtgcctgataccagagaacttcccagcatacctgagaatagaaatctgacagaatattttgtggctgtggatgttaacaacatgttgcatctgtacgccagtatgctgtacgaacgccggatactcatcatttgcagcaaactcagcactctgactgcctgcatccacgggtctgcggcgatgctctaccccatgtactggcagcacgtgtacatccccgtgctgccgccgcatctgctggactactgctgtgctcccatgccctacctcataggaatccatttaagtttaatggagaaagtcagaaacatggccctggatgatgtcgtgatcctgaatgtggacaccaacaccctggaaacccccttcgatgacctccagagcctcccaaacgacgtgatctcttccctgaagaacaggctgaaaaaggtctccacaaccactggggatggtgtggccagagcgttcctcaaggcccaggctgctttcttcggtagctaccgaaacgctctgaaaatcgagccggaggagccgatcactttctgtgaggaagccttcgtgtcccactaccgctccggagccatgaggcagttcctgcagaacgccacacagctgcagctcttcaagcagtttattgatggtcgattagatcttctcaattccggcgaaggtttcagtgatgtttttgaagaggaaatcaacatgggcgagtacgctggcagtgacaaactgtaccatcagtggctctccactgtccggaaaggaagtggagcaattctgaatactgtaaagaccaaagcaaatccggccatgaagactgtctacaagttcgcaaaagatcatgcaaaaatgggaataaaagaggtgaaaaaccgcttgaagcaaaaggacattgccgagaatggctgcgcccccaccccagaagagcagctgccaaagactgcaccgtccccactggtggaggccaaggaccccaagctccgagaagaccggcggccaatcacagtccactttggacaggtgcgcccacctcgtccacatgttgttaagagaccaaagagcaacatcgcagtggaaggccggaggacgtctgtgccgagccctgagcaaaacaccattgcaacaccagctacactccacatcctacagaaaagcattacccattttgcggccaagttcccgacgagaggctggacctcttcatcacattgacttacgccgttgcttttccagactgggcagaggggctgacttcgcagtgtgtgccaaagagccggtgtctgataatcccattttcctgcttatcacctgaactgtgtcagtatcacttttagttttgttggttggttggtttgttgtttgtttaatatgccctgttttctacttctgttggaaaatatttggggttgaaataaaccagtgggagcatggaaaaaaaaaaaaaaaaaaaaaaaaaaaaaaaaaa

SEQ ID NO: 652 - protein, 559 aa, Homo sapiens
MGSRIKQNPETTFEVYVEVAYPRTGGTLSDPEVQRQFPEDYSDQEVLQTLTKFCFPFYVDSLTVSQVGQNFTFVLTDIDSKQRFGFCRLSSGAKSCFCILSYLPWFEVFYKLLNILADYTTKRQENQWNELLETLHKLPIPDPGVSVHLSVHSYFTVPDTRELPSIPENRNLTEYFVAVDVNNMLHLYASMLYERRILIICSKLSTLTACIHGSAAMLYPMYWQHVYIPVLPPHLLDYCCAPMPYLIGIHLSLMEKVRNMALDDVVILNVDTNTLETPFDDLQSLPNDVISSLKNRLKKVSTTTGDGVARAFLKAQAAFFGSYRNALKIEPEEPITFCEEAFVSHYRSGAMRQFLQNATQLQLFKQFIDGRLDLLNSGEGFSDVFEEEINMGEYAGSDKLYHQWLSTVRKGSGAILNTVKTKANPAMKTVYKFAKDHAKMGIKEVKNRLKQKDIAENGCAPTPEEQLPKTAPSPLVEAKDPKLREDRRPITVHFGQVRPPRPHVVKRPKSNIAVEGRRTSVPSPEQNTIATPATLHILQKSITHFAAKFPTRGWTSSSH

SEQ ID NO: 653 - DNA, 3273 bp, Homo sapiens
agtccccgcgcagtccccgcgcagtcccagcgccaccgggcagcagcggcgccgtgctcgctccagggcgcaaccatgtcgccatttcttcggattggcttgtccaactttgactgcgggtcctgccagtcttgtcagggcgaggctgttaacccttactgtgctgtgctcgtcaaagagtatgtcgaatcagagaacgggcagatgtatatccagaaaaagcctaccatgtacccaccctgggacagcacttttgatgcccatatcaacaagggaagagtcatgcagatcattgtgaaaggcaaaaacgtggacctcatctctgaaaccaccgtggagctctactcgctggctgagaggtgcaggaagaacaacgggaagacagaaatatggttagagctgaaacctcaaggccgaatgctaatgaatgcaagatactttctggaaatgagtgacacaaaggacatgaatgaatttgagacggaaggcttctttgctttgcatcagcgccggggtgccatcaagcaggcaaaggtccaccacgtcaagtgccacgagttcactgccaccttcttcccacagcccacattttgctctgtctgccacgagtttgtctggggcctgaacaaacagggctaccagtgccgacaatgcaatgcagcaattcacaagaagtgtattgataaagttatagcaaagtgcacaggatcagctatcaatagccgagaaaccatgttccacaaggagagattcaaaattgacatgccacacagatttaaagtctacaattacaagagcccgaccttctgtgaacactgtgggaccctgctgtggggactggcacggcaaggactcaagtgtgatgcatgtggcatgaatgtgcatcatagatgccagacaaaggtggccaacctttgtggcataaaccagaagctaatggctgaagcgctggccatgattgagagcactcaacaggctcgctgcttaagagatactgaacagatcttcagagaaggtccggttgaaattggtctcccatgctccatcaaaaatgaagcaaggccgccatgtttaccgacaccgggaaaaagagagcctcagggcatttcctgggagtctccgttggatgaggtggataaaatgtgccatcttccagaacctgaactgaacaaagaaagaccatctctgcagattaaactaaaaattgaggattttatcttgcacaaaatgttggggaaaggaagttttggcaaggtcttcctggcagaattcaagaaaaccaatcaatttttcgcaataaaggccttaaagaaagatgtggtcttgatggacgatgatgttgagtgcacgatggtagagaagagagttctttccttggcctgggagcatccgtttctgacgcacatgttttgtacattccagaccaaggaaaacctcttttttgtgatggagtacctcaacggaggggacttaatgtaccacatccaaagctgccacaagttcgacctttccagagcgacgttttatgctgctgaaatcattcttggtctgcagttccttcattccaaaggaatagtctacagggacctgaagctagataacatcctgttagacaaagatggacatatcaagatcgcggattttggaatgtgcaaggagaacatgttaggagatgccaagacgaataccttctgtgggacacctgactacatcgccccagagatcttgctgggtcagaaatacaaccactctgtggactggtggtccttcggggttctcctttatgaaatgctgattggtcagtcgcctttccacgggcaggatgaggaggagctcttccactccatccgcatggacaatcccttttacccacggtggctggagaaggaagcaaaggaccttctggtgaagctcttcgtgcgagaacctgagaagaggctgggcgtgaggggagacatccgccagcaccctttgtttcgggagatcaactgggaggaacttgaacggaaggagattgacccaccgttccggccgaaagtgaaatcaccatttgactgcagcaatttcgacaaagaattcttaaacgagaagccccggctgtcatttgccgacagagcactgatcaacagcatggaccagaatatgttcaggaacttttccttcatgaaccccgggatggagcggctgatatcctgaatcttgcccctccagagacaggaaagaatttgccttctccctgggaactggttcaagagacactgcttgggttcctttttcaacttggaaaaagaaagaaacactcaacaataaagactgagacccgttcgcccccatgtgacttttatctgtagcagaaaccaagtctacttcactaatgacgatgccgtgtgtctcgtctcctgacatgtctcacagacgctcctgaagttaggtcattactaaccatagttatttacttgaaagatgggtctccgcacttggaaaggtttcaagacttgatactgcaataaattatggctcttcacctgggcgccaactgctgatcaatgaaatgcttgttgaatcaggggcaaacggagtacagacgtctcaagactgaaacggccccattgcctggtctagtagcggatctcactcagccgcagacaagtaatcactaacccgttttattctattcctatctgtggatgtgtaaatggctggggggccagccctggataggtttttatgggaattctttacaataaacatagcttgtaacttgagatctacaaatccattcatcctgattgggcatgaaatccatggtcaagaggacaagtggaaagtgagagggaaggtttgctagacaccttcgcttgttatcttgtcaagatagaaaagatagtatcatttcacccttgccagtaaaaacctttccatccacccattctcagcagactccagtattggcacagtcactcactgccattctcacactataacaagaaaagaaatgaagtgcataagtctcctgggaaaagaaccttaaccccttctcgtgccatgactggtgatttcatgactcataagcccctccgtaggcatcattcaagatcaatggcccatgcatgctgtttgcagcagtcaattgagttgaattagaattccaaccatacattttaaaggtatttgtgctgtgtgtatattttgataaaatgttgtgacttcatggcaaacaggtggatgtgtaaaaatggaataaaaaaaaaaaaagagtcaaaaaaaaaaaaa

SEQ ID NO: 654 - protein, 706 aa, Homo sapiens
MSPFLRIGLSNFDCGSCQSCQGEAVNPYCAVLVKEYVESENGQMYIQKKPTMYPPWDSTFDAHINKGRVMQIIVKGKNVDLISETTVELYSLAERCRKNNGKTEIWLELKPQGRMLMNARYFLEMSDTKDMNEFETEGFFALHQRRGAIKQAKVHHVKCHEFTATFFPQPTFCSVCHEFVWGLNKQGYQCRQCNAAIHKKCIDKVIAKCTGSAINSRETMFHKERFKIDMPHRFKVYNYKSPTFCEHCGTLLWGLARQGLKCDACGMNVHHRCQTKVANLCGINQKLMAEALAMIESTQQARCLRDTEQIFREGPVEIGLPCSIKNEARPPCLPTPGKREPQGISWESPLDEVDKMCHLPEPELNKERPSLQIKLKIEDFILHKMLGKGSFGKVFLAEFKKTNQFFAIKALKKDVVLMDDDVECTMVEKRVLSLAWEHPFLTHMFCTFQTKENLFFVMEYLNGGDLMYHIQSCHKFDLSRATFYAAEIILGLQFLHSKGIVYRDLKLDNILLDKDGHIKIADFGMCKENMLGDAKTNTFCGTPDYIAPEILLGQKYNHSVDWWSFGVLLYEMLIGQSPFHGQDEEELFHSIRMDNPFYPRWLEKEAKDLLVKLFVREPEKRLGVRGDIRQHPLFREINWEELERKEIDPPFRPKVKSPFDCSNFDKEFLNEKPRLSFADRALINSMDQNMFRNFSFMNPGMERLIS

SEQ ID NO: 655 - DNA, 7773 bp, Homo sapiens
agagcctcggtggtttgcagcagtggaaccaggcaggcccagttgtgggtaggagaggccgtcacctgttgaggcctcccccccacacccccgcatcgccctgccctggcagagcccagcccccagtccccggagagcgcgcctgaggacggacggacggacggacggacagacctagggacggagggccaggggcaggggagatccaagaggccccgcgctggaatgcagttttctcgggcgagggagactttgcaccggagtggaaaatagtttggggtggggtttcgcaccgtcccctcctccccagccccgggccccctcccaggcgctttctgggagcttttagaactgcgctctgaagtttccagagagcgaggagcttttgcggcaggcagagacaatggaagaaaatgaaagccagaaatgtgagccgtgccttccttactcagcagacagaagacagatgcaggaacaaggcaaaggcaatctgcatgtaacatcaccagaagatgcagaatgccgcagaaccaaggaacgcctttctaatggaaacagtcgtggttcagtttccaagtcttcccgcaatatcccaaggagacacaccctaggggggccccgaagttccaaggaaatactgggaatgcaaacatctgagatggatcggaagagagaagcgttcctagaacatctgaagcagaagtacccccaccacgcctctgcaatcatgggtcaccaagagaggctgagagaccagacaaggagccccaaactgtctcacagtcctcaaccacccagtctgggtgacccggtcgagcatttatcagagacgtccgctgattctttggaagccatgtctgagggggatgctccaacccctttttccagaggcagccggactcgtgcgagccttcctgtggtgaggtcaaccaaccagacgaaagaaagatctctgggggttctctatctccagtatggagatgaaaccaagcagctcaggatgccgaatgaaatcacaagtgcagacacaatccgtgctctcttcgtaagtgcctttccacagcagctcaccatgaaaatgctggaatcgcccagtgtcgccatttacatcaaagatgaaagcagaaatgtctattatgaattaaatgatgtaaggaacattcaagacagatcactcctcaaagtgtacaacaaggatcctgcacatgcgtttaatcacacaccaaaaactatgaatggagacatgaggatgcagagagaacttgtttatgcaagaggagatggccctggggcccctcgccccggatctactgctcatccaccccatgcgattccaaattccccaccgtctactccagtgccccattccatgcccccctccccgtccagaattccttatgggggcacccgctccatggttgttcctggcaatgccaccatccccagggacagaatctccagcctgccagtctccagacccatctctccaagcccaagcgccattttagaaagaagagatgtcaagcctgatgaagacatgagtggcaaaaacattgcaatgtacagaaatgagggtttctatgctgatccttacctttatcacgagggacggatgagcatagcctcatcccatggtggacacccactggatgtccccgaccacatcattgcatatcaccgcaccgccatccggtcagcgagtgcttattgtaacccctcaatgcaagcggaaatgcatatggaacaatcactgtacagacagaaatcaaggaaatatccggatagccatttgcctacactgggctccaaaacaccccctgcctctcctcacagagtcagtgacctgaggatgatagacatgcacgctcactataatgcccacggcccccctcacaccatgcagccagaccgggcctctccgagccgccaggcctttaaaaaggagccaggcaccttggtgtatatagaaaagccacggagcgctgcaggattatccagccttgtagacctcggccctcctctaatggagaagcaagtttttgcctacagcacggcgacaatacccaaagacagagagaccagagagaggatgcaagccatggagaaacagattgccagtttaactggccttgttcagtctgcgctttttaaagggcccattacaagttatagcaaagatgcgtctagcgagaaaatgatgaaaaccacagccaacaggaaccacacagatagtgcaggaacgccccatgtgtctggtgggaagatgctcagtgctctggagtccacggtgcctcccagccagcctccacctgtgggcacctcagccatccacatgagcctgcttgagatgaggcggagcgtggcggaactcaggctccagctccagcagatgcggcagctccagctgcagaaccaggagttgctgagggcaatgatgaagaaggccgagctggaaatcagtggcaaagtgatggaaacaatgaagagactggaggatcccgtgcagcgacagcgcgtcctagtggagcaagagagacaaaaatatcttcatgaggaagagaagatcgtcaagaagttgtgcgagttggaagactttgttgaagacttgaagaaggactccacggcagccagccgattggttactctgaaagacgtggaagacggggctttcctcctgcgtcaagtgggagaggctgtagctaccctgaaaggagaatttccaaccttacaaaacaagatgcgagccatcctgcgcatagaagtggaggccgtgcggtttctgaaggaggagccacacaagctggacagtctcctgaagcgtgtgcgcagcatgacagacgtcctgaccatgctgcggagacatgtcactgatgggctcctgaaaggcacggacgcagcccaagccgcacagtacatggctatggaaaaggccacagccgcagaagtcctgaagagtcaggaggaggcagcccacacctccggccagcccttccacagcacaggtgcccctggcgatgcgaagtcggaagtggtgcctttgtccggcatgatggttcgccacgcgcagagctcccctgtggtcatccagccctcccagcactccgtggccctgctgaaccctgctcagaacttgcctcacgtggccagctccccagccgtcccccaggaagcaacctccactctgcagatgtcgcaggctccgcagtccccacagatacccatgaatgggtctgccatgcagagcttgttcattgaagaaatccacagtgtgagtgccaagaacagggcagtgtctatcgagaaagcagaaaagaaatgggaggaaaaaaggcaaaatctggatcactataatgggaaagagtttgagaagctcctagaagaagctcaggccaatatcatgaagtcaataccaaatctggagatgccgccagccacaggcccactgccaaggggagatgccccagtggacaaggtggaactttcagaagattctccaaattcggaacaggacttggaaaagctggggggaaagtcgccccctcctcctccgccacctcctcgtcgaagctacctgccaggatcgggactcaccaccacgaggtcaggcgatgtggtctacaccggcagaaaggagaacatcaccgctaaggcaagcagtgaagatgctggaccaagcccacagaccagagctacaaaatatccagcagaggagcctgcttcagcctggaccccatccccaccgcctgtcaccacctcctcctcaaaggatgaggaggaagaagaagaagaaggagacaaaataatggcagaactccaggcattccagaagtgttcctttatggatgtaaattcaaacagtcatgctgagccatcccgggctgacagtcacgttaaagacactaggtcgggcgccacagtgccacccaaggagaagaagaatttggaatttttccatgaagatgtacggaaatctgatgttgaatatgaaaatggcccccaaatggaattccaaaaggttaccacaggggctgtaagacctagtgaccctcctaagtgggaaagaggaatggagaatagtatttctgatgcatcaagaacatcagaatataaaactgagatcataatgaaggaaaattccatatccaatatgagtttactcagagacagtagaaactattcccaggaaactgtgcctaaggccagtttcggtttctctggcattagtccattagaagatgaaataaacaaagggtctaaaatctcaggcctgcaatactctatacctgacaccgagaaccagacgctgaattacggaaagacaaaggagatggaaaagcaaaatacggataagtgtcacgtttcctctcacactagactaacagaatcaagcgtgcatgattttaaaacagaagatcaagaggttatcacgacagattttggccaagttgttctaagacccaaggaggcaaggcatgctaacgtgaaccctaatgaggatggagaatcaagttcaagttctcccactgaagaaaatgcagccactgacaatattgccttcatgattaccgaaaccactgtccaggttctttccagtggggaggtgcatgatattgttagccaaaagggagaagacatacagacggttaatatcgatgccagaaaagagatgaccccccgacaagaagggactgacaatgaggatccagtcgtgtgcctggacaagaaaccagtgatcatcattttcgatgagcccatggacatccggtctgcctataagagactttcaactatctttgaggaatgtgatgaggaattagagagaatgatgatggaggaaaagatagaggaggaggaagaggaggaaaatggggattctgtagtccagaataataacacttcccagatgtctcataagaaggtggccccaggcaatcttagaaccggacaacaggtggaaacaaagtcacagccacactccctggccacagagaccagaaacccaggaggacaggaaatgaacagaacggagctgaacaagttcagccacgtggattctccaaattcggaatgcaagggtgaggacgcgaccgatgaccagtttgaaagccccaagaaaaagtttaaattcaaattccctaagaagcaactcgccgctctcactcaagccattcgcaccggaactaaaacagggaagaagactttgcaagtggtagtctatgaagaagaggaagaggatggcaccctgaaacagcacaaagaagccaagcgcttcgaaatcgctaggtctcaacctgaagacacccctgaaaacacagtgaggaggcaagagcagcccagcatcgagagtacatctccgatttcaagaactgatgaaattagaaaaaacacctacagaacattggatagcctggagcagaccattaaacagctcgaaaatacaatcagtgaaatgagtcccaaagccctagttgatacctcatgttcttccaacagagattctgttgcaagttcatcccacatagcccaagaggcctctccccgacccttgctagttccggatgaaggtcccactgccctagagccccctacgtcgataccttcagcttcacgtaagggctccagcggggccccacagacgagcaggatgcctgtccccatgagtgccaagaacagacccggaaccctggacaaacccggcaagcagtccaaactgcaggatccccgccaatatcgtcaggctaatggaagtgctaagaaatctggtggggactttaagcctacttccccctccttacctgcttctaagattccagccctttctcccagctctgggaaaagcagttctctgccctcttctagtggtgacagctctaacctccctaatccacctgctactaaaccatcgattgcttctaaccctctcagcccccaaacaggaccacctgctcactctgcctccctcatcccttctgtctctaatggctctttgaagtttcagagcctcactcatacaggtaaaggtcaccatctttcattctcaccgcagagtcaaaatggccgagcaccccctcctttgtcattttcctcctcccctccttctcctgcctcctccgtctcactgaatcaaggtgccaagggcaccaggaccatccatactcccagcctcaccagctacaaggcacagaatggaagttcaagcaaagccaccccatccacagcaaaagaaacctcttaaaggtcaaatcctattaggcacaagtcggagttacatttaaaaaaaattaacagtctacaacaactgttttcacaagagaatgtaacatattgctgtatcgtttgaggcttaatgctaaatatgtgctaaatactggattaatagatttcagtaaagctcgttcgttttgtttggttttctttttacctagttgctatagtgtctacagtctatactcaatacctataaaatgcagtaagcatgtgttacagaaagaggttctggtgggagagaaaggtgcgtgtgagacaggagaattgtcttaagcatataaaacatgtatgattccagaattttagtatgttttgtataaaactatttttcattacggagactagaagtgaacagagaattacacaagtgtgactatacaaattgtaaaacagatactataatatttccttttattttagtgttatttagctttattacagatttctatttttgtcaaaacttcatggttcctttcaagatcttttttgccaaaacattttgatactatagcattgtacatttgaaagtagtgttctagactataaaaccaatgaacttctacatgagccctacagacaggcatgtgtagaaggcaatttatcaaacctattgcactgccatgaaaagtgtgtataataatttgctagcccaagcaagctagttttctttgcttgcttcttttctttcttttttccttccttttttttttttttttcttttttaacatgttgagattctctagttgttttctttggcgtatctaaccccttcttttgttttctgagacctggtaacccacgctcttgcattgtggattttaaaatgtatactctgtacggttctgtaaaccgaaaaacttttgtaaatatataaatatacatagacataaaaatactgtatgtgacagcacatagagtagttttcccacaccaaagttaatttttatgcatgctttaaaagtatatatcgggaccggcagaaatggaagtatccatacatttttaaaaagcaacaagtttgcacagctagagtgtttttgtaaataaatgtatttgtataacacagtcatgtaatatacagaactataagcagagactttgcaaaactaaataaagggctgcatgcttattattttttgtaccttgtcactataactacttcctagtcaaagaacgaaatgtaactgttaccgagttaaatgtttttccgctttgagggatgtaaccacatccactcagaggacactacttttctgaaagctctggggtgactaatgatgagttcctaataaattaattgcaagtgtggtgccttggatgtggcctgttggctcgctttcttctctgtggcttatcaaggtgtagatgacagaaagcaaacctggatacagagtttccaccctcagttcctggaggggctcttattattttctctctttttaaaaaacttccagtagaagtaaagtggaaataaaatgtctttatcaaaaaaaaaaaaaaaaaaaa

SEQ ID NO: 656 - protein, 1943 aa, Homo sapiens
MEENESQKCEPCLPYSADRRQMQEQGKGNLHVTSPEDAECRRTKERLSNGNSRGSVSKSSRNIPRRHTLGGPRSSKEILGMQTSEMDRKREAFLEHLKQKYPHHASAIMGHQERLRDQTRSPKLSHSPQPPSLGDPVEHLSETSADSLEAMSEGDAPTPFSRGSRTRASLPVVRSTNQTKERSLGVLYLQYGDETKQLRMPNEITSADTIRALFVSAFPQQLTMKMLESPSVAIYIKDESRNVYYELNDVRNIQDRSLLKVYNKDPAHAFNHTPKTMNGDMRMQRELVYARGDGPGAPRPGSTAHPPHAIPNSPPSTPVPHSMPPSPSRIPYGGTRSMVVPGNATIPRDRISSLPVSRPISPSPSAILERRDVKPDEDMSGKNIAMYRNEGFYADPYLYHEGRMSIASSHGGHPLDVPDHIIAYHRTAIRSASAYCNPSMQAEMHMEQSLYRQKSRKYPDSHLPTLGSKTPPASPHRVSDLRMIDMHAHYNAHGPPHTMQPDRASPSRQAFKKEPGTLVYIEKPRSAAGLSSLVDLGPPLMEKQVFAYSTATIPKDRETRERMQAMEKQIASLTGLVQSALFKGPITSYSKDASSEKMMKTTANRNHTDSAGTPHVSGGKMLSALESTVPPSQPPPVGTSAIHMSLLEMRRSVAELRLQLQQMRQLQLQNQELLRAMMKKAELEISGKVMETMKRLEDPVQRQRVLVEQERQKYLHEEEKIVKKLCELEDFVEDLKKDSTAASRLVTLKDVEDGAFLLRQVGEAVATLKGEFPTLQNKMRAILRIEVEAVRFLKEEPHKLDSLLKRVRSMTDVLTMLRRHVTDGLLKGTDAAQAAQYMAMEKATAAEVLKSQEEAAHTSGQPFHSTGAPGDAKSEVVPLSGMMVRHAQSSPVVIQPSQHSVALLNPAQNLPHVASSPAVPQEATSTLQMSQAPQSPQIPMNGSAMQSLFIEEIHSVSAKNRAVSIEKAEKKWEEKRQNLDHYNGKEFEKLLEEAQANIMKSIPNLEMPPATGPLPRGDAPVDKVELSEDSPNSEQDLEKLGGKSPPPPPPPPRRSYLPGSGLTTTRSGDVVYTGRKENITAKASSEDAGPSPQTRATKYPAEEPASAWTPSPPPVTTSSSKDEEEEEEEGDKIMAELQAFQKCSFMDVNSNSHAEPSRADSHVKDTRSGATVPPKEKKNLEFFHEDVRKSDVEYENGPQMEFQKVTTGAVRPSDPPKWERGMENSISDASRTSEYKTEIIMKENSISNMSLLRDSRNYSQETVPKASFGFSGISPLEDEINKGSKISGLQYSIPDTENQTLNYGKTKEMEKQNTDKCHVSSHTRLTESSVHDFKTEDQEVITTDFGQVVLRPKEARHANVNPNEDGESSSSSPTEENAATDNIAFMITETTVQVLSSGEVHDIVSQKGEDIQTVNIDARKEMTPRQEGTDNEDPVVCLDKKPVIIIFDEPMDIRSAYKRLSTIFEECDEELERMMMEEKIEEEEEEENGDSVVQNNNTSQMSHKKVAPGNLRTGQQVETKSQPHSLATETRNPGGQEMNRTELNKFSHVDSPNSECKGEDATDDQFESPKKKFKFKFPKKQLAALTQAIRTGTKTGKKTLQVVVYEEEEEDGTLKQHKEAKRFEIARSQPEDTPENTVRRQEQPSIESTSPISRTDEIRKNTYRTLDSLEQTIKQLENTISEMSPKALVDTSCSSNRDSVASSSHIAQEASPRPLLVPDEGPTALEPPTSIPSASRKGSSGAPQTSRMPVPMSAKNRPGTLDKPGKQSKLQDPRQYRQANGSAKKSGGDFKPTSPSLPASKIPALSPSSGKSSSLPSSSGDSSNLPNPPATKPSIASNPLSPQTGPPAHSASLIPSVSNGSLKFQSLTHTGKGHHLSFSPQSQNGRAPPPLSFSSSPPSPASSVSLNQGAKGTRTIHTPSLTSYKAQNGSSSKATPSTAKETS

SEQ ID NO: 657 - DNA, 3096 bp, Homo sapiens
cgggcgcccagagggcaaatgaggggcggcggggtggcgggtcggggggagacgcggaatttcccagcgcgggggctctggcttaccctgcaaccgggcagtctctttctgtttacggagagaaaggggaaatggaaaagtcggggaggcggtggctggcgtccgctgcgccgcccctgggcaggctcagacgccgtgagtcaggggcagagcagggcggtctgagcgtgcgggcgacgcgggtctcactcgtccgctccgctctggactgcgcgccacgctctggggtccggcgccctggttcctgcttctgccgctgccgccgccggatcccagtggcccggcgtgctcggctcccacaggcctgcagccagcatcgcaccgaaccttcggggggccgcggctggagcgctcggccggcgtgggagcgccaaggccgcagatgcaatcttcttaccgcgaagaagccaggggaataggtagccacatcttgtttgcagataagaaaggaagctaacgcagtatctgcaaagccaggagtctgactcagtacttttctcactcatgcatacaaagcagctaaaaatgacacagcttatttaccatgcccctgacactgcactgagcactttatgagcttgaactctgttaatcctcacgaccacctcatgagactctccagaaagagcaacagtaatggagtacatgagcactggaagtgacaataaagaagagattgatttattaattaaacatttaaatgtgtctgatgtaatagacattatggaaaatctttatgcaagtgaagagccagcagtttatgaacccagtctaatgaccatgtgtcaagacagtaatcaaaacgatgagcgttctaagtctctgctgcttagtggccaagaggtaccatggttgtcatcagtcagatatggaactgtggaggatttgcttgcttttgcaaaccatatatccaacactgcaaagcatttttatggacaacgaccacaggaatctggaattttattaaacatggtcatcactccccaaaatggacgttaccaaatagattccgatgttctcctgatcccctggaagctgacttacaggaatattggttctgattttattcctcggggcgcctttggaaaggtatacttggcacaagatataaagacgaagaaaagaatggcgtgtaaactgatcccagtagatcaatttaagccatctgatgtggaaatccaggcttgcttccggcacgagaacatcgcagagctgtatggcgcagtcctgtggggtgaaactgtccatctctttatggaagcaggcgagggagggtctgttctggagaaactggagagctgtggaccaatgagagaatttgaaattatttgggtgacaaagcatgttctcaagggacttgattttctacactcaaagaaagtgatccatcatgatattaaacctagcaacattgttttcatgtccacaaaagctgttttggtggattttggcctaagtgttcaaatgaccgaagatgtctattttcctaaggacctccgaggaacagagatttacatgagcccagaggtcatcctgtgcaggggccattcaaccaaagcagacatctacagcctgggggccacgctcatccacatgcagacgggcaccccaccctgggtgaagcgctaccctcgctcagcctatccctcctacctgtacataatccacaagcaagcacctccactggaagacattgcagatgactgcagtccagggatgagagagctgatagaagcttccctggagagaaaccccaatcaccgcccaagagccgcagacctactaaaacatgaggccctgaacccgcccagagaggatcagccacgctgtcagagtctggactctgccctcttggagcgcaagaggctgctgagtaggaaggagctggaacttcctgagaacattgctgattcttcgtgcacaggaagcaccgaggaatctgagatgctcaagaggcaacgctctctctacatcgacctcggcgctctggctggctacttcaatcttgttcggggaccaccaacgcttgaatatggctgaaggatgccatgtttgctctaaattaagacagcattgatctcctggaggctggttctgctgcctctacacaggggccctgtacagtgaatggtgccattttcgaaggagcagtgtgacctcctgtgacccatgaatgtgcctccaagcggccctgtgtgtttgacatgtgaagctatttgatatgcaccaggtctcaaggttctcatttctcaggtgacgtgattctaaggcaggaatttgagagttcacagaaggatcgtgtctgctgactgtttcattcactgtgcactttgctcaaaattttaaaaataccaatcacaaggataatagagtagcctaaaattactattcttggttcttatttaagtatggaatattcattttactcagaatagctgttttgtgtatattggtgtatattatataactctttgagcctttattggtaaattctggtatacattgaattcattataatttgggtgactagaacaacttgaagattgtagcaataagctggactagtgtcctaaaaatggctaactgatgaattagaagccatctgacagcaggccactagtgacagtttcttttgtgttcctatggaaacattttatactgtacatgctatgctgaagacattcaaaacgtgatgttttgaatgtggataaaactgtgtaaaccacataatttttgtacatcccaaaggatgagaatgtgacctttaagaaaaatgaaaacttttgtaaattattgatgattttgtaattcttatgactaaattttcttttaagcatttgtatattaaaatagcatactgtgtatgttttatatcaaatgccttcatgaatctttcatacatatatatatttgtaacattgtaaagtatgtgagtagtcttatgtaaagtatgtttttacattatgcaaataaaacccaatacttttgtccaatgtggttggtcaaatcaactgaataaattcagtattttgcctt

SEQ ID NO: 658 - protein, 467 aa, Homo sapiens
MEYMSTGSDNKEEIDLLIKHLNVSDVIDIMENLYASEEPAVYEPSLMTMCQDSNQNDERSKSLLLSGQEVPWLSSVRYGTVEDLLAFANHISNTAKHFYGQRPQESGILLNMVITPQNGRYQIDSDVLLIPWKLTYRNIGSDFIPRGAFGKVYLAQDIKTKKRMACKLIPVDQFKPSDVEIQACFRHENIAELYGAVLWGETVHLFMEAGEGGSVLEKLESCGPMREFEIIWVTKHVLKGLDFLHSKKVIHHDIKPSNIVFMSTKAVLVDFGLSVQMTEDVYFPKDLRGTEIYMSPEVILCRGHSTKADIYSLGATLIHMQTGTPPWVKRYPRSAYPSYLYIIHKQAPPLEDIADDCSPGMRELIEASLERNPNHRPRAADLLKHEALNPPREDQPRCQSLDSALLERKRLLSRKELELPENIADSSCTGSTEESEMLKRQRSLYIDLGALAGYFNLVRGPPTLEYG

SEQ ID NO: 659 - DNA, 2910 bp, Homo sapiens
ggcggcggccggccggggaggcggcctcggcgcacagtaatggcagcgctgtgagcaggggaacgcgagctgacagccgccgccgccgccgcctccgcccaccttcctcgccggggcttcgtctttcactccttcgggctgcctccccctccccttgtcccctgccccttgccctgcttctgcagaagatttcaacactacacttgcacaatgtctttgaaaccaagagtagtagattttgatgaaacatggaacaaacttttgacgacaataaaagccgtggtcatgttggaatacgtcgaaagagcaacatggaatgaccgtttctcagatatctatgctttatgtgtggcctatcctgaaccccttggagaaagactttatacagaaactaagatttttttggaaaatcatgttcggcatttgcataagagagttttggagtcagaagaacaagtacttgttatgtatcataggtactgggaagaatacagcaagggtgcagactatatggactgcttatataggtatctcaacacccagtttattaaaaagaataaattaacagaagcggaccttcagtatggctatggtggtgtagatatgaatgaaccacttatggaaataggagagctagcattggatatgtggaggaaattgatggttgaaccacttcaggccatccttatccgaatgctgctccgagaaatcaaaaatgatcgtggtggagaagacccaaaccagaaagtaatccatggggttattaactcctttgttcatgttgaacagtataagaaaaaattccccttaaagttttatcaggaaatttttgagtctccctttctgactgaaacaggagagtattacaaacaagaagcttcaaatttattacaagaatcaaactgctcacagtatatggaaaaggttctaggtagattaaaagatgaagaaattcgatgtcgaaaatacctacatccaagttcatatactaaggtgattcatgaatgtcaacaacgaatggtagcagaccacttacagtttttacatgcagaatgtcataatataattcgacaagagaaaaaaaatgacatggcaaatatgtacgtcttactccgtgctgtgtccactggtttacctcatatgattcaggagctgcaaaaccacatccatgatgagggccttcgagcaaccagcaaccttactcaggaaaacatgccaacactatttgtggagtcagttttggaagtgcatggtaaatttgttcagcttatcaacactgttttgaatggtgatcagcattttatgagtgcgttggataaggcccttacgtcagttgtaaattacagagaacctaagtctgtttgcaaagcacctgaactgcttgctaagtactgtgacaacttactgaagaagtcagcgaaagggatgacagagaatgaagtggaagacaggctcacgagcttcatcacagtgttcaaatacattgatgacaaggacgtctttcaaaagttctacgcaagaatgctggcaaaacgtttaattcatgggttatccatgtctatggactctgaagaagccatgatcaacaaattaaagcaagcctgtggttatgagtttaccagcaagctacatcggatgtatacagatatgagtgtcagcgctgatctcaacaataagttcaacaattttatcaaaaaccaagacacagtaatagatttgggaattagttttcaaatatatgttctacaggctggtgcgtggcctcttactcaggctccttcatctacgtttgcaattccccaggaattagaaaaaagtgtacagatgtttgaattattttatagccaacatttcagtggaaggaaacttacatggttacattatctgtgtacaggtgaagttaaaatgaactatttgggcaaaccatatgtagccatggttacaacataccaaatggcagttcttcttgcctttaacaacagtgaaactgtcagttataaagagcttcaggacagcactcagatgaatgaaaaggaactgacaaaaacaatcaaatcattacttgatgtgaaaatgattaaccatgattcagaaaaggaagatattgatgcagaatcttcgttttcattaaatatgaactttagcagtaaaagaacaaaatttaaaattactacatcaatgcagaaagacacaccacaagaaatggagcagactagaagtgcagttgatgaggaccggaaaatgtatctccaagctgctatagttcgtatcatgaaagcacgaaaagtgcttcggcacaatgcccttattcaagaggtgattagccagtcaagagctaggtttaatcccagtatcagcatgattaagaagtgtattgaagttctgatagacaaacaatacatagaacgcagccaggcgtcggcagatgaatacagctacgtcgcgtgatgtcgctctcctccagcgtggtgtgagaagatcattgccatcaccatttggtgtgttcctgtgggaaaaagcaggactgtgcctccataatttggtcatttggcagcccctgttttctgctgtttacaacatcaccagtgccacgtcatgagcgtcaaagaaaatgcctagagatatttcaagctcatgtcattatgacatttcttaaaactttattaaaagaatgagtgaagtattgctgaaaagtggaaattcggttgggtaccatgctttttctccccttcacgtttgcagttgatgtgtctttttttttttttttaatgtatcttaaaggacataaaatttaaaaacttaaatattgtaatatgacagataacctaataattgtatctacattaaaatgacaaacatgatactgctgcttgtcaaataaaaaaaaaaaaaaaaaaaaaaaaaaaaaaa

SEQ ID NO: 660 - protein, 745 aa, Homo sapiens
MSLKPRVVDFDETWNKLLTTIKAVVMLEYVERATWNDRFSDIYALCVAYPEPLGERLYTETKIFLENHVRHLHKRVLESEEQVLVMYHRYWEEYSKGADYMDCLYRYLNTQFIKKNKLTEADLQYGYGGVDMNEPLMEIGELALDMWRKLMVEPLQAILIRMLLREIKNDRGGEDPNQKVIHGVINSFVHVEQYKKKFPLKFYQEIFESPFLTETGEYYKQEASNLLQESNCSQYMEKVLGRLKDEEIRCRKYLHPSSYTKVIHECQQRMVADHLQFLHAECHNIIRQEKKNDMANMYVLLRAVSTGLPHMIQELQNHIHDEGLRATSNLTQENMPTLFVESVLEVHGKFVQLINTVLNGDQHFMSALDKALTSVVNYREPKSVCKAPELLAKYCDNLLKKSAKGMTENEVEDRLTSFITVFKYIDDKDVFQKFYARMLAKRLIHGLSMSMDSEEAMINKLKQACGYEFTSKLHRMYTDMSVSADLNNKFNNFIKNQDTVIDLGISFQIYVLQAGAWPLTQAPSSTFAIPQELEKSVQMFELFYSQHFSGRKLTWLHYLCTGEVKMNYLGKPYVAMVTTYQMAVLLAFNNSETVSYKELQDSTQMNEKELTKTIKSLLDVKMINHDSEKEDIDAESSFSLNMNFSSKRTKFKITTSMQKDTPQEMEQTRSAVDEDRKMYLQAAIVRIMKARKVLRHNALIQEVISQSRARFNPSISMIKKCIEVLIDKQYIERSQASADEYSYVA

SEQ ID NO: 661 - DNA, 1005 bp, Homo sapiens
atggtagggaatggtccagactctctagagggaaaatggggccgcgggagaggcggccaagatcgggttggggaggcccgggatccagtccagggggtggcagggcttacgggtcagcgctctggggagccgaggtcacttacaggataccatcttcccgggcctccccctttcatccctctccccacacctcgtcgcccccaactcctctcctccgccccagccccgccacccattaaccgggaagggaagtttcccggcgcctgcagcccggctccccgaccctcagcggggttaccttctgcagaagcagggcaaggggcaggggacaaggggagggggaggcagcccgaaggagtgaaagacgaagccccggcgaggaaggtgggcggaggcggcggcggcggcggctgtcagctcgcgttcccctgctcacagcgctgccattactgtgcgccgaggccgcctccccggccggccgccgccaccggccccggagacgcggggggtggggagcgaagcccggggagcccgcgcgccgacactcacctgtctccgcgaggaaagacagcaaagtccaaggccgccgccgctccccggcgggacaggggcggtagggagggggggaaaggggagaaggacgggccgatcacgggatccgtaaaacaatcgtcctcctctgcctccggctttgcccaacacacaccctccggtctccttcttccgctgctgccaaatcccccccgccacccggaaagcaatggtacaggccgcgttacgggggcggagttcgagcctggatttttttcctcggggcctcccccgggaggccgtcccggcgtgggggaggggaggacggggcgggaggacgcggttcggtcggctgcagcgctacttttggtccggggtcggcagggaggccgcggctaccgcatcacagctgacgtgaggactacgtggggccgctgccggctccgggttgctgggcggcggcgccgctgctga

SEQ ID NO: 662 - protein, 334 aa, Homo sapiens
MVGNGPDSLEGKWGRGRGGQDRVGEARDPVQGVAGLTGQRSGEPRSLTGYHLPGPPPFIPLPTPRRPQLLSSAPAPPPINREGKFPGACSPAPRPSAGLPSAEAGQGAGDKGRGRQPEGVKDEAPARKVGGGGGGGGCQLAFPCSQRCHYCAPRPPPRPAAATGPGDAGGGERSPGSPRADTHLSPRGKTAKSKAAAAPRRDRGGREGGKGEKDGPITGSVKQSSSSASGFAQHTPSGLLLPLLPNPPRHPESNGTGRVTGAEFEPGFFSSGPPPGGRPGVGEGRTGREDAVRSAAALLLVRGRQGGRGYRITADVRTTWGRCRLRVAGRRRRC

SEQ ID NO: 663 - DNA, 1308 bp, Homo sapiens
gctggcggccggcagggggcggagttcgagcctggatttttttcctcggggcctcccccgggaggccgtcccggcgtgggggaggggaggacggggcgggaggacgcggttcggtcggctgcagcgctacttttggtccggggtcggcagggaggccgcggctaccgcatcacagctgacgtgaggactacgtggggccgctgccggctccgggttgctgggcggcggcgccgctgctgagcggcggtcgggctcgccgtctccacctcctcgcgtccgtaatcagtgacgaggtccgctacgtaaatccctttgcggcggacaaatgaccatggaaacagttgaatcccagcatgatggaagtataacagcttctttgacagagagcaagtctgctcatgtgcagactcagactggccaaaattcaatccctgctttagctcaggtagcagcaattgcagagacagatgaatctgcagaatcagaaggtgtaattgattctcataaacgtagagaaatcctttcacgaagaccctcttataggaaaatactgaatgaactgtcctctgatgtgcctggtgttcccaagattgaagaagagagatcagaggaagaaggaacaccacctagtattgctaccatggcagtaccaactagcatatatcagactagcacggggcaatacagtatgtatgctgcaattcgatatgatacagtgctagctttaagtcttctctagttatattgaagcaactcaggttttggcattaaattgttccattttaaaatgcatcattaatacctaaactgtatcatagaatgaaagtatatgttaaaaagtgagatctttgtattgacagctgtcatataattttgaaaagtaaaaattttgactgccgaatatagaagaaaattttggggtaaaaaggagaatttttcctatttacatgtttatattaatctctagtaaaacattgtttttgttgtctttatgatgcatgcgaacataaatgtctgtatttcattcttgttggcttttgttacccacaattacatactattcttactaatctgagagttttctaaagtatgttttcaatgtttcactactctctactctgttaatttgtgctacagtttttcctaaaagagaatggaaaaatgatttaattttttaaactgtagcaattggatagataattttatttgaaattttacacactgaaagctctaaataaacagatacattcacattcaaaaaaaaaaaaaaaaaaaaaaaaaaaaaaaaaaaaaaaaaaaaaaaaaaaa

SEQ ID NO: 664 - protein, 137 aa, Homo sapiens
MTMETVESQHDGSITASLTESKSAHVQTQTGQNSIPALAQVAAIAETDESAESEGVIDSHKRREILSRRPSYRKILNELSSDVPGVPKIEEERSEEEGTPPSIATMAVPTSIYQTSTGQYSMYAAIRYDTVLALSLL

SEQ ID NO: 665 - DNA, 2225 bp, Homo sapiens
gacccgcctgcctcctcgcgaacttgggacgagttggaaaatcctccctgagagagccgtgcggctcaggggagcggtttaactcggaaaaggaaaaggaatccagaagataaataaagaaaacaggaaaggaggaaagcattgattacaaatatcttaacaatgagcaaatgtgcaaggaaaaaatatattaagacaaatccaagacaaatgaccatggaaacagttgaatcccagcatgatggaagtataacagcttctttgacagagagcaagtctgctcatgtgcagactcagactggccaaaattcaatccctgctttagctcaggtagcagcaattgcagagacagatgaatctgcagaatcagaaggtgtaattgattctcataaacgtagagaaatcctttcacgaagaccctcttataggaaaatactgaatgaactgtcctctgatgtgcctggtgttcccaagattgaagaagagagatcagaggaagaaggaacaccacctagtattgctaccatggcagtaccaactagcatatatcagactagcacggggcaatacattgctatagcccaaggtggaacaatccagatttctaacccaggatctgatggtgttcagggactgcaggcattaacaatgacaaattcaggagctcctccaccaggtgctacaattgtacagtacgcagcacaatcagctgatggcacacagcagttctttgtcccaggcagccaggttgttgttcaagctgccactggtgacatgccaacttaccagatccgagctcctactgctgctttgccacagggagtggtgatggctgcatcgcccggaagtttgcacagtccccagcagctggcagaagaagcaacacgcaaacgagagctgaggctaatgaaaaacagggaagctgccaaagaatgtcgacgtcgaaagaaagaatatgtaaaatgtctggagagccgagttgcagtgctggaagtccagaacaagaagcttatagaggaacttgaaaccttgaaagacatttgttctcccaaaacagattactagaaatatttaactatgaactgaaggcagcatgtatagttgcttttgaaggaatacaatatatagctggcaagaatggtggcttcttttctttgtatcattcatcttcttctttaatcacttaacattcctaaaatgcttcactgtacgtagttaagtcgtagctataacttcaaattttttaaaagagacaaactgtaaaaaatgtgtgtattcttaaaatgcaatatttgtaaggcttgttccaatgccacatacttgcagctcccattctatgtgtcatcaatagtgtcctatgcaataaaattatttgcaggtctttaaatcattttaggaaaggatgatcaaaaataatgcatccagcagtacaataaaagtaaaccacaaaaaaatacctcaggaaagaatagaaagaaagtctatctaatgacatgcctatatgagaagaatagcctagatatgaatatatggcatttgcagatttttatattagttgctttgttaaaaaaaaaaagattgtattgctgtccttgaatgccatagtcaaagagagtttttaatagaaccatgttggttgcactttgtagtgtttggtgctcatttaaatatctgaacatttactacagtttttaactctactgtgtaatataaaagatcttgcagaagttcttagtgttggtttaatattacctaatgaaagtgatgacatattttttatatctggaatgagcctgttgggatcgcattgcataccttcggggtacaagtcagtttctacactgggtgctgatccttgcacgcgccctttctaccatctcacggtggggatggccgcagggctgtgcacccagaagaagatggctgttagcgtttcggccttcataatggcctgagactttctttctgtaggtggtctggagctgtccggctggtggccccctattttgccatttagcgaacaaccacaggaattttaaaaacaaaaacatcccaagattttttcatttcaaaatgcttcaaagtccacattagatcagatactccgctgtcggcacattcagctgaggttcattacaatcgagactgcaatgtgatctatgtttcatcttgtttttataataaaaagcttcagggaacaagcccaaagccctcaccacaaaaaa

SEQ ID NO: 666 - protein, 300 aa, Homo sapiens
MSKCARKKYIKTNPRQMTMETVESQHDGSITASLTESKSAHVQTQTGQNSIPALAQVAAIAETDESAESEGVIDSHKRREILSRRPSYRKILNELSSDVPGVPKIEEERSEEEGTPPSIATMAVPTSIYQTSTGQYIAIAQGGTIQISNPGSDGVQGLQALTMTNSGAPPPGATIVQYAAQSADGTQQFFVPGSQVVVQAATGDMPTYQIRAPTAALPQGVVMAASPGSLHSPQQLAEEATRKRELRLMKNREAAKECRRRKKEYVKCLESRVAVLEVQNKKLIEELETLKDICSPKTDY

SEQ ID NO: 667 - DNA, 1991 bp, Homo sapiens
tggaacactttatgttgaactgtggtagaggaaacaagacagttctgtctgcagaagcccattatggctgtaactggagatgacacagatgaggaaactgaacttgccccaagtcacatggctgctgccactggtgacatgccaacttaccagatccgagctcctactgctgctttgccacagggagtggtgatggctgcatcgcccggaagtttgcacagtccccagcagctggcagaagaagcaacacgcaaacgagagctgaggctaatgaaaaacagggaagctgcccgggagtgtcgcaggaagaagaaagaatatgtcaaatgtcttgaaaatcgtgtggctgtgcttgaaaaccaaaacaagactctcattgaggaactcaaggccctcaaagatctttattgccataaagtagagtaactgtctttgacttggaccttgtttactctaatcaaggcaggagatgcagcagtcctacttattgccatgtggacttgtgggaaggacacgtgtgacccttaagaatccagtttggattagtgtttgaaattgaattgggaatgttgttccaggatgtggaatgcagccgtgatcacacttaccgagcttactttgatctgtttgtcaatagcatgcaaaaaatgctttgtttgccctttgcttctgctttttttcagggaagctgccaaagaatgtcgacgtcgaaagaaagaatatgtaaaatgtctggagagccgagttgcagtgctggaagtccagaacaagaagcttatagaggaacttgaaaccttgaaagacatttgttctcccaaaacagattactagaaatatttaactatgaactgaaggcagcatgtatagttgcttttgaaggaatacaatatatagctggcaagaatggtggcttcttttctttgtatcattcatcttcttctttaatcacttaacattcctaaaatgcttcactgtacgtagttaagtcgtagctataacttcaaattttttaaaagagacaaactgtaaaaaatgtgtgtattcttaaaatgcaatatttgtaaggcttgttccaatgccacatacttgcagctcccattctatgtgtcatcaatagtgtcctatgcaataaaattatttgcaggtctttaaatcattttaggaaaggatgatcaaaaataatgcatccagcagtacaataaaagtaaaccacaaaaaaatacctcaggaaagaatagaaagaaagtctatctaatgacatgcctatatgagaagaatagcctagatatgaatatatggcatttgcagatttttatattagttgctttgttaaaaaaaaaaagattgtattgctgtccttgaatgccatagtcaaagagagtttttaatagaaccatgttggttgcactttgtagtgtttggtgctcatttaaatatctgaacatttactacagtttttaactctactgtgtaatataaaagatcttgcagaagttcttagtgttggtttaatattacctaatgaaagtgatgacatattttttatatctggaatgagcctgttgggatcgcattgcataccttcggggtacaagtcagtttctacactgggtgctgatccttgcacgcgccctttctaccatctcacggtggggatggccgcagggctgtgcacccagaagaagatggctgttagcgtttcggccttcataatggcctgagactttctttctgtaggtggtctggagctgtccggctggtggccccctattttgccatttagcgaacaaccacaggaattttaaaaacaaaaacatcccaagattttttcatttcaaaatgcttcaaagtccacattagatcagatactccgctgtcggcacattcagctgaggttcattacaatcgagactgcaatgtgatctatgtttcatcttgtttttataataaaaagcttcagggaacaagcccaaagccctcaccacaaaaaa

SEQ ID NO: 668 - protein, 120 aa, Homo sapiens
MAVTGDDTDEETELAPSHMAAATGDMPTYQIRAPTAALPQGVVMAASPGSLHSPQQLAEEATRKRELRLMKNREAARECRRKKKEYVKCLENRVAVLENQNKTLIEELKALKDLYCHKVE

SEQ ID NO: 669 - DNA, 1553 bp, Homo sapiens
tggaacactttatgttgaactgtggtagaggaaacaagacagttctgtctgcagaagcccattatggctgtaactggagatgacacagctgccactggtgacatgccaacttaccagatccgagctcctactgctgctttgccacagggagtggtgatggctgcatcgcccggaagtttgcacagtccccagcagctggcagaagaagcaacacgcaaacgagagctgaggctaatgaaaaacagggaagctgccaaagaatgtcgacgtcgaaagaaagaatatgtaaaatgtctggagagccgagttgcagtgctggaagtccagaacaagaagcttatagaggaacttgaaaccttgaaagacatttgttctcccaaaacagattactagaaatatttaactatgaactgaaggcagcatgtatagttgcttttgaaggaatacaatatatagctggcaagaatggtggcttcttttctttgtatcattcatcttcttctttaatcacttaacattcctaaaatgcttcactgtacgtagttaagtcgtagctataacttcaaattttttaaaagagacaaactgtaaaaaatgtgtgtattcttaaaatgcaatatttgtaaggcttgttccaatgccacatacttgcagctcccattctatgtgtcatcaatagtgtcctatgcaataaaattatttgcaggtctttaaatcattttaggaaaggatgatcaaaaataatgcatccagcagtacaataaaagtaaaccacaaaaaaatacctcaggaaagaatagaaagaaagtctatctaatgacatgcctatatgagaagaatagcctagatatgaatatatggcatttgcagatttttatattagttgctttgttaaaaaaaaaaagattgtattgctgtccttgaatgccatagtcaaagagagtttttaatagaaccatgttggttgcactttgtagtgtttggtgctcatttaaatatctgaacatttactacagtttttaactctactgtgtaatataaaagatcttgcagaagttcttagtgttggtttaatattacctaatgaaagtgatgacatattttttatatctggaatgagcctgttgggatcgcattgcataccttcggggtacaagtcagtttctacactgggtgctgatccttgcacgcgccctttctaccatctcacggtggggatggccgcagggctgtgcacccagaagaagatggctgttagcgtttcggccttcataatggcctgagactttctttctgtaggtggtctggagctgtccggctggtggccccctattttgccatttagcgaacaaccacaggaattttaaaaacaaaaacatcccaagattttttcatttcaaaatgcttcaaagtccacattagatcagatactccgctgtcggcacattcagctgaggttcattacaatcgagactgcaatgtgatctatgtttcatcttgtttttataataaaaagcttcagggaacaagcccaaagccctcaccacaaaaaa

SEQ ID NO: 670 - protein, 109 aa, Homo sapiens
MAVTGDDTAATGDMPTYQIRAPTAALPQGVVMAASPGSLHSPQQLAEEATRKRELRLMKNREAAKECRRRKKEYVKCLESRVAVLEVQNKKLIEELETLKDICSPKTDY

SEQ ID NO: 671 - DNA, 1589 bp, Homo sapiens
tggaacactttatgttgaactgtggtagaggaaacaagacagttctgtctgcagaagcccattatggctgtaactggagatgacacagatgaggaaactgaacttgccccaagtcacatggctgctgccactggtgacatgccaacttaccagatccgagctcctactgctgctttgccacagggagtggtgatggctgcatcgcccggaagtttgcacagtccccagcagctggcagaagaagcaacacgcaaacgagagctgaggctaatgaaaaacagggaagctgccaaagaatgtcgacgtcgaaagaaagaatatgtaaaatgtctggagagccgagttgcagtgctggaagtccagaacaagaagcttatagaggaacttgaaaccttgaaagacatttgttctcccaaaacagattactagaaatatttaactatgaactgaaggcagcatgtatagttgcttttgaaggaatacaatatatagctggcaagaatggtggcttcttttctttgtatcattcatcttcttctttaatcacttaacattcctaaaatgcttcactgtacgtagttaagtcgtagctataacttcaaattttttaaaagagacaaactgtaaaaaatgtgtgtattcttaaaatgcaatatttgtaaggcttgttccaatgccacatacttgcagctcccattctatgtgtcatcaatagtgtcctatgcaataaaattatttgcaggtctttaaatcattttaggaaaggatgatcaaaaataatgcatccagcagtacaataaaagtaaaccacaaaaaaatacctcaggaaagaatagaaagaaagtctatctaatgacatgcctatatgagaagaatagcctagatatgaatatatggcatttgcagatttttatattagttgctttgttaaaaaaaaaaagattgtattgctgtccttgaatgccatagtcaaagagagtttttaatagaaccatgttggttgcactttgtagtgtttggtgctcatttaaatatctgaacatttactacagtttttaactctactgtgtaatataaaagatcttgcagaagttcttagtgttggtttaatattacctaatgaaagtgatgacatattttttatatctggaatgagcctgttgggatcgcattgcataccttcggggtacaagtcagtttctacactgggtgctgatccttgcacgcgccctttctaccatctcacggtggggatggccgcagggctgtgcacccagaagaagatggctgttagcgtttcggccttcataatggcctgagactttctttctgtaggtggtctggagctgtccggctggtggccccctattttgccatttagcgaacaaccacaggaattttaaaaacaaaaacatcccaagattttttcatttcaaaatgcttcaaagtccacattagatcagatactccgctgtcggcacattcagctgaggttcattacaatcgagactgcaatgtgatctatgtttcatcttgtttttataataaaaagcttcagggaacaagcccaaagccctcaccacaaaaaa

SEQ ID NO: 672 - protein, 121 aa, Homo sapiens
MAVTGDDTDEETELAPSHMAAATGDMPTYQIRAPTAALPQGVVMAASPGSLHSPQQLAEEATRKRELRLMKNREAAKECRRRKKEYVKCLESRVAVLEVQNKKLIEELETLKDICSPKTDY

SEQ ID NO: 673 - DNA, 1955 bp, Homo sapiens
tggaacactttatgttgaactgtggtagaggaaacaagacagttctgtctgcagaagcccattatggctgtaactggagatgacacagctgccactggtgacatgccaacttaccagatccgagctcctactgctgctttgccacagggagtggtgatggctgcatcgcccggaagtttgcacagtccccagcagctggcagaagaagcaacacgcaaacgagagctgaggctaatgaaaaacagggaagctgcccgggagtgtcgcaggaagaagaaagaatatgtcaaatgtcttgaaaatcgtgtggctgtgcttgaaaaccaaaacaagactctcattgaggaactcaaggccctcaaagatctttattgccataaagtagagtaactgtctttgacttggaccttgtttactctaatcaaggcaggagatgcagcagtcctacttattgccatgtggacttgtgggaaggacacgtgtgacccttaagaatccagtttggattagtgtttgaaattgaattgggaatgttgttccaggatgtggaatgcagccgtgatcacacttaccgagcttactttgatctgtttgtcaatagcatgcaaaaaatgctttgtttgccctttgcttctgctttttttcagggaagctgccaaagaatgtcgacgtcgaaagaaagaatatgtaaaatgtctggagagccgagttgcagtgctggaagtccagaacaagaagcttatagaggaacttgaaaccttgaaagacatttgttctcccaaaacagattactagaaatatttaactatgaactgaaggcagcatgtatagttgcttttgaaggaatacaatatatagctggcaagaatggtggcttcttttctttgtatcattcatcttcttctttaatcacttaacattcctaaaatgcttcactgtacgtagttaagtcgtagctataacttcaaattttttaaaagagacaaactgtaaaaaatgtgtgtattcttaaaatgcaatatttgtaaggcttgttccaatgccacatacttgcagctcccattctatgtgtcatcaatagtgtcctatgcaataaaattatttgcaggtctttaaatcattttaggaaaggatgatcaaaaataatgcatccagcagtacaataaaagtaaaccacaaaaaaatacctcaggaaagaatagaaagaaagtctatctaatgacatgcctatatgagaagaatagcctagatatgaatatatggcatttgcagatttttatattagttgctttgttaaaaaaaaaaagattgtattgctgtccttgaatgccatagtcaaagagagtttttaatagaaccatgttggttgcactttgtagtgtttggtgctcatttaaatatctgaacatttactacagtttttaactctactgtgtaatataaaagatcttgcagaagttcttagtgttggtttaatattacctaatgaaagtgatgacatattttttatatctggaatgagcctgttgggatcgcattgcataccttcggggtacaagtcagtttctacactgggtgctgatccttgcacgcgccctttctaccatctcacggtggggatggccgcagggctgtgcacccagaagaagatggctgttagcgtttcggccttcataatggcctgagactttctttctgtaggtggtctggagctgtccggctggtggccccctattttgccatttagcgaacaaccacaggaattttaaaaacaaaaacatcccaagattttttcatttcaaaatgcttcaaagtccacattagatcagatactccgctgtcggcacattcagctgaggttcattacaatcgagactgcaatgtgatctatgtttcatcttgtttttataataaaaagcttcagggaacaagcccaaagccctcaccacaaaaaa

SEQ ID NO: 674 - protein, 108 aa, Homo sapiens
MAVTGDDTAATGDMPTYQIRAPTAALPQGVVMAASPGSLHSPQQLAEEATRKRELRLMKNREAARECRRKKKEYVKCLENRVAVLENQNKTLIEELKALKDLYCHKVE

SEQ ID NO: 675 - DNA, 2065 bp, Homo sapiens
gtaaaatgctgctgacagatttagagttaactagctcaccactgcctctgcctccaagctgccttttagactgaatagcttttcttgttagccctactttaacatttcttttgaagtggttgtctgcttgaagagggaaacacgtcatgaaactgtaatgcatgaacagaactcaggagttgtctggccagcttagtgctgccactggtgacatgccaacttaccagatccgagctcctactgctgctttgccacagggagtggtgatggctgcatcgcccggaagtttgcacagtccccagcagctggcagaagaagcaacacgcaaacgagagctgaggctaatgaaaaacagggaagctgcccgggagtgtcgcaggaagaagaaagaatatgtcaaatgtcttgaaaatcgtgtggctgtgcttgaaaaccaaaacaagactctcattgaggaactcaaggccctcaaagatctttattgccataaagtagagtaactgtctttgacttggaccttgtttactctaatcaaggcaggagatgcagcagtcctacttattgccatgtggacttgtgggaaggacacgtgtgacccttaagaatccagtttggattagtgtttgaaattgaattgggaatgttgttccaggatgtggaatgcagccgtgatcacacttaccgagcttactttgatctgtttgtcaatagcatgcaaaaaatgctttgtttgccctttgcttctgctttttttcagggaagctgccaaagaatgtcgacgtcgaaagaaagaatatgtaaaatgtctggagagccgagttgcagtgctggaagtccagaacaagaagcttatagaggaacttgaaaccttgaaagacatttgttctcccaaaacagattactagaaatatttaactatgaactgaaggcagcatgtatagttgcttttgaaggaatacaatatatagctggcaagaatggtggcttcttttctttgtatcattcatcttcttctttaatcacttaacattcctaaaatgcttcactgtacgtagttaagtcgtagctataacttcaaattttttaaaagagacaaactgtaaaaaatgtgtgtattcttaaaatgcaatatttgtaaggcttgttccaatgccacatacttgcagctcccattctatgtgtcatcaatagtgtcctatgcaataaaattatttgcaggtctttaaatcattttaggaaaggatgatcaaaaataatgcatccagcagtacaataaaagtaaaccacaaaaaaatacctcaggaaagaatagaaagaaagtctatctaatgacatgcctatatgagaagaatagcctagatatgaatatatggcatttgcagatttttatattagttgctttgttaaaaaaaaaaagattgtattgctgtccttgaatgccatagtcaaagagagtttttaatagaaccatgttggttgcactttgtagtgtttggtgctcatttaaatatctgaacatttactacagtttttaactctactgtgtaatataaaagatcttgcagaagttcttagtgttggtttaatattacctaatgaaagtgatgacatattttttatatctggaatgagcctgttgggatcgcattgcataccttcggggtacaagtcagtttctacactgggtgctgatccttgcacgcgccctttctaccatctcacggtggggatggccgcagggctgtgcacccagaagaagatggctgttagcgtttcggccttcataatggcctgagactttctttctgtaggtggtctggagctgtccggctggtggccccctattttgccatttagcgaacaaccacaggaattttaaaaacaaaaacatcccaagattttttcatttcaaaatgcttcaaagtccacattagatcagatactccgctgtcggcacattcagctgaggttcattacaatcgagactgcaatgtgatctatgtttcatcttgtttttataataaaaagcttcagggaacaagcccaaagccctcaccacaaaaaa

SEQ ID NO: 676 - protein, 112 aa, Homo sapiens
MNRTQELSGQLSAATGDMPTYQIRAPTAALPQGVVMAASPGSLHSPQQLAEEATRKRELRLMKNREAARECRRKKKEYVKCLENRVAVLENQNKTLIEELKALKDLYCHKVE

SEQ ID NO: 677 - DNA, 2108 bp, Homo sapiens
gtaaaatgctgctgacagatttagagttaactagctcaccactgcctctgcctccaagctgccttttagactgaatagcttttcttgttagccctactttaacatttcttttgaagtggttgtctgcttgaagagggaaacacgtcatgaaactgtaatgcatgaacagaactcaggagttgtctggccagcttagtggtaagatcgagcctcctactgaggccgtccctgcatgcgcctgctgccactggtgacatgccaacttaccagatccgagctcctactgctgctttgccacagggagtggtgatggctgcatcgcccggaagtttgcacagtccccagcagctggcagaagaagcaacacgcaaacgagagctgaggctaatgaaaaacagggaagctgcccgggagtgtcgcaggaagaagaaagaatatgtcaaatgtcttgaaaatcgtgtggctgtgcttgaaaaccaaaacaagactctcattgaggaactcaaggccctcaaagatctttattgccataaagtagagtaactgtctttgacttggaccttgtttactctaatcaaggcaggagatgcagcagtcctacttattgccatgtggacttgtgggaaggacacgtgtgacccttaagaatccagtttggattagtgtttgaaattgaattgggaatgttgttccaggatgtggaatgcagccgtgatcacacttaccgagcttactttgatctgtttgtcaatagcatgcaaaaaatgctttgtttgccctttgcttctgctttttttcagggaagctgccaaagaatgtcgacgtcgaaagaaagaatatgtaaaatgtctggagagccgagttgcagtgctggaagtccagaacaagaagcttatagaggaacttgaaaccttgaaagacatttgttctcccaaaacagattactagaaatatttaactatgaactgaaggcagcatgtatagttgcttttgaaggaatacaatatatagctggcaagaatggtggcttcttttctttgtatcattcatcttcttctttaatcacttaacattcctaaaatgcttcactgtacgtagttaagtcgtagctataacttcaaattttttaaaagagacaaactgtaaaaaatgtgtgtattcttaaaatgcaatatttgtaaggcttgttccaatgccacatacttgcagctcccattctatgtgtcatcaatagtgtcctatgcaataaaattatttgcaggtctttaaatcattttaggaaaggatgatcaaaaataatgcatccagcagtacaataaaagtaaaccacaaaaaaatacctcaggaaagaatagaaagaaagtctatctaatgacatgcctatatgagaagaatagcctagatatgaatatatggcatttgcagatttttatattagttgctttgttaaaaaaaaaaagattgtattgctgtccttgaatgccatagtcaaagagagtttttaatagaaccatgttggttgcactttgtagtgtttggtgctcatttaaatatctgaacatttactacagtttttaactctactgtgtaatataaaagatcttgcagaagttcttagtgttggtttaatattacctaatgaaagtgatgacatattttttatatctggaatgagcctgttgggatcgcattgcataccttcggggtacaagtcagtttctacactgggtgctgatccttgcacgcgccctttctaccatctcacggtggggatggccgcagggctgtgcacccagaagaagatggctgttagcgtttcggccttcataatggcctgagactttctttctgtaggtggtctggagctgtccggctggtggccccctattttgccatttagcgaacaaccacaggaattttaaaaacaaaaacatcccaagattttttcatttcaaaatgcttcaaagtccacattagatcagatactccgctgtcggcacattcagctgaggttcattacaatcgagactgcaatgtgatctatgtttcatcttgtttttataataaaaagcttcagggaacaagcccaaagccctcaccacaaaaaa

SEQ ID NO: 678 - protein, 95 aa, Homo sapiens
MPTYQIRAPTAALPQGVVMAASPGSLHSPQQLAEEATRKRELRLMKNREAARECRRKKKEYVKCLENRVAVLENQNKTLIEELKALKDLYCHKVE

SEQ ID NO: 679 - DNA, 2144 bp, Homo sapiens
gtaaaatgctgctgacagatttagagttaactagctcaccactgcctctgcctccaagctgccttttagactgaatagcttttcttgttagccctactttaacatttcttttgaagtggttgtctgcttgaagagggaaacacgtcatgaaactgtaatgcatgaacagaactcaggagttgtctggccagcttagtggtaagatcgagcctcctactgaggccgtccctgcatgcgcctgatgaggaaactgaacttgccccaagtcacatggctgctgccactggtgacatgccaacttaccagatccgagctcctactgctgctttgccacagggagtggtgatggctgcatcgcccggaagtttgcacagtccccagcagctggcagaagaagcaacacgcaaacgagagctgaggctaatgaaaaacagggaagctgcccgggagtgtcgcaggaagaagaaagaatatgtcaaatgtcttgaaaatcgtgtggctgtgcttgaaaaccaaaacaagactctcattgaggaactcaaggccctcaaagatctttattgccataaagtagagtaactgtctttgacttggaccttgtttactctaatcaaggcaggagatgcagcagtcctacttattgccatgtggacttgtgggaaggacacgtgtgacccttaagaatccagtttggattagtgtttgaaattgaattgggaatgttgttccaggatgtggaatgcagccgtgatcacacttaccgagcttactttgatctgtttgtcaatagcatgcaaaaaatgctttgtttgccctttgcttctgctttttttcagggaagctgccaaagaatgtcgacgtcgaaagaaagaatatgtaaaatgtctggagagccgagttgcagtgctggaagtccagaacaagaagcttatagaggaacttgaaaccttgaaagacatttgttctcccaaaacagattactagaaatatttaactatgaactgaaggcagcatgtatagttgcttttgaaggaatacaatatatagctggcaagaatggtggcttcttttctttgtatcattcatcttcttctttaatcacttaacattcctaaaatgcttcactgtacgtagttaagtcgtagctataacttcaaattttttaaaagagacaaactgtaaaaaatgtgtgtattcttaaaatgcaatatttgtaaggcttgttccaatgccacatacttgcagctcccattctatgtgtcatcaatagtgtcctatgcaataaaattatttgcaggtctttaaatcattttaggaaaggatgatcaaaaataatgcatccagcagtacaataaaagtaaaccacaaaaaaatacctcaggaaagaatagaaagaaagtctatctaatgacatgcctatatgagaagaatagcctagatatgaatatatggcatttgcagatttttatattagttgctttgttaaaaaaaaaaagattgtattgctgtccttgaatgccatagtcaaagagagtttttaatagaaccatgttggttgcactttgtagtgtttggtgctcatttaaatatctgaacatttactacagtttttaactctactgtgtaatataaaagatcttgcagaagttcttagtgttggtttaatattacctaatgaaagtgatgacatattttttatatctggaatgagcctgttgggatcgcattgcataccttcggggtacaagtcagtttctacactgggtgctgatccttgcacgcgccctttctaccatctcacggtggggatggccgcagggctgtgcacccagaagaagatggctgttagcgtttcggccttcataatggcctgagactttctttctgtaggtggtctggagctgtccggctggtggccccctattttgccatttagcgaacaaccacaggaattttaaaaacaaaaacatcccaagattttttcatttcaaaatgcttcaaagtccacattagatcagatactccgctgtcggcacattcagctgaggttcattacaatcgagactgcaatgtgatctatgtttcatcttgtttttataataaaaagcttcagggaacaagcccaaagccctcaccacaaaaaa

SEQ ID NO: 680 - protein, 102 aa, Homo sapiens
MAAATGDMPTYQIRAPTAALPQGVVMAASPGSLHSPQQLAEEATRKRELRLMKNREAARECRRKKKEYVKCLENRVAVLENQNKTLIEELKALKDLYCHKVE

SEQ ID NO: 681 - DNA, 1663 bp, Homo sapiens
gtaaaatgctgctgacagatttagagttaactagctcaccactgcctctgcctccaagctgccttttagactgaatagcttttcttgttagccctactttaacatttcttttgaagtggttgtctgcttgaagagggaaacacgtcatgaaactgtaatgcatgaacagaactcaggagttgtctggccagcttagtgctgccactggtgacatgccaacttaccagatccgagctcctactgctgctttgccacagggagtggtgatggctgcatcgcccggaagtttgcacagtccccagcagctggcagaagaagcaacacgcaaacgagagctgaggctaatgaaaaacagggaagctgccaaagaatgtcgacgtcgaaagaaagaatatgtaaaatgtctggagagccgagttgcagtgctggaagtccagaacaagaagcttatagaggaacttgaaaccttgaaagacatttgttctcccaaaacagattactagaaatatttaactatgaactgaaggcagcatgtatagttgcttttgaaggaatacaatatatagctggcaagaatggtggcttcttttctttgtatcattcatcttcttctttaatcacttaacattcctaaaatgcttcactgtacgtagttaagtcgtagctataacttcaaattttttaaaagagacaaactgtaaaaaatgtgtgtattcttaaaatgcaatatttgtaaggcttgttccaatgccacatacttgcagctcccattctatgtgtcatcaatagtgtcctatgcaataaaattatttgcaggtctttaaatcattttaggaaaggatgatcaaaaataatgcatccagcagtacaataaaagtaaaccacaaaaaaatacctcaggaaagaatagaaagaaagtctatctaatgacatgcctatatgagaagaatagcctagatatgaatatatggcatttgcagatttttatattagttgctttgttaaaaaaaaaaagattgtattgctgtccttgaatgccatagtcaaagagagtttttaatagaaccatgttggttgcactttgtagtgtttggtgctcatttaaatatctgaacatttactacagtttttaactctactgtgtaatataaaagatcttgcagaagttcttagtgttggtttaatattacctaatgaaagtgatgacatattttttatatctggaatgagcctgttgggatcgcattgcataccttcggggtacaagtcagtttctacactgggtgctgatccttgcacgcgccctttctaccatctcacggtggggatggccgcagggctgtgcacccagaagaagatggctgttagcgtttcggccttcataatggcctgagactttctttctgtaggtggtctggagctgtccggctggtggccccctattttgccatttagcgaacaaccacaggaattttaaaaacaaaaacatcccaagattttttcatttcaaaatgcttcaaagtccacattagatcagatactccgctgtcggcacattcagctgaggttcattacaatcgagactgcaatgtgatctatgtttcatcttgtttttataataaaaagcttcagggaacaagcccaaagccctcaccacaaaaaa

SEQ ID NO: 682 - protein, 113 aa, Homo sapiens
MNRTQELSGQLSAATGDMPTYQIRAPTAALPQGVVMAASPGSLHSPQQLAEEATRKRELRLMKNREAAKECRRRKKEYVKCLESRVAVLEVQNKKLIEELETLKDICSPKTDY

SEQ ID NO: 683 - DNA, 1706 bp, Homo sapiens
gtaaaatgctgctgacagatttagagttaactagctcaccactgcctctgcctccaagctgccttttagactgaatagcttttcttgttagccctactttaacatttcttttgaagtggttgtctgcttgaagagggaaacacgtcatgaaactgtaatgcatgaacagaactcaggagttgtctggccagcttagtggtaagatcgagcctcctactgaggccgtccctgcatgcgcctgctgccactggtgacatgccaacttaccagatccgagctcctactgctgctttgccacagggagtggtgatggctgcatcgcccggaagtttgcacagtccccagcagctggcagaagaagcaacacgcaaacgagagctgaggctaatgaaaaacagggaagctgccaaagaatgtcgacgtcgaaagaaagaatatgtaaaatgtctggagagccgagttgcagtgctggaagtccagaacaagaagcttatagaggaacttgaaaccttgaaagacatttgttctcccaaaacagattactagaaatatttaactatgaactgaaggcagcatgtatagttgcttttgaaggaatacaatatatagctggcaagaatggtggcttcttttctttgtatcattcatcttcttctttaatcacttaacattcctaaaatgcttcactgtacgtagttaagtcgtagctataacttcaaattttttaaaagagacaaactgtaaaaaatgtgtgtattcttaaaatgcaatatttgtaaggcttgttccaatgccacatacttgcagctcccattctatgtgtcatcaatagtgtcctatgcaataaaattatttgcaggtctttaaatcattttaggaaaggatgatcaaaaataatgcatccagcagtacaataaaagtaaaccacaaaaaaatacctcaggaaagaatagaaagaaagtctatctaatgacatgcctatatgagaagaatagcctagatatgaatatatggcatttgcagatttttatattagttgctttgttaaaaaaaaaaagattgtattgctgtccttgaatgccatagtcaaagagagtttttaatagaaccatgttggttgcactttgtagtgtttggtgctcatttaaatatctgaacatttactacagtttttaactctactgtgtaatataaaagatcttgcagaagttcttagtgttggtttaatattacctaatgaaagtgatgacatattttttatatctggaatgagcctgttgggatcgcattgcataccttcggggtacaagtcagtttctacactgggtgctgatccttgcacgcgccctttctaccatctcacggtggggatggccgcagggctgtgcacccagaagaagatggctgttagcgtttcggccttcataatggcctgagactttctttctgtaggtggtctggagctgtccggctggtggccccctattttgccatttagcgaacaaccacaggaattttaaaaacaaaaacatcccaagattttttcatttcaaaatgcttcaaagtccacattagatcagatactccgctgtcggcacattcagctgaggttcattacaatcgagactgcaatgtgatctatgtttcatcttgtttttataataaaaagcttcagggaacaagcccaaagccctcaccacaaaaaa

SEQ ID NO: 684 - protein, 96 aa, Homo sapiens
MPTYQIRAPTAALPQGVVMAASPGSLHSPQQLAEEATRKRELRLMKNREAAKECRRRKKEYVKCLESRVAVLEVQNKKLIEELETLKDICSPKTDY

SEQ ID NO: 685 - DNA, 2005 bp, Homo sapiens
acattcttagccaccgaagtatgggcaccaaaagcgataaggagcatgtgttccttaataaatgtcacatcagaaaatgactgttccaggacagtaaccacctcccgatggtagcagcaattgcagagacagatgaatctgcagaatcagaaggtgtaattgattctcataaacgtagagaaatcctttcacgaagaccctcttataggaaaatactgaatgaactgtcctctgatgtgcctggtgttcccaagattgaagaagagagatcagaggaagaaggaacaccacctagtattgctaccatggcagtaccaactagcatatatcagactagcacggggcaatacattgctatagcccaaggtggaacaatccagatttctaacccaggatctgatggtgttcagggactgcaggcattaacaatgacaaattcaggagctcctccaccaggtgctacaattgtacagtacgcagcacaatcagctgatggcacacagcagttctttgtcccaggcagccaggttgttgttcaagctgccactggtgacatgccaacttaccagatccgagctcctactgctgctttgccacagggagtggtgatggctgcatcgcccggaagtttgcacagtccccagcagctggcagaagaagcaacacgcaaacgagagctgaggctaatgaaaaacagggaagctgccaaagaatgtcgacgtcgaaagaaagaatatgtaaaatgtctggagagccgagttgcagtgctggaagtccagaacaagaagcttatagaggaacttgaaaccttgaaagacatttgttctcccaaaacagattactagaaatatttaactatgaactgaaggcagcatgtatagttgcttttgaaggaatacaatatatagctggcaagaatggtggcttcttttctttgtatcattcatcttcttctttaatcacttaacattcctaaaatgcttcactgtacgtagttaagtcgtagctataacttcaaattttttaaaagagacaaactgtaaaaaatgtgtgtattcttaaaatgcaatatttgtaaggcttgttccaatgccacatacttgcagctcccattctatgtgtcatcaatagtgtcctatgcaataaaattatttgcaggtctttaaatcattttaggaaaggatgatcaaaaataatgcatccagcagtacaataaaagtaaaccacaaaaaaatacctcaggaaagaatagaaagaaagtctatctaatgacatgcctatatgagaagaatagcctagatatgaatatatggcatttgcagatttttatattagttgctttgttaaaaaaaaaaagattgtattgctgtccttgaatgccatagtcaaagagagtttttaatagaaccatgttggttgcactttgtagtgtttggtgctcatttaaatatctgaacatttactacagtttttaactctactgtgtaatataaaagatcttgcagaagttcttagtgttggtttaatattacctaatgaaagtgatgacatattttttatatctggaatgagcctgttgggatcgcattgcataccttcggggtacaagtcagtttctacactgggtgctgatccttgcacgcgccctttctaccatctcacggtggggatggccgcagggctgtgcacccagaagaagatggctgttagcgtttcggccttcataatggcctgagactttctttctgtaggtggtctggagctgtccggctggtggccccctattttgccatttagcgaacaaccacaggaattttaaaaacaaaaacatcccaagattttttcatttcaaaatgcttcaaagtccacattagatcagatactccgctgtcggcacattcagctgaggttcattacaatcgagactgcaatgtgatctatgtttcatcttgtttttataataaaaagcttcagggaacaagcccaaagccctcaccacaaaaaa

SEQ ID NO: 686 - protein, 245 aa, Homo sapiens
MVAAIAETDESAESEGVIDSHKRREILSRRPSYRKILNELSSDVPGVPKIEEERSEEEGTPPSIATMAVPTSIYQTSTGQYIAIAQGGTIQISNPGSDGVQGLQALTMTNSGAPPPGATIVQYAAQSADGTQQFFVPGSQVVVQAATGDMPTYQIRAPTAALPQGVVMAASPGSLHSPQQLAEEATRKRELRLMKNREAAKECRRRKKEYVKCLESRVAVLEVQNKKLIEELETLKDICSPKTDY

SEQ ID NO: 687 - DNA, 1816 bp, Homo sapiens
acattcttagccaccgaagtatgggcaccaaaagcgataaggagcatgtgttccttaataaatgtcacatcagaaaatgactgttccaggacagtaaccacctcccgatggtagcagcaattgcagagacagatgaatctgcagaatcagaaggtgtaattgattctcataaacgtagagaaatcctttcacgaagaccctcttataggaaaatactgaatgaactgtcctctgatgtgcctggtgttcccaagattgaagaagagagatcagaggaagaaggaacaccacctagtattgctaccatggcagtaccaactagcatatatcagactagcacggggcaatacactgccactggtgacatgccaacttaccagatccgagctcctactgctgctttgccacagggagtggtgatggctgcatcgcccggaagtttgcacagtccccagcagctggcagaagaagcaacacgcaaacgagagctgaggctaatgaaaaacagggaagctgccaaagaatgtcgacgtcgaaagaaagaatatgtaaaatgtctggagagccgagttgcagtgctggaagtccagaacaagaagcttatagaggaacttgaaaccttgaaagacatttgttctcccaaaacagattactagaaatatttaactatgaactgaaggcagcatgtatagttgcttttgaaggaatacaatatatagctggcaagaatggtggcttcttttctttgtatcattcatcttcttctttaatcacttaacattcctaaaatgcttcactgtacgtagttaagtcgtagctataacttcaaattttttaaaagagacaaactgtaaaaaatgtgtgtattcttaaaatgcaatatttgtaaggcttgttccaatgccacatacttgcagctcccattctatgtgtcatcaatagtgtcctatgcaataaaattatttgcaggtctttaaatcattttaggaaaggatgatcaaaaataatgcatccagcagtacaataaaagtaaaccacaaaaaaatacctcaggaaagaatagaaagaaagtctatctaatgacatgcctatatgagaagaatagcctagatatgaatatatggcatttgcagatttttatattagttgctttgttaaaaaaaaaaagattgtattgctgtccttgaatgccatagtcaaagagagtttttaatagaaccatgttggttgcactttgtagtgtttggtgctcatttaaatatctgaacatttactacagtttttaactctactgtgtaatataaaagatcttgcagaagttcttagtgttggtttaatattacctaatgaaagtgatgacatattttttatatctggaatgagcctgttgggatcgcattgcataccttcggggtacaagtcagtttctacactgggtgctgatccttgcacgcgccctttctaccatctcacggtggggatggccgcagggctgtgcacccagaagaagatggctgttagcgtttcggccttcataatggcctgagactttctttctgtaggtggtctggagctgtccggctggtggccccctattttgccatttagcgaacaaccacaggaattttaaaaacaaaaacatcccaagattttttcatttcaaaatgcttcaaagtccacattagatcagatactccgctgtcggcacattcagctgaggttcattacaatcgagactgcaatgtgatctatgtttcatcttgtttttataataaaaagcttcagggaacaagcccaaagccctcaccacaaaaaa

SEQ ID NO: 688 - protein, 182 aa, Homo sapiens
MVAAIAETDESAESEGVIDSHKRREILSRRPSYRKILNELSSDVPGVPKIEEERSEEEGTPPSIATMAVPTSIYQTSTGQYTATGDMPTYQIRAPTAALPQGVVMAASPGSLHSPQQLAEEATRKRELRLMKNREAAKECRRRKKEYVKCLESRVAVLEVQNKKLIEELETLKDICSPKTDY

SEQ ID NO: 689 - DNA, 2160 bp, Homo sapiens
agctacgggtcagagctagtccactaggtgctaatcaaatgctgtgttacaacactgtgaggttttcccagttataagtgtcactattagggttttttttaattgcaaagccaaataaggctgtcaattgcatcatcttaccttatttcttcagattaagtactgtttatagtgggatttttggtggatgtggtggcatcagcataatctatgtttcaggcgtcctatagaagaggattattcttcaggggatgtggaagaaaaggtagcagcaattgcagagacagatgaatctgcagaatcagaaggtgtaattgattctcataaacgtagagaaatcctttcacgaagaccctcttataggaaaatactgaatgaactgtcctctgatgtgcctggtgttcccaagattgaagaagagagatcagaggaagaaggaacaccacctagtattgctaccatggcagtaccaactagcatatatcagactagcacggggcaatacattgctatagcccaaggtggaacaatccagatttctaacccaggatctgatggtgttcagggactgcaggcattaacaatgacaaattcaggagctcctccaccaggtgctacaattgtacagtacgcagcacaatcagctgatggcacacagcagttctttgtcccaggcagccaggttgttgttcaagctgccactggtgacatgccaacttaccagatccgagctcctactgctgctttgccacagggagtggtgatggctgcatcgcccggaagtttgcacagtccccagcagctggcagaagaagcaacacgcaaacgagagctgaggctaatgaaaaacagggaagctgccaaagaatgtcgacgtcgaaagaaagaatatgtaaaatgtctggagagccgagttgcagtgctggaagtccagaacaagaagcttatagaggaacttgaaaccttgaaagacatttgttctcccaaaacagattactagaaatatttaactatgaactgaaggcagcatgtatagttgcttttgaaggaatacaatatatagctggcaagaatggtggcttcttttctttgtatcattcatcttcttctttaatcacttaacattcctaaaatgcttcactgtacgtagttaagtcgtagctataacttcaaattttttaaaagagacaaactgtaaaaaatgtgtgtattcttaaaatgcaatatttgtaaggcttgttccaatgccacatacttgcagctcccattctatgtgtcatcaatagtgtcctatgcaataaaattatttgcaggtctttaaatcattttaggaaaggatgatcaaaaataatgcatccagcagtacaataaaagtaaaccacaaaaaaatacctcaggaaagaatagaaagaaagtctatctaatgacatgcctatatgagaagaatagcctagatatgaatatatggcatttgcagatttttatattagttgctttgttaaaaaaaaaaagattgtattgctgtccttgaatgccatagtcaaagagagtttttaatagaaccatgttggttgcactttgtagtgtttggtgctcatttaaatatctgaacatttactacagtttttaactctactgtgtaatataaaagatcttgcagaagttcttagtgttggtttaatattacctaatgaaagtgatgacatattttttatatctggaatgagcctgttgggatcgcattgcataccttcggggtacaagtcagtttctacactgggtgctgatccttgcacgcgccctttctaccatctcacggtggggatggccgcagggctgtgcacccagaagaagatggctgttagcgtttcggccttcataatggcctgagactttctttctgtaggtggtctggagctgtccggctggtggccccctattttgccatttagcgaacaaccacaggaattttaaaaacaaaaacatcccaagattttttcatttcaaaatgcttcaaagtccacattagatcagatactccgctgtcggcacattcagctgaggttcattacaatcgagactgcaatgtgatctatgtttcatcttgtttttataataaaaagcttcagggaacaagcccaaagccctcaccacaaaaaa

SEQ ID NO: 690 - protein, 270 aa, Homo sapiens
MWWHQHNLCFRRPIEEDYSSGDVEEKVAAIAETDESAESEGVIDSHKRREILSRRPSYRKILNELSSDVPGVPKIEEERSEEEGTPPSIATMAVPTSIYQTSTGQYIAIAQGGTIQISNPGSDGVQGLQALTMTNSGAPPPGATIVQYAAQSADGTQQFFVPGSQVVVQAATGDMPTYQIRAPTAALPQGVVMAASPGSLHSPQQLAEEATRKRELRLMKNREAAKECRRRKKEYVKCLESRVAVLEVQNKKLIEELETLKDICSPKTDY

SEQ ID NO: 691 - DNA, 1971 bp, Homo sapiens
agctacgggtcagagctagtccactaggtgctaatcaaatgctgtgttacaacactgtgaggttttcccagttataagtgtcactattagggttttttttaattgcaaagccaaataaggctgtcaattgcatcatcttaccttatttcttcagattaagtactgtttatagtgggatttttggtggatgtggtggcatcagcataatctatgtttcaggcgtcctatagaagaggattattcttcaggggatgtggaagaaaaggtagcagcaattgcagagacagatgaatctgcagaatcagaaggtgtaattgattctcataaacgtagagaaatcctttcacgaagaccctcttataggaaaatactgaatgaactgtcctctgatgtgcctggtgttcccaagattgaagaagagagatcagaggaagaaggaacaccacctagtattgctaccatggcagtaccaactagcatatatcagactagcacggggcaatacactgccactggtgacatgccaacttaccagatccgagctcctactgctgctttgccacagggagtggtgatggctgcatcgcccggaagtttgcacagtccccagcagctggcagaagaagcaacacgcaaacgagagctgaggctaatgaaaaacagggaagctgccaaagaatgtcgacgtcgaaagaaagaatatgtaaaatgtctggagagccgagttgcagtgctggaagtccagaacaagaagcttatagaggaacttgaaaccttgaaagacatttgttctcccaaaacagattactagaaatatttaactatgaactgaaggcagcatgtatagttgcttttgaaggaatacaatatatagctggcaagaatggtggcttcttttctttgtatcattcatcttcttctttaatcacttaacattcctaaaatgcttcactgtacgtagttaagtcgtagctataacttcaaattttttaaaagagacaaactgtaaaaaatgtgtgtattcttaaaatgcaatatttgtaaggcttgttccaatgccacatacttgcagctcccattctatgtgtcatcaatagtgtcctatgcaataaaattatttgcaggtctttaaatcattttaggaaaggatgatcaaaaataatgcatccagcagtacaataaaagtaaaccacaaaaaaatacctcaggaaagaatagaaagaaagtctatctaatgacatgcctatatgagaagaatagcctagatatgaatatatggcatttgcagatttttatattagttgctttgttaaaaaaaaaaagattgtattgctgtccttgaatgccatagtcaaagagagtttttaatagaaccatgttggttgcactttgtagtgtttggtgctcatttaaatatctgaacatttactacagtttttaactctactgtgtaatataaaagatcttgcagaagttcttagtgttggtttaatattacctaatgaaagtgatgacatattttttatatctggaatgagcctgttgggatcgcattgcataccttcggggtacaagtcagtttctacactgggtgctgatccttgcacgcgccctttctaccatctcacggtggggatggccgcagggctgtgcacccagaagaagatggctgttagcgtttcggccttcataatggcctgagactttctttctgtaggtggtctggagctgtccggctggtggccccctattttgccatttagcgaacaaccacaggaattttaaaaacaaaaacatcccaagattttttcatttcaaaatgcttcaaagtccacattagatcagatactccgctgtcggcacattcagctgaggttcattacaatcgagactgcaatgtgatctatgtttcatcttgtttttataataaaaagcttcagggaacaagcccaaagccctcaccacaaaaaa

SEQ ID NO: 692 - protein, 207 aa, Homo sapiens
MWWHQHNLCFRRPIEEDYSSGDVEEKVAAIAETDESAESEGVIDSHKRREILSRRPSYRKILNELSSDVPGVPKIEEERSEEEGTPPSIATMAVPTSIYQTSTGQYTATGDMPTYQIRAPTAALPQGVVMAASPGSLHSPQQLAEEATRKRELRLMKNREAAKECRRRKKEYVKCLESRVAVLEVQNKKLIEELETLKDICSPKTDY

SEQ ID NO: 693 - DNA, 1786 bp, Homo sapiens
gctggcggccggcagggggcggagttcgagcctggatttttttcctcggggcctcccccgggaggccgtcccggcgtgggggaggggaggacggggcgggaggacgcggttcggtcggctgcagcgctacttttggtccggggtcggcagggaggccgcggctaccgcatcacagctgacgtgaggactacgtggggccgctgccggctccgggttgctgggcggcggcgccgctgctgagcggcggtcgggctcgccgtctccacctcctcgcgtccgtaatcagtgacgaggtccgctacgtaaatccctttgcggcggctgccactggtgacatgccaacttaccagatccgagctcctactgctgctttgccacagggagtggtgatggctgcatcgcccggaagtttgcacagtccccagcagctggcagaagaagcaacacgcaaacgagagctgaggctaatgaaaaacagggaagctgccaaagaatgtcgacgtcgaaagaaagaatatgtaaaatgtctggagagccgagttgcagtgctggaagtccagaacaagaagcttatagaggaacttgaaaccttgaaagacatttgttctcccaaaacagattactagaaatatttaactatgaactgaaggcagcatgtatagttgcttttgaaggaatacaatatatagctggcaagaatggtggcttcttttctttgtatcattcatcttcttctttaatcacttaacattcctaaaatgcttcactgtacgtagttaagtcgtagctataacttcaaattttttaaaagagacaaactgtaaaaaatgtgtgtattcttaaaatgcaatatttgtaaggcttgttccaatgccacatacttgcagctcccattctatgtgtcatcaatagtgtcctatgcaataaaattatttgcaggtctttaaatcattttaggaaaggatgatcaaaaataatgcatccagcagtacaataaaagtaaaccacaaaaaaatacctcaggaaagaatagaaagaaagtctatctaatgacatgcctatatgagaagaatagcctagatatgaatatatggcatttgcagatttttatattagttgctttgttaaaaaaaaaaagattgtattgctgtccttgaatgccatagtcaaagagagtttttaatagaaccatgttggttgcactttgtagtgtttggtgctcatttaaatatctgaacatttactacagtttttaactctactgtgtaatataaaagatcttgcagaagttcttagtgttggtttaatattacctaatgaaagtgatgacatattttttatatctggaatgagcctgttgggatcgcattgcataccttcggggtacaagtcagtttctacactgggtgctgatccttgcacgcgccctttctaccatctcacggtggggatggccgcagggctgtgcacccagaagaagatggctgttagcgtttcggccttcataatggcctgagactttctttctgtaggtggtctggagctgtccggctggtggccccctattttgccatttagcgaacaaccacaggaattttaaaaacaaaaacatcccaagattttttcatttcaaaatgcttcaaagtccacattagatcagatactccgctgtcggcacattcagctgaggttcattacaatcgagactgcaatgtgatctatgtttcatcttgtttttataataaaaagcttcagggaacaagcccaaagccctcaccacaaaaaa

SEQ ID NO: 694 - protein, 96 aa, Homo sapiens; identical to SEQ ID NO: 684

SEQ ID NO: 695 - DNA, 2188 bp, Homo sapiens
gctggcggccggcagggggcggagttcgagcctggatttttttcctcggggcctcccccgggaggccgtcccggcgtgggggaggggaggacggggcgggaggacgcggttcggtcggctgcagcgctacttttggtccggggtcggcagggaggccgcggctaccgcatcacagctgacgtgaggactacgtggggccgctgccggctccgggttgctgggcggcggcgccgctgctgagcggcggtcgggctcgccgtctccacctcctcgcgtccgtaatcagtgacgaggtccgctacgtaaatccctttgcggcggctgccactggtgacatgccaacttaccagatccgagctcctactgctgctttgccacagggagtggtgatggctgcatcgcccggaagtttgcacagtccccagcagctggcagaagaagcaacacgcaaacgagagctgaggctaatgaaaaacagggaagctgcccgggagtgtcgcaggaagaagaaagaatatgtcaaatgtcttgaaaatcgtgtggctgtgcttgaaaaccaaaacaagactctcattgaggaactcaaggccctcaaagatctttattgccataaagtagagtaactgtctttgacttggaccttgtttactctaatcaaggcaggagatgcagcagtcctacttattgccatgtggacttgtgggaaggacacgtgtgacccttaagaatccagtttggattagtgtttgaaattgaattgggaatgttgttccaggatgtggaatgcagccgtgatcacacttaccgagcttactttgatctgtttgtcaatagcatgcaaaaaatgctttgtttgccctttgcttctgctttttttcagggaagctgccaaagaatgtcgacgtcgaaagaaagaatatgtaaaatgtctggagagccgagttgcagtgctggaagtccagaacaagaagcttatagaggaacttgaaaccttgaaagacatttgttctcccaaaacagattactagaaatatttaactatgaactgaaggcagcatgtatagttgcttttgaaggaatacaatatatagctggcaagaatggtggcttcttttctttgtatcattcatcttcttctttaatcacttaacattcctaaaatgcttcactgtacgtagttaagtcgtagctataacttcaaattttttaaaagagacaaactgtaaaaaatgtgtgtattcttaaaatgcaatatttgtaaggcttgttccaatgccacatacttgcagctcccattctatgtgtcatcaatagtgtcctatgcaataaaattatttgcaggtctttaaatcattttaggaaaggatgatcaaaaataatgcatccagcagtacaataaaagtaaaccacaaaaaaatacctcaggaaagaatagaaagaaagtctatctaatgacatgcctatatgagaagaatagcctagatatgaatatatggcatttgcagatttttatattagttgctttgttaaaaaaaaaaagattgtattgctgtccttgaatgccatagtcaaagagagtttttaatagaaccatgttggttgcactttgtagtgtttggtgctcatttaaatatctgaacatttactacagtttttaactctactgtgtaatataaaagatcttgcagaagttcttagtgttggtttaatattacctaatgaaagtgatgacatattttttatatctggaatgagcctgttgggatcgcattgcataccttcggggtacaagtcagtttctacactgggtgctgatccttgcacgcgccctttctaccatctcacggtggggatggccgcagggctgtgcacccagaagaagatggctgttagcgtttcggccttcataatggcctgagactttctttctgtaggtggtctggagctgtccggctggtggccccctattttgccatttagcgaacaaccacaggaattttaaaaacaaaaacatcccaagattttttcatttcaaaatgcttcaaagtccacattagatcagatactccgctgtcggcacattcagctgaggttcattacaatcgagactgcaatgtgatctatgtttcatcttgtttttataataaaaagcttcagggaacaagcccaaagccctcaccacaaaaaa

SEQ ID NO: 696 - protein, 95 aa, Homo sapiens; identical to SEQ ID NO: 678

SEQ ID NO: 697 - DNA, 2519 bp, Homo sapiens
gataaataaagaaaacaggaaaggaggaaagcattgattacaaatatcttaacaatgagcaaatgtgcaaggaaaaaatatattaagacaaatccaagacaaatgaccatggaaacagttgaatcccagcatgatggaagtataacagcttctttgacagagagcaagtctgctcatgtgcagactcagactggccaaaattcaatccctgctttagctcaggtagcagcaattgcagagacagatgaatctgcagaatcagaaggtgtaattgattctcataaacgtagagaaatcctttcacgaagaccctcttataggaaaatactgaatgaactgtcctctgatgtgcctggtgttcccaagattgaagaagagagatcagaggaagaaggaacaccacctagtattgctaccatggcagtaccaactagcatatatcagactagcacggggcaatacattgctatagcccaaggtggaacaatccagatttctaacccaggatctgatggtgttcagggactgcaggcattaacaatgacaaattcaggagctcctccaccaggtgctacaattgtacagtacgcagcacaatcagctgatggcacacagcagttctttgtcccaggcagccaggttgttgttcaagctgccactggtgacatgccaacttaccagatccgagctcctactgctgctttgccacagggagtggtgatggctgcatcgcccggaagtttgcacagtccccagcagctggcagaagaagcaacacgcaaacgagagctgaggctaatgaaaaacagggaagctgcccgggagtgtcgcaggaagaagaaagaatatgtcaaatgtcttgaaaatcgtgtggctgtgcttgaaaaccaaaacaagactctcattgaggaactcaaggccctcaaagatctttattgccataaagtagagtaactgtctttgacttggaccttgtttactctaatcaaggcaggagatgcagcagtcctacttattgccatgtggacttgtgggaaggacacgtgtgacccttaagaatccagtttggattagtgtttgaaattgaattgggaatgttgttccaggatgtggaatgcagccgtgatcacacttaccgagcttactttgatctgtttgtcaatagcatgcaaaaaatgctttgtttgccctttgcttctgctttttttcagggaagctgccaaagaatgtcgacgtcgaaagaaagaatatgtaaaatgtctggagagccgagttgcagtgctggaagtccagaacaagaagcttatagaggaacttgaaaccttgaaagacatttgttctcccaaaacagattactagaaatatttaactatgaactgaaggcagcatgtatagttgcttttgaaggaatacaatatatagctggcaagaatggtggcttcttttctttgtatcattcatcttcttctttaatcacttaacattcctaaaatgcttcactgtacgtagttaagtcgtagctataacttcaaattttttaaaagagacaaactgtaaaaaatgtgtgtattcttaaaatgcaatatttgtaaggcttgttccaatgccacatacttgcagctcccattctatgtgtcatcaatagtgtcctatgcaataaaattatttgcaggtctttaaatcattttaggaaaggatgatcaaaaataatgcatccagcagtacaataaaagtaaaccacaaaaaaatacctcaggaaagaatagaaagaaagtctatctaatgacatgcctatatgagaagaatagcctagatatgaatatatggcatttgcagatttttatattagttgctttgttaaaaaaaaaaagattgtattgctgtccttgaatgccatagtcaaagagagtttttaatagaaccatgttggttgcactttgtagtgtttggtgctcatttaaatatctgaacatttactacagtttttaactctactgtgtaatataaaagatcttgcagaagttcttagtgttggtttaatattacctaatgaaagtgatgacatattttttatatctggaatgagcctgttgggatcgcattgcataccttcggggtacaagtcagtttctacactgggtgctgatccttgcacgcgccctttctaccatctcacggtggggatggccgcagggctgtgcacccagaagaagatggctgttagcgtttcggccttcataatggcctgagactttctttctgtaggtggtctggagctgtccggctggtggccccctattttgccatttagcgaacaaccacaggaattttaaaaacaaaaacatcccaagattttttcatttcaaaatgcttcaaagtccacattagatcagatactccgctgtcggcacattcagctgaggttcattacaatcgagactgcaatgtgatctatgtttcatcttgtttttataataaaaagcttcagggaacaagcccaaagccctcaccacaaaaaa

SEQ ID NO: 698 - protein, 299 aa, Homo sapiens
MSKCARKKYIKTNPRQMTMETVESQHDGSITASLTESKSAHVQTQTGQNSIPALAQVAAIAETDESAESEGVIDSHKRREILSRRPSYRKILNELSSDVPGVPKIEEERSEEEGTPPSIATMAVPTSIYQTSTGQYIAIAQGGTIQISNPGSDGVQGLQALTMTNSGAPPPGATIVQYAAQSADGTQQFFVPGSQVVVQAATGDMPTYQIRAPTAALPQGVVMAASPGSLHSPQQLAEEATRKRELRLMKNREAARECRRKKKEYVKCLENRVAVLENQNKTLIEELKALKDLYCHKVE

SEQ ID NO: 699 - DNA, 2330 bp, Homo sapiens
gataaataaagaaaacaggaaaggaggaaagcattgattacaaatatcttaacaatgagcaaatgtgcaaggaaaaaatatattaagacaaatccaagacaaatgaccatggaaacagttgaatcccagcatgatggaagtataacagcttctttgacagagagcaagtctgctcatgtgcagactcagactggccaaaattcaatccctgctttagctcaggtagcagcaattgcagagacagatgaatctgcagaatcagaaggtgtaattgattctcataaacgtagagaaatcctttcacgaagaccctcttataggaaaatactgaatgaactgtcctctgatgtgcctggtgttcccaagattgaagaagagagatcagaggaagaaggaacaccacctagtattgctaccatggcagtaccaactagcatatatcagactagcacggggcaatacactgccactggtgacatgccaacttaccagatccgagctcctactgctgctttgccacagggagtggtgatggctgcatcgcccggaagtttgcacagtccccagcagctggcagaagaagcaacacgcaaacgagagctgaggctaatgaaaaacagggaagctgcccgggagtgtcgcaggaagaagaaagaatatgtcaaatgtcttgaaaatcgtgtggctgtgcttgaaaaccaaaacaagactctcattgaggaactcaaggccctcaaagatctttattgccataaagtagagtaactgtctttgacttggaccttgtttactctaatcaaggcaggagatgcagcagtcctacttattgccatgtggacttgtgggaaggacacgtgtgacccttaagaatccagtttggattagtgtttgaaattgaattgggaatgttgttccaggatgtggaatgcagccgtgatcacacttaccgagcttactttgatctgtttgtcaatagcatgcaaaaaatgctttgtttgccctttgcttctgctttttttcagggaagctgccaaagaatgtcgacgtcgaaagaaagaatatgtaaaatgtctggagagccgagttgcagtgctggaagtccagaacaagaagcttatagaggaacttgaaaccttgaaagacatttgttctcccaaaacagattactagaaatatttaactatgaactgaaggcagcatgtatagttgcttttgaaggaatacaatatatagctggcaagaatggtggcttcttttctttgtatcattcatcttcttctttaatcacttaacattcctaaaatgcttcactgtacgtagttaagtcgtagctataacttcaaattttttaaaagagacaaactgtaaaaaatgtgtgtattcttaaaatgcaatatttgtaaggcttgttccaatgccacatacttgcagctcccattctatgtgtcatcaatagtgtcctatgcaataaaattatttgcaggtctttaaatcattttaggaaaggatgatcaaaaataatgcatccagcagtacaataaaagtaaaccacaaaaaaatacctcaggaaagaatagaaagaaagtctatctaatgacatgcctatatgagaagaatagcctagatatgaatatatggcatttgcagatttttatattagttgctttgttaaaaaaaaaaagattgtattgctgtccttgaatgccatagtcaaagagagtttttaatagaaccatgttggttgcactttgtagtgtttggtgctcatttaaatatctgaacatttactacagtttttaactctactgtgtaatataaaagatcttgcagaagttcttagtgttggtttaatattacctaatgaaagtgatgacatattttttatatctggaatgagcctgttgggatcgcattgcataccttcggggtacaagtcagtttctacactgggtgctgatccttgcacgcgccctttctaccatctcacggtggggatggccgcagggctgtgcacccagaagaagatggctgttagcgtttcggccttcataatggcctgagactttctttctgtaggtggtctggagctgtccggctggtggccccctattttgccatttagcgaacaaccacaggaattttaaaaacaaaaacatcccaagattttttcatttcaaaatgcttcaaagtccacattagatcagatactccgctgtcggcacattcagctgaggttcattacaatcgagactgcaatgtgatctatgtttcatcttgtttttataataaaaagcttcagggaacaagcccaaagccctcaccacaaaaaa

SEQ ID NO: 700 - protein, 236 aa, Homo sapiens
MSKCARKKYIKTNPRQMTMETVESQHDGSITASLTESKSAHVQTQTGQNSIPALAQVAAIAETDESAESEGVIDSHKRREILSRRPSYRKILNELSSDVPGVPKIEEERSEEEGTPPSIATMAVPTSIYQTSTGQYTATGDMPTYQIRAPTAALPQGVVMAASPGSLHSPQQLAEEATRKRELRLMKNREAARECRRKKKEYVKCLENRVAVLENQNKTLIEELKALKDLYCHKVE

SEQ ID NO: 701 - DNA, 2687 bp, Homo sapiens
gctggcggccggcagggggcggagttcgagcctggatttttttcctcggggcctcccccgggaggccgtcccggcgtgggggaggggaggacggggcgggaggacgcggttcggtcggctgcagcgctacttttggtccggggtcggcagggaggccgcggctaccgcatcacagctgacgtgaggactacgtggggccgctgccggctccgggttgctgggcggcggcgccgctgctgagcggcggtcgggctcgccgtctccacctcctcgcgtccgtaatcagtgacgaggtccgctacgtaaatccctttgcggcgggataaataaagaaaacaggaaaggaggaaagcattgattacaaatatcttaacaatgagcaaatgtgcaaggaaaaaatatattaagacaaatccaagacaaatgaccatggaaacagttgaatcccagcatgatggaagtataacagcttctttgacagagagcaagtctgctcatgtgcagactcagactggccaaaattcaatccctgctttagctcaggtagcagcaattgcagagacagatgaatctgcagaatcagaaggtgtaattgattctcataaacgtagagaaatcctttcacgaagaccctcttataggaaaatactgaatgaactgtcctctgatgtgcctggtgttcccaagattgaagaagagagatcagaggaagaaggaacaccacctagtattgctaccatggcagtaccaactagcatatatcagactagcacggggcaatacaatgaggaaactgaacttgccccaagtcacatggctgctgccactggtgacatgccaacttaccagatccgagctcctactgctgctttgccacagggagtggtgatggctgcatcgcccggaagtttgcacagtccccagcagctggcagaagaagcaacacgcaaacgagagctgaggctaatgaaaaacagggaagctgcccgggagtgtcgcaggaagaagaaagaatatgtcaaatgtcttgaaaatcgtgtggctgtgcttgaaaaccaaaacaagactctcattgaggaactcaaggccctcaaagatctttattgccataaagtagagtaactgtctttgacttggaccttgtttactctaatcaaggcaggagatgcagcagtcctacttattgccatgtggacttgtgggaaggacacgtgtgacccttaagaatccagtttggattagtgtttgaaattgaattgggaatgttgttccaggatgtggaatgcagccgtgatcacacttaccgagcttactttgatctgtttgtcaatagcatgcaaaaaatgctttgtttgccctttgcttctgctttttttcagggaagctgccaaagaatgtcgacgtcgaaagaaagaatatgtaaaatgtctggagagccgagttgcagtgctggaagtccagaacaagaagcttatagaggaacttgaaaccttgaaagacatttgttctcccaaaacagattactagaaatatttaactatgaactgaaggcagcatgtatagttgcttttgaaggaatacaatatatagctggcaagaatggtggcttcttttctttgtatcattcatcttcttctttaatcacttaacattcctaaaatgcttcactgtacgtagttaagtcgtagctataacttcaaattttttaaaagagacaaactgtaaaaaatgtgtgtattcttaaaatgcaatatttgtaaggcttgttccaatgccacatacttgcagctcccattctatgtgtcatcaatagtgtcctatgcaataaaattatttgcaggtctttaaatcattttaggaaaggatgatcaaaaataatgcatccagcagtacaataaaagtaaaccacaaaaaaatacctcaggaaagaatagaaagaaagtctatctaatgacatgcctatatgagaagaatagcctagatatgaatatatggcatttgcagatttttatattagttgctttgttaaaaaaaaaaagattgtattgctgtccttgaatgccatagtcaaagagagtttttaatagaaccatgttggttgcactttgtagtgtttggtgctcatttaaatatctgaacatttactacagtttttaactctactgtgtaatataaaagatcttgcagaagttcttagtgttggtttaatattacctaatgaaagtgatgacatattttttatatctggaatgagcctgttgggatcgcattgcataccttcggggtacaagtcagtttctacactgggtgctgatccttgcacgcgccctttctaccatctcacggtggggatggccgcagggctgtgcacccagaagaagatggctgttagcgtttcggccttcataatggcctgagactttctttctgtaggtggtctggagctgtccggctggtggccccctattttgccatttagcgaacaaccacaggaattttaaaaacaaaaacatcccaagattttttcatttcaaaatgcttcaaagtccacattagatcagatactccgctgtcggcacattcagctgaggttcattacaatcgagactgcaatgtgatctatgtttcatcttgtttttataataaaaagcttcagggaacaagcccaaagccctcaccacaaaaaa

SEQ ID NO: 702 - protein, 248 aa, Homo sapiens
MSKCARKKYIKTNPRQMTMETVESQHDGSITASLTESKSAHVQTQTGQNSIPALAQVAAIAETDESAESEGVIDSHKRREILSRRPSYRKILNELSSDVPGVPKIEEERSEEEGTPPSIATMAVPTSIYQTSTGQYNEETELAPSHMAAATGDMPTYQIRAPTAALPQGVVMAASPGSLHSPQQLAEEATRKRELRLMKNREAARECRRKKKEYVKCLENRVAVLENQNKTLIEELKALKDLYCHKVE

SEQ ID NO: 703 - DNA, 1938 bp, Homo sapiens
gacccgcctgcctcctcgcgaacttgggacgagttggaaaatcctccctgagagagccgtgcggctcaggggagcggtttaactcggaaaaggaaaaggaatccagaaacaaatgaccatggaaacagttgaatcccagcatgatggaagtataacagcttctttgacagagagcaagtctgctcatgtgcagactcagactggccaaaattcaatccctgctttagctcaggtagcagcaattgcagagacagatgaatctgcagaatcagaaggtgtaattgattctcataaacgtagagaaatcctttcacgaagaccctcttataggaaaatactgaatgaactgtcctctgatgtgcctggtgttcccaagattgaagaagagagatcagaggaagaaggaacaccacctagtattgctaccatggcagtaccaactagcatatatcagactagcacggggcaatacactgccactggtgacatgccaacttaccagatccgagctcctactgctgctttgccacagggagtggtgatggctgcatcgcccggaagtttgcacagtccccagcagctggcagaagaagcaacacgcaaacgagagctgaggctaatgaaaaacagggaagctgccaaagaatgtcgacgtcgaaagaaagaatatgtaaaatgtctggagagccgagttgcagtgctggaagtccagaacaagaagcttatagaggaacttgaaaccttgaaagacatttgttctcccaaaacagattactagaaatatttaactatgaactgaaggcagcatgtatagttgcttttgaaggaatacaatatatagctggcaagaatggtggcttcttttctttgtatcattcatcttcttctttaatcacttaacattcctaaaatgcttcactgtacgtagttaagtcgtagctataacttcaaattttttaaaagagacaaactgtaaaaaatgtgtgtattcttaaaatgcaatatttgtaaggcttgttccaatgccacatacttgcagctcccattctatgtgtcatcaatagtgtcctatgcaataaaattatttgcaggtctttaaatcattttaggaaaggatgatcaaaaataatgcatccagcagtacaataaaagtaaaccacaaaaaaatacctcaggaaagaatagaaagaaagtctatctaatgacatgcctatatgagaagaatagcctagatatgaatatatggcatttgcagatttttatattagttgctttgttaaaaaaaaaaagattgtattgctgtccttgaatgccatagtcaaagagagtttttaatagaaccatgttggttgcactttgtagtgtttggtgctcatttaaatatctgaacatttactacagtttttaactctactgtgtaatataaaagatcttgcagaagttcttagtgttggtttaatattacctaatgaaagtgatgacatattttttatatctggaatgagcctgttgggatcgcattgcataccttcggggtacaagtcagtttctacactgggtgctgatccttgcacgcgccctttctaccatctcacggtggggatggccgcagggctgtgcacccagaagaagatggctgttagcgtttcggccttcataatggcctgagactttctttctgtaggtggtctggagctgtccggctggtggccccctattttgccatttagcgaacaaccacaggaattttaaaaacaaaaacatcccaagattttttcatttcaaaatgcttcaaagtccacattagatcagatactccgctgtcggcacattcagctgaggttcattacaatcgagactgcaatgtgatctatgtttcatcttgtttttataataaaaagcttcagggaacaagcccaaagccctcaccacaaaaaa

SEQ ID NO: 704 - protein, 221 aa, Homo sapiens
MTMETVESQHDGSITASLTESKSAHVQTQTGQNSIPALAQVAAIAETDESAESEGVIDSHKRREILSRRPSYRKILNELSSDVPGVPKIEEERSEEEGTPPSIATMAVPTSIYQTSTGQYTATGDMPTYQIRAPTAALPQGVVMAASPGSLHSPQQLAEEATRKRELRLMKNREAAKECRRRKKEYVKCLESRVAVLEVQNKKLIEELETLKDICSPKTDY

SEQ ID NO: 705 - DNA, 522 bp, Homo sapiens
atggccctaaaaaggcaagactcaggcagaagggaaaatgcgccttccgagagcggtcgcggctctgcccttcccactccggagactgcccgcgcccgggaccgaatgactcagctgcgaggccctccggcccagttaaaccgctcccctgagccgcacggctctctcagggaggattttccaactcgtcccaagttcgcgaggaggcaggcgggtcccggggcagctgagcgcacgaagcgggcgtggggcggcgagccggcggcctcgggggcgccgagcgaggggccgcgtcaggtgaactcgcggctgccccgccagtccttggcccggccccggggtcccggcccgccgcccacggctccgctcggcctctgctgctccaccgcacccggctccgctccgcctcctgcctccacctccacctcctgcgccgcgtcgcccgctgctgggtctcggggccggagccgacgcaccacttacccgccgcaaagggatttacgtagcggacctcgtcactga

SEQ ID NO: 706 - protein, 173 aa, Homo sapiens
MALKRQDSGRRENAPSESGRGSALPTPETARARDRMTQLRGPPAQLNRSPEPHGSLREDFPTRPKFARRQAGPGAAERTKRAWGGEPAASGAPSEGPRQVNSRLPRQSLARPRGPGPPPTAPLGLCCSTAPGSAPPPASTSTSCAASPAAGSRGRSRRTTYPPQRDLRSGPRH

SEQ ID NO: 707 - DNA, 2604 bp, Homo sapiens
ctcggtgtcctcccgcggaggggcgtagggtgtaaacaggcgacgcgctgggggaggtgcggccttgctgcgtccacgtctcgggcatgctcgaggcgggccagggcggtagcgccgccagctcagagcccacctgaggtaactcctgcggcctctaggatcggagtcccccacgccgcgcgcagccgccgccgctggccgccaataagggcggccgagcccccggcccgggcagggggtgtggctgccggcagcgcgtcggctacaggtgggctgggctgggctgggctgggctgggctgggtgggggcggccgccaaggacccatccctgcgctgcgggcccggcgtggagcccgcggagaggcagcgcgactccaggcagtgggtctctctgccccggtgctcgcgtctgcccctggggccgggccgagcggaaccaggaatcgcagaaacggtcagcgcccagggctctaggccggccgccccgggtgccaggtgaattcctttccctgaccggctgtgagacgttggcccgtcagccgtcgtctttggcctgagtgtgcacatctgtaaaatggaagctcggactagtgatccgtgaggaccttccacgtctgacgtgtgatctcgagagacctgcgtacattcggggtgccagaaggaaagcatagagatggggtcttgctgtgttgcccagactggtctcaaactcctggcctcaagtgatccttctgcctcagcttcccaaagtactgggattacagcttgaaatccatggcccaaaatgactctaccagtggagactctcttctgtgaagaagacgaccagataagaggttgggatgagcatgccactgcatcagatctctgccattccatcccaggatgccatctctgctagagtctacagaagtaagaccaaagaaaaggagagggaagaacagaatgagaagactttgggacatttcatgagtcattcaagcaacatttctaaggctgggagtcctccgtcagcatcagctccggctccggtgtcctccttctctcgcacttctatcacgccatccagccaggacatctgcaggatctgccactgtgaaggagatgatgagagccccctgatcaccccctgccactgcacaggaagcctccacttcgtgcaccaggcctgcctgcagcagtggatcaagagctccgacacgcgctgctgcgagctctgcaagtatgagttcatcatggagaccaagctgaagccactgagaaaatgggagaagttgcagatgacgtccagcgagcgcaggaagatcatgtgctcagtgacattccacgtcattgccatcacatgtgtggtctggtccttgtatgtgctcattgaccgtactgctgaggagatcaagcaggggcaggcaacaggaatcctagaatggcccttttggactaaattggtggttgtggccatcggcttcaccggaggacttctttttatgtatgttcagtgtaaagtgtatgtgcaattgtggaagagactcaaggcctataatagagtgatctatgttcaaaactgtccagaaacaagcaaaaagaatatttttgaaaaatctccactaacagagcccaactttgaaaataaacatggatatggaatctgtcattccgacacaaactcttcttgttgcacagagcctgaagacactggagcagaaatcattcacgtctgattgtgtgcgggttgtcattttcctggacatccatgaagagctgaaggaaattgtttactgccaattgtatacctttcttatgtcctttaatagcatagactggacaggtgactatttatagtggcttctctttttctaaaccctccttagtctcctagaaaaccttcctgtgggccaggcatgcctgggtcctgcctctgcctggcagctctgtgggaaagtggaagaccccatgatgacatcatggggagccagcagagttcctgcccatggtcttgagctgaatgagagaataaaatgccaatcccaagggaagaggaggagcaggggtgcccaggccctgatacccagccgcctccagcttgcagtggtccccagcctggagcagagcattggggagtgtctagccatgacgagaagattccctctgcatcacggcgaaccccaggagatggtattgaaacagacccccaaacacagactcctgcctgccctctgccgatgctgcctcctccatgctcttgagcaggtggagccatggtgctctgtggtggcgcatgattcactgagcaaacagcactttacagaagaaaatctttattttgtaatatgtgtgtccagcgggattgacactcaaaaaaagtctcacttagaaatcttcccttccttacctttgtatctcctttacatcatgagagatcaaaaatccattttgccttacatatgctaagaagcgtggcattctttctgttcataaaacagactcatgacttttaagacaggacaagcaggccagaggctttttttttaatcacagatctcatgggaattagtggatgctaaatggcaattaaagcatgattcctatgcaaaaaaaaaaaaaaa

SEQ ID NO: 708 - protein, 291 aa, Homo sapiens
MSMPLHQISAIPSQDAISARVYRSKTKEKEREEQNEKTLGHFMSHSSNISKAGSPPSASAPAPVSSFSRTSITPSSQDICRICHCEGDDESPLITPCHCTGSLHFVHQACLQQWIKSSDTRCCELCKYEFIMETKLKPLRKWEKLQMTSSERRKIMCSVTFHVIAITCVVWSLYVLIDRTAEEIKQGQATGILEWPFWTKLVVVAIGFTGGLLFMYVQCKVYVQLWKRLKAYNRVIYVQNCPETSKKNIFEKSPLTEPNFENKHGYGICHSDTNSSCCTEPEDTGAEIIHV

SEQ ID NO: 709 - DNA, 2000 bp, Homo sapiens
atggtaggtatagggctgtggatatcgtcagtttgaccaagtattccaagaggccccatggagtttgtcatctgtaatagaggacgttagtgcattagtgatgaaaaaactgcttaccactgactattgtgatctcccagggagtataaggcagctccgcacttgaaatccatggcccaaaatgactctaccagtggagactctcttctgtgaagaagacgaccagataagaggttgggatgagcatgccactgcatcagatctctgccattccatcccaggatgccatctctgctagagtctacagaagtaagaccaaagaaaaggagagggaagaacagaatgagaagactttgggacatttcatgagtcattcaagcaacatttctaaggctgggagtcctccgtcagcatcagctccggctccggtgtcctccttctctcgcacttctatcacgccatccagccaggacatctgcaggatctgccactgtgaaggagatgatgagagccccctgatcaccccctgccactgcacaggaagcctccacttcgtgcaccaggcctgcctgcagcagtggatcaagagctccgacacgcgctgctgcgagctctgcaagtatgagttcatcatggagaccaagctgaagccactgagaaaatgggagaagttgcagatgacgtccagcgagcgcaggaagatcatgtgctcagtgacattccacgtcattgccatcacatgtgtggtctggtccttgtatgtgctcattgaccgtactgctgaggagatcaagcaggggcaggcaacaggaatcctagaatggcccttttggactaaattggtggttgtggccatcggcttcaccggaggacttctttttatgtatgttcagtgtaaagtgtatgtgcaattgtggaagagactcaaggcctataatagagtgatctatgttcaaaactgtccagaaacaagcaaaaagaatatttttgaaaaatctccactaacagagcccaactttgaaaataaacatggatatggaatctgtcattccgacacaaactcttcttgttgcacagagcctgaagacactggagcagaaatcattcacgtctgattgtgtgcgggttgtcattttcctggacatccatgaagagctgaaggaaattgtttactgccaattgtatacctttcttatgtcctttaatagcatagactggacaggtgactatttatagtggcttctctttttctaaaccctccttagtctcctagaaaaccttcctgtgggccaggcatgcctgggtcctgcctctgcctggcagctctgtgggaaagtggaagaccccatgatgacatcatggggagccagcagagttcctgcccatggtcttgagctgaatgagagaataaaatgccaatcccaagggaagaggaggagcaggggtgcccaggccctgatacccagccgcctccagcttgcagtggtccccagcctggagcagagcattggggagtgtctagccatgacgagaagattccctctgcatcacggcgaaccccaggagatggtattgaaacagacccccaaacacagactcctgcctgccctctgccgatgctgcctcctccatgctcttgagcaggtggagccatggtgctctgtggtggcgcatgattcactgagcaaacagcactttacagaagaaaatctttattttgtaatatgtgtgtccagcgggattgacactcaaaaaaagtctcacttagaaatcttcccttccttacctttgtatctcctttacatcatgagagatcaaaaatccattttgccttacatatgctaagaagcgtggcattctttctgttcataaaacagactcatgacttttaagacaggacaagcaggccagaggctttttttttaatcacagatctcatgggaattagtggatgctaaatggcaattaaagcatgattcctatgcaaaaaaaaaaaaaaa

SEQ ID NO: 710 - protein, 291 aa, Homo sapiens; identical to SEQ ID NO: 708

SEQ ID NO: 711 - DNA, 2511 bp, Homo sapiens
ctcggtgtcctcccgcggaggggcgtagggtgtaaacaggcgacgcgctgggggaggtgcggccttgctgcgtccacgtctcgggcatgctcgaggcgggccagggcggtagcgccgccagctcagagcccacctgaggtaactcctgcggcctctaggatcggagtcccccacgccgcgcgcagccgccgccgctggccgccaataagggcggccgagcccccggcccgggcagggggtgtggctgccggcagcgcgtcggctacaggtgggctgggctgggctgggctgggctgggctgggtgggggcggccgccaaggacccatccctgcgctgcgggcccggcgtggagcccgcggagaggcagcgcgactccaggcagtgggtctctctgccccggtgctcgcgtctgcccctggggccgggccgagcggaaccaggaatcgcagaaacggtcagcgcccagggctctaggccggccgccccgggtgccaggtgaattcctttccctgaccggctgtgagacgttggcccgtcagccgtcgtctttggcctgagtgtgcacatctgtaaaatggaagctcggactagtgatccgtgaggaccttccacgtctgacgtgtgatctcgagagacctgcgtacattcggggtgccagaaggaaagcatagcttgaaatccatggcccaaaatgactctaccagtggagactctcttctgtgaagaagacgaccagataagaggttgggatgagcatgccactgcatcagatctctgccattccatcccaggatgccatctctgctagagtctacagaagtaagaccaaagaaaaggagagggaagaacagaatgagaagactttgggacatttcatgagtcattcaagcaacatttctaaggctgggagtcctccgtcagcatcagctccggctccggtgtcctccttctctcgcacttctatcacgccatccagccaggacatctgcaggatctgccactgtgaaggagatgatgagagccccctgatcaccccctgccactgcacaggaagcctccacttcgtgcaccaggcctgcctgcagcagtggatcaagagctccgacacgcgctgctgcgagctctgcaagtatgagttcatcatggagaccaagctgaagccactgagaaaatgggagaagttgcagatgacgtccagcgagcgcaggaagatcatgtgctcagtgacattccacgtcattgccatcacatgtgtggtctggtccttgtatgtgctcattgaccgtactgctgaggagatcaagcaggggcaggcaacaggaatcctagaatggcccttttggactaaattggtggttgtggccatcggcttcaccggaggacttctttttatgtatgttcagtgtaaagtgtatgtgcaattgtggaagagactcaaggcctataatagagtgatctatgttcaaaactgtccagaaacaagcaaaaagaatatttttgaaaaatctccactaacagagcccaactttgaaaataaacatggatatggaatctgtcattccgacacaaactcttcttgttgcacagagcctgaagacactggagcagaaatcattcacgtctgattgtgtgcgggttgtcattttcctggacatccatgaagagctgaaggaaattgtttactgccaattgtatacctttcttatgtcctttaatagcatagactggacaggtgactatttatagtggcttctctttttctaaaccctccttagtctcctagaaaaccttcctgtgggccaggcatgcctgggtcctgcctctgcctggcagctctgtgggaaagtggaagaccccatgatgacatcatggggagccagcagagttcctgcccatggtcttgagctgaatgagagaataaaatgccaatcccaagggaagaggaggagcaggggtgcccaggccctgatacccagccgcctccagcttgcagtggtccccagcctggagcagagcattggggagtgtctagccatgacgagaagattccctctgcatcacggcgaaccccaggagatggtattgaaacagacccccaaacacagactcctgcctgccctctgccgatgctgcctcctccatgctcttgagcaggtggagccatggtgctctgtggtggcgcatgattcactgagcaaacagcactttacagaagaaaatctttattttgtaatatgtgtgtccagcgggattgacactcaaaaaaagtctcacttagaaatcttcccttccttacctttgtatctcctttacatcatgagagatcaaaaatccattttgccttacatatgctaagaagcgtggcattctttctgttcataaaacagactcatgacttttaagacaggacaagcaggccagaggctttttttttaatcacagatctcatgggaattagtggatgctaaatggcaattaaagcatgattcctatgcaaaaaaaaaaaaaaa

SEQ ID NO: 712 - protein, 291 aa, Homo sapiens; identical to SEQ ID NO: 708

SEQ ID NO: 713 - DNA, 3256 bp, Homo sapiens
cggactgctgtcctccagattcaggccggtgggtctggggagcccggattggtcttggaggagcaacggctgcgcaggtgactcggtggcctcaagtgtgtacaaaactcaaaacatgaacaacaatatatattaccaatcttcaaacctggtttgcctagaactggaatacagttgcctgcgacatattttagaagaactagaaaagtcaaagtaatggataacagaaaagagcctccattcttcaatgatgataacatgggaccattttactacagacttcatttctgtgataccatggagctcttcattgaaacattaactggaacatgttttgagctgagagtttcaccttttgaaactgttatttctgtgaaagcaaaaattcgaagattggaaggtattcccatctgtcgacaacacttaatttggaataacatggaacttgaaaatgattattgcttgaatgattacaacatttcagaagggtgtaccttgaagctagttttggctatgcgtggcggacctataaatactagaagagttcctacagacgatccacttaggaagatggcagagtacttggattccagtcgagttgaggtctgggagaagacctcctgcagcaaacaagttacatttttggtataccgagaaggagatcaattgaatttctttcctgcagtagataggggagatggcactttaacaccgttatctgactcttcaaagaaaatagattttcatttgcatgtcctacggagaaaaggagaacatcgtatgagtggtggttctatgtataattcagatacagatgaggatgaagaaactgagccttcttcttctgggcaacagataattgaaaattcaataactatgaataagatgaagctgctgaaggctaagatgaagaacatgaatctcagcaaaaagcctaagaaagctgtcaagataaaacctcacccacctgtagctcctcgaccttctagtggttccactgcaccatctcgccaccgattgttaagggtcctccccaacattggtcaatcttgttcacctgcttttgggaatgcatatccgcccgaaatctccaggaatggaatttcaagtttggcaactcaactctctgctgagagatacatatcttctatcactggtgaatttcttaaggaagataatagctgggagaataacacactgtctcacttcagtagcaacgtcaaactacctcctcagataccccatttggagttgggaaatgaccaggagcttgctgactctgttctccatcttggatcatccctgcctaggcaaacaaaacattttttaggaaacttgccatctagtaatgggaacattgtcttaccttcagaagaatgtgtaaccgaacaatcacttctacctaaagtgggctcaccggcttcatttgcagaaggaaatgctgatgaacagagcagcggcttagaaggtgcgtgcaaagtgaatctggagttgctactcactaatgctgacaaagggttgaaagctccagagcagcatctcaagcatgttgcaggagtgctgaatggggaatcagtagagacttcagttcttaactaccgggaattaagtcctcacaagaatagactcttgtcacctcttcgctgttctgcatcaatgtcgctacataattctctggtgaaaccagagagacagtccaaatgttttgagtttgggaagctacagccttcttcttctcagtcactggatgttcaaaacataactgattcttctttctctaggactacttgctttcaaggtgttaaagttgattcacttgggaaaagatctgatgttatttccaaagttgaggctcgggatatcacagaaatgactaacaaggcttccaaagagcctgttggttgtgtaaataatatcagttttcttgcctcactggccgggagcacaagcagaaatagattacagagcacacgtggggcaggcaggcttcagaactctggaactgggctgtctacaaacctccagcattttcaggaagaaaactttaggaaaagttctccccagttagaacatacaggagtttttttgtctacccatggtgttggaatgaatggaaataatgcagcagcagggaaaagcgtaggagaatgtactactcatcacctcccacctgtgaaagcccctcttcagacaaagaagaaaacaacaaatcattgttttctttgtggaaagaaaacaggactggctagtagctacgaatgcagatgtggaaacaacttctgtgcatctcatcgttatgcagaaactcatggctgtacctatgattacaagagtgcagggaggagatacttgcacgaggcaaatcctgtggttaatgcaccaaagcttccaaaaatctaactcttcctctacatcttactgttctgcccgggattcgtattataatgacagaagaaatgttgtttagactattatttttgttcgactctaaaagatttgccaaataacaaaagcatacaatgcatactgttggagaacaagaatgctactgtattttacatctttatttcttggtgaaacaaaagttttaaaagtagttttaacaactttacactggaatgatttagctttgttattgcatgtcttgtgttaagtgttttgtatatgatattgcagttttactaggcaaatcttcaaaagatgcactttaggaaacgaaatatttcctaaataaccaggcttccacattgtacagaatgagcagtcatgtaatgaatggctctactcagattgaccatatgggttttttctttttctttcttttattcttctccttctttttttttcagaggtgggatgggtggagattttttaaaaatcccacgtgtgaaagtttactggctttattagcaagttcctttttacttcaagctactttttataaaaaagaacatttttccagtgtggtttttaacagataatacatttcttccacattcagattagattcggacatgaatccattctataaaacacatcgtgttcatgatagtgtatattttactactttttgaatgttaattttaaaatagaagatgtcccacttgccattaaatatagaagccaactttttaccttttgaaatatggctacatttaaaacaaaatctcacagctcggtttttcttatttgttgagtgctattaccaggagaaatacaaataaatattcaatttcattaaaaaaaaaaaaaaaaa

SEQ ID NO: 714 - protein, 727 aa, Homo sapiens
MDNRKEPPFFNDDNMGPFYYRLHFCDTMELFIETLTGTCFELRVSPFETVISVKAKIRRLEGIPICRQHLIWNNMELENDYCLNDYNISEGCTLKLVLAMRGGPINTRRVPTDDPLRKMAEYLDSSRVEVWEKTSCSKQVTFLVYREGDQLNFFPAVDRGDGTLTPLSDSSKKIDFHLHVLRRKGEHRMSGGSMYNSDTDEDEETEPSSSGQQIIENSITMNKMKLLKAKMKNMNLSKKPKKAVKIKPHPPVAPRPSSGSTAPSRHRLLRVLPNIGQSCSPAFGNAYPPEISRNGISSLATQLSAERYISSITGEFLKEDNSWENNTLSHFSSNVKLPPQIPHLELGNDQELADSVLHLGSSLPRQTKHFLGNLPSSNGNIVLPSEECVTEQSLLPKVGSPASFAEGNADEQSSGLEGACKVNLELLLTNADKGLKAPEQHLKHVAGVLNGESVETSVLNYRELSPHKNRLLSPLRCSASMSLHNSLVKPERQSKCFEFGKLQPSSSQSLDVQNITDSSFSRTTCFQGVKVDSLGKRSDVISKVEARDITEMTNKASKEPVGCVNNISFLASLAGSTSRNRLQSTRGAGRLQNSGTGLSTNLQHFQEENFRKSSPQLEHTGVFLSTHGVGMNGNNAAAGKSVGECTTHHLPPVKAPLQTKKKTTNHCFLCGKKTGLASSYECRCGNNFCASHRYAETHGCTYDYKSAGRRYLHEANPVVNAPKLPKI

SEQ ID NO: 715 - DNA, 3558 bp, Homo sapiens
ttctgagggttaaatgagcatagcacagtgtcaggcacacactacttgccagatgtcgagtattcatctttattgaaataggactgtggtaagccactttatggctctcgattttgtatgagaaaatcatgcttagtgccttgttagtaaaagaaagaaaacctgaaagtccctgccacggaaggaagaaatagcggggagaaaagggagttggtaagtttcagcatttcagagcttggagagggacaagttaggtttccattttatggagaaggaggtggaggcaggatgggtcctaaggtgtcattcaaaacacacagccataactctttattgagagtagcgctagggccccagggattgctgtggtcaagttgcggacaaaaatgaccactcgttggaagacaggagaggagtgtttagttacaaaagcagtcaacaattcaggtgtatctatattcagacagcaaataaaagttgttcaacttggttgctaatgggacccactctactgaggctttgtatagaactcatagaggaagatggcttcaaggaatgaactaccctgtgcttttcttaggactaaaatctcaggaagctggtgatgaatgaaaaccttagtcccactggcactgcacgaggggccaggagagcagcagcatcataagccgcagggtggggcagccaaggcaggggcattctgagctgttggggaggggtggcaggcagggtggggcactgtgagctgtcggggagggcattgtgaagtgtggggtggggcattgtgtgccacatgcctgggctcccacctggggccagtgggcttcagtctgtaggtgactacagaaggaggaggagctccgtctgttctctcttcaggcagttgttgtgtctctcagcacttgttgggttcacaacctattaaataagccggctggtcttcaccctcccagacaagtcaactcaggggaggcagcagggtgcgggccttggccagggccagggccagggccagggccagggctggtgcccggggccgcgctgtgaggtgggcaggcgaggagcgggaagaccatctctgcaagtgcagcatagcctcggcctaggacagcgggagtgcgtggccaaagctgtgagcagaggcacaggtggtggcagacagtagaggcaccccatggggaacatactgacctgtcgtgtgcaccctagcgtcagcctcgagtttgaccagcaacaggggtcggtgtgtccctctgaatctgagatctatgaggcagtagctggggacaggatggcaggagcgcccatggctgctgctgtgcagcctgctgaggtgactgttgaagttggtgaggacctccacatgcaccacgttcgtgaccgggagatgcctgaagctttggagtttaacctttctgccaatccagaggcaagcacaatattccagaggaactctcaaacagatgctttggagtttaacccttctgccaatccagaggcaagcacaatattccagaggaactctcaaacagatgttgtagaaataagaagaagcaactgtacaaaccatgtatctactgtgcgtttcagtcaacaatacagcttgtgttcgacaatattccttgatgacagcacagccatcagcattatcttacaatgacaataatatctgtgaccttggagatacctcatcatatcacacaaagagatgcagatagatctttgagcatacctgatgaacagttacactcatttgcggtttccaccgtgcacattacgaagaacagaaatggaggtgggagtttaaataactattcctcctccattccatcgactcccagcaccagccaggaggaccctcagttcagtgttcctcccactgccaacacacccacccccgtttgcaagcggtccatgcgctggtccaacctgtttacatctgagaaagggagtgacccagacaaagagaggaaagccccggagaatcatgctgacaccatcgggagcggcagagccatccccattaaacagggcatgctcttaaagcgaagtgggaaatggctgaagacatggaaaaagaaatacgtcaccctgtgttccaatggcgtgctcacctattattcaagcttaggtgattatatgaagaatattcataaaaaagagattgaccttcagacatctaccatcaaagtcccaggaaagtggccatccctagccacatcggcctgcgcacccatctccagctctaaaagcaatgacctatccaaggacatggacaccgggctgggtgactccatatgcttcagccccagtatctccagcaccaccggccccaagctcaacccgcccccctctcctcatgccaataaaaagaaacacctaaagaagaaaagcaccaacaactttatgattgtgtctgccactggccaaacgtggcactttgaagccacgacatatgaggagcgggatgcctgggtccaagccatccagagccagatcctggccagcctgcagtcatgcgagagcagtaaaagcaagtcccagctgaccagccagagcgaggccatggccctgcagtcgatccaaaacatgcgtgggaacgcccactgtgtggactgtgagacccagaatcctaagtgggccagtttgaacttgggagtcctcatgtgtattgaatgctcaggtatccaccgcagtcttggcacccgcctttcccgtgtgcgatctctggagctggatgactggccagttgagctcaggaaggttatgtcatctattggcaatgacctagccaacagcatctgggaagggagcagccagggacagacaaaaccctcagaaaagtccacgagggaagaaaaggaacggtggatcctttccaaatatgaggagaagctctttctggccccactaccctgcactgatctgtccctgggccagcagctgctgcgggccaccgctgatgaggacctgcagacagccatcctgctgctggcacatggctcccgtgaggaggtgaacgagacctgtggggagggagacggctgcacggcgctccatctggcctgccgcaaggggaatgtggtcctggcgcagctcctgatctggtacggggtggacgtcatggcccgagatgcccacgggaacacagcgctgacctacgcccggcaggcctccagccaggagtgcatcaacgtgcttctgcagtacggctgccccgacgagtgcgtgtagttctgttttatttgactacagtctccttggtgcaaaaacaaaatgggaaaaataaggataactcagaatttcaaaaggaaatcacaaattcagcttataatagcattttcagtacttctcataaactaagtaaatacacaaaatgttgatttttctgaccataagacatattttatgtccttttgccgaggtggatgtgttagtctcaggccctcctggccacattgcccaagtcacacaggcttctgtattatgtatttagataagatgtgtgaaaatatatttgaaaaaaagttcataaatttgcattgatttttgtacaca

SEQ ID NO: 716 - DNA, 786 bp, Homo sapiens
atgtctttccacgtctttttctttgcttttataaatatatctgtttccatagaaatgcttcacatcacacaagtgagtgatgaggaagaggatgatgatggctgtgacctttttgctgactctgagaaggaggagaaagatattgaggacattgaagaaaatactagacctgtaaggaaggctgtagttgctatcacttggcaggggggatgccgtgggccgagtggacgaggagccgacaaccttaccctcaggagaagcaaaacttcggaagacactcaagagaagaaggaaaggagaactccttcggacgatgaagaggataacttattcgcaccccccaagctgaccgacgaggacttctcgccatttggctctggaggtggcctgttcagtgggggcaaggggctctttgatgatgaggacgaggagagtgacctcttcacggaagccccccaggatcggcaagctggagcctctgttaaggaggagtcttcatcatccaaacctggaaagaaaatcctagcaggagctgtttctgtatttttaggagacacggatgtgctgcctccgttccatcactgaaggagccacagaagcctgagcagcccactccaaggaaaagcccctatggtccccctcccactggcctgtttgatgatgatgatggtgatgatgataacgactttttctcgacaccccacagcaaaccttccaaaacaggcaaagtccaatccactgctgatatctttggtgatgaagaaggagatctgttcaaagaaaaag

SEQ ID NO: 717 - protein, 194 aa, Homo sapiens
MSFHVFFFAFINISVSIEMLHITQVSDEEEDDDGCDLFADSEKEEKDIEDIEENTRPVRKAVVAITWQGGCRGPSGRGADNLTLRRSKTSEDTQEKKERRTPSDDEEDNLFAPPKLTDEDFSPFGSGGGLFSGGKGLFDDEDEESDLFTEAPQDRQAGASVKEESSSSKPGKKILAGAVSVFLGDTDVLPPFHH

SEQ ID NO: 718 - DNA, 4621 bp, Homo sapiens
gtcacgccccgggcagcttggctggggctaggcttccggggctctgcggtcctcggcctgtgctggcagcctcggagcccaccgagccgggcggctgggatgatgaaccggacgacccccgaccaggagctggtgccggcgtcggagcccgtgtgggagcggccgtggtcggtggaggagatccgcaggagcagccagagctggtcgctggcggccgacgcgggcctactacagtttctacaggaattctcacagcaaactatctctaggacccatgaaatcaagaaacaagtggacggactaatccgggaaaccaaagccacagattgtcgcctgcataatgtcttcaatgacttccttatgctctctaatacccagttcatagagaatcgtgtatatgatgaagaagtggaggagccagtactcaaggctgaggcagaaaaaacagagcaggagaagacacgagagcagaaagaagtagatctcattcctaaagtccaggaggctgtgaactatggcttacaagtattggacagtgcctttgagcaacttgatatcaaagcaggaaactcagactccgaggaagatgatgctaatgggcgggtggaactgatccttgaaccaaaggatctatacattgatcgtcctttaccatatctcattgggtcaaagctgttcatggaacaagaagatgtaggtcttggagagctgtccagtgaagaaggctctgtaggcagtgatcgtggcagtattgtggacactgaggaagagaaagaagaggaggagtcagatgaagattttgcccatcacagtgacaatgaacaaaaccagcacaccacacaaatgagtgatgaggaagaggatgatgatggctgtgacctttttgctgactctgagaaggaggaggaagatattgaggacattgaagaaaatactagacctaaaagaagcagacctacatcgtttgcagatgagctggctgcccgcatcaagggggatgccatgggtcgagtggacgaggagccgacaaccttaccctcaggagaagcaaaacctcggaagacactcaaagagaagaaggaaaggagaactccttcagacgatgaagaggataacttattcgcaccccccaagctgaccgacgaggacttctcgccatttggctctggaggtggcctgttcagtggcggcaaggggctatttgatgatgaggacgaggagagtgacctcttcacggaagcctcccaggatcggcaagctggagcctctgttaaggaggagtcttcatcatccaaacctggaaagaaaatcccagcaggagctgtttctgtatttttaggagacacggatgtgtttggtgctgcctccgttccatcactgaaggagccacagaagcctgagcagcccactccaaggaaaagcccctatggtccccctcccactggcctctttgatgatgatgatggtgatgatgatgacgactttttctcggcaccccacagcaaaccttctaaaacacgcaaagtccaatccactgccgatatctttggtgacgaagaaggagatctgttcaaagaaaaagccgtagcatcgccagaagccactgtgagtcagacagatgaaaataaagcaagagcagaaaaaaaggttaccttatcttacagcaaaaatctcaagccctcatcagaaacaaagactcaaaaaggcttattttcagatgaggaggactctgaggatttgttttcttctcaaagtgcgagtaacttaaaaggtgcatctctgctgcctggcaagctccccacgtcggtttccctgtttgatgatgaagatgaagaggataatctttttgggggtacagctgctaagaagcagacattgtctctacaagctcagagagaagagaaagcaaaagcctccgagctctccaaaaagaaagcatctgccctgttgttcagcagtgatgaggagtggaatattcctgcttcacagacccacttagcatctgacagcaggtctaaaggagaacccagggattctgggaccctccagagccaggaggccaaggctgtgaaaaagaccagtctctttgaggaagacaaagaagatgatctttttgccattgccaaggacagccaaaagaagacccagagagtgtcactcctctttgaagacgatgttgatagcggaggctctctgtttggctctcctcccacatctgttcctcctgcaacaaagaaaaaagagactgtctctgaggcaccacctttgctgttcagcgatgaagaagagaaggaggcacaacttggagtgaagtctgtggataagaaggttgagagtgccaaggagtcattaaaatttgggagaactgatgtggctgagtcagaaaaggaaggacttttgactagatctgctcaggaaacagtcaagcattctgatttattttcttcatcatccccatgggacaaaggaaccaagcctagaaccaaaactgttcttagcttgtttgatgaggaagaggataaaatggaagatcaaaacattatccaggctccacagaaagaagtaggaaagggctgcgatcctgatgcccaccccaagagcacaggtgtcttccaggatgaagagctgcttttcagccacaagctccaaaaggacaatgacccagatgttgacctttttgctggcaccaaaaaaaccaagctgttagagccaagtgttgggagcctgtttggggatgatgaagatgatgatcttttcagctctgccaagtcccagcctttggtacaagagaaaaagagagtagtgaaaaaagaccactctgttaactctttcaaaaaccagaaacatcctgaatccattcaaggtagtaaagaaaaaggcatatggaagccggaaacacctcaggcaaatttagcgatcaacccagcggccttgctgcccacagcggcttcccagatctctgaagtaaagcctgttttgccagaattggcttttccttcatctgaacacagaaggagccacggtctggaaagtgtgcctgtccttcccgggagtggggaggccggtgtgagttttgatcttccagctcaggcagacaccttacacagtgcaaacaagagccgtgtcaagatgagagggaagcgtagaccgcagacccgtgcagctaggcggctggctgctcaggagtccagcgaggctgaggacatgagcgtccccagaggacccattgcacagtgggctgatggcgccatttccccaaatggccatcggccacagctcagagcagccagtggagaagacagcactgaggaggccctggcagctgccgctgcaccttgggaaggtggtcctgtgcctggagtggacacaagcccctttgcaaagtctctgggtcattccagaggggaggctgacctttttgattctggggacattttttccacgggcactggatctcagtccgtggagagaacaaaacccaaggcaaagatagcagagaatcctgccaacccaccagtgggtggtaaagcaaagagccccatgtttcctgctctaggcgaggccagcagtgatgatgatctctttcagtctgctaaaccaaaaccagcaaagaaaacaaatccctttcctctcctggaagatgaggatgacctctttacagatcagaaagtcaagaagaatgagacaaaatccagtagtcagcaggatgtcatattaacaacacaagatatttttgaggatgatatatttgctacggaagcaattaaaccctctcagaaaaccagagagaaggagaaaacattggaatctaatttatttgatgataacattgatatctttgctgacttaactgtaaaaccaaaagaaaagtccaaaaagaaagtggaagccaagtctatatttgatgatgatatggatgacatcttctccactggtatccaggctaagacaaccaaaccaaaaagccgatctgcacaggccgcacctgaaccaagatttgaacacaaggtgtccaacatctttgatgatcccctgaatgcctttggaggccagtagagcacacagggtatccacatgttaccctgcagctacattgttgagttagtgatgatattgtatatgctcatggtcttaactggattacaaaaagcaaatactagaacagctagctcatcttttacccaatgtacttagtatttttctgcactggtttaatcatgcttaatactacaaaacaaaaataaatatttcacagtggttggtttgttttgtttttaaaccacagtttgatttagttagccttgctggggccataatatgcttcagggtgtgtaaaagaagaaatctctttgtggctttcatgggcagggaatctcagagatagcaaatgccacctgaccagaagtctttgttatatggatgggaaccctaacttagggcttgggcaggggaaagagaaagaagatgagagattatacttcatgagtcttagcaatatgggagcaggttttcactgaattctgagggtgcctctgcatgtcctccaaggcaaagtttggcaaactgtggcccccccactgtcatattttgttaataaaattttattggaacacaatcacaa

SEQ ID NO: 719 - protein, 1318 aa, Homo sapiens
MMNRTTPDQELVPASEPVWERPWSVEEIRRSSQSWSLAADAGLLQFLQEFSQQTISRTHEIKKQVDGLIRETKATDCRLHNVFNDFLMLSNTQFIENRVYDEEVEEPVLKAEAEKTEQEKTREQKEVDLIPKVQEAVNYGLQVLDSAFEQLDIKAGNSDSEEDDANGRVELILEPKDLYIDRPLPYLIGSKLFMEQEDVGLGELSSEEGSVGSDRGSIVDTEEEKEEEESDEDFAHHSDNEQNQHTTQMSDEEEDDDGCDLFADSEKEEEDIEDIEENTRPKRSRPTSFADELAARIKGDAMGRVDEEPTTLPSGEAKPRKTLKEKKERRTPSDDEEDNLFAPPKLTDEDFSPFGSGGGLFSGGKGLFDDEDEESDLFTEASQDRQAGASVKEESSSSKPGKKIPAGAVSVFLGDTDVFGAASVPSLKEPQKPEQPTPRKSPYGPPPTGLFDDDDGDDDDDFFSAPHSKPSKTRKVQSTADIFGDEEGDLFKEKAVASPEATVSQTDENKARAEKKVTLSYSKNLKPSSETKTQKGLFSDEEDSEDLFSSQSASNLKGASLLPGKLPTSVSLFDDEDEEDNLFGGTAAKKQTLSLQAQREEKAKASELSKKKASALLFSSDEEWNIPASQTHLASDSRSKGEPRDSGTLQSQEAKAVKKTSLFEEDKEDDLFAIAKDSQKKTQRVSLLFEDDVDSGGSLFGSPPTSVPPATKKKETVSEAPPLLFSDEEEKEAQLGVKSVDKKVESAKESLKFGRTDVAESEKEGLLTRSAQETVKHSDLFSSSSPWDKGTKPRTKTVLSLFDEEEDKMEDQNIIQAPQKEVGKGCDPDAHPKSTGVFQDEELLFSHKLQKDNDPDVDLFAGTKKTKLLEPSVGSLFGDDEDDDLFSSAKSQPLVQEKKRVVKKDHSVNSFKNQKHPESIQGSKEKGIWKPETPQANLAINPAALLPTAASQISEVKPVLPELAFPSSEHRRSHGLESVPVLPGSGEAGVSFDLPAQADTLHSANKSRVKMRGKRRPQTRAARRLAAQESSEAEDMSVPRGPIAQWADGAISPNGHRPQLRAASGEDSTEEALAAAAAPWEGGPVPGVDTSPFAKSLGHSRGEADLFDSGDIFSTGTGSQSVERTKPKAKIAENPANPPVGGKAKSPMFPALGEASSDDDLFQSAKPKPAKKTNPFPLLEDEDDLFTDQKVKKNETKSSSQQDVILTTQDIFEDDIFATEAIKPSQKTREKEKTLESNLFDDNIDIFADLTVKPKEKSKKKVEAKSIFDDDMDDIFSTGIQAKTTKPKSRSAQAAPEPRFEHKVSNIFDDPLNAFGGQ

SEQ ID NO: 720 - DNA, 322 bp, Homo sapiens
tcatcctggactcgggggcagcgggcctgctctgagccctcaccctggacttgtctcctctgttcagttcatgccatggaggaagtggtgaaggaggtggtgggacatgccaaggagactggagagaaagccattgccgaagccataaagaaagcccaagagtcaggggacaaaaagatgaaggaagtcactgagacagtgaccaacacagtcacaaatgccatcacccatgcagcagagagtctgggcaaacttggacagtgaatgcacctgctaccatggcccacccttcccaagtctcaataaaaagccatgaaatatg

SEQ ID NO: 721 - protein, 62 aa, Homo sapiens
MEEVVKEVVGHAKETGEKAIAEAIKKAQESGDKKMKEVTETVTNTVTNAITHAAESLGKLGQ

SEQ ID NO: 722 - DNA, 2431 bp, Homo sapiens
gtgggcaggcgaggagcgggaagaccatctctgcaagtgcagcatagcctcggcctaggacagcgggagtgcgtggccaaagctgtgagcagaggcacaggtggtggcagacagtagaggcgccccatggggaacatactgacctgtcgtgtgcaccctagcgtcagcctcgagtttgaccagcagcaggggtcggtgtgtccctctgaatctgagatctatgaggcaggagctggggacaggatggcaggagcgcccatggctgctgctgtacagcctgctgaggtgactgttgaagttggtgaggacctccacatgcaccacgttcgtgaccgggagatgcctgaagctttggagtttaacccttctgccaatccagaggcaagcacaatattccagaggaactctcaaacagatgttgtagaaataagaagaagcaactgtacaaaccatgtatctactgtgcgtttcagtcaacaatacagcttgtgttcgacaatattccttgatgacagcacagccatccagcattatcttacaatgacaataatatctgtgaccttggagatacctcatcatatcacacaaagagatgcagatagatctttgagcatacctgatgaacagttacactcatttgcggtttccaccgtgcacattatgaagaaaagaaatggaggtgggagtttaaataactattcctcctccattccatcgactcccagcaccagccaggaggaccctcagttcagtgttcctcccactgccaacacacccacccccgtttgcaagcggtccatgcgctggtccaacctgtttacatctgagaaagggagtgacccagacaaagagaggaaagccccggagaatcatgctgacaccatcgggagcggcagagccatccccattaaacagggcatgctcttaaagcgaagtgggaaatggctgaagacatggaaaaagaaatacgtcaccctgtgttccaatggcgtgctcacctattattcaagcttaggtgattatatgaagaatattcataaaaaagagattgaccttcagacatctaccatcaaagtcccaggaaagtggccatccctagccacatcggcctgcacacccatctccacctctaaaagcaatggcctatccaaggacatggacaccgggctgggtgactccatatgcttcagccccagtatctccagcaccaccagccccaagctcaacccgcccccctctcctcatgccaataaaaagaaacacctaaagaagaaaagcaccaacaactttatgattgtgtctgccactggccaaacgtggcactttgaagccacgacgtatgaggagcgggatgcctgggtccaagccatccagagccagatcctggccagcctgcagtcatgcgagagcagtaaaagcaagtcccagctgaccagccagagcaaggccatggccctgcagtcgatccaaaacatgcgtgggaacgcccactgtgtggactgtgagacccagaatcctaagtgggccagtttgaacttgggagtcctcatgtgtattgaatgctcaggaatccaccgcagtcttggcacccgcctttcccgtgtgcgatctctggagctggatgactggccagttgagctcaggaaggttatgtcatctattggcaatgacctagccaacagcatctgggaagggagcagccaggggcagacaaaaccctcagaaaagtccacgagggaagagaaggaacggtggatccgttccaaatatgaggagaagctctttctggccccactaccctgcactgagctgtccctgggccagcagctgctgcgggccaccgctgatgaggacctgcagacagccatcctgctgctggcacatggctcccgtgaggaggtgaacgagacctgtggggagggagacggctgcacggcgctccatctggcctgccgcaaggggaatgtggtcctggcgcagctcctgatctggtacggggtggacgtcatggcccgagatgcccacgggaacacagcgctgacctacgcccggcaggcctccagccaggagtgcatcaacgtgcttctgcagtacggctgccccgacaagtgtgtgtagtatctgttttatttgactgcagtctccttggtgcaaaaacaaaatgggaaaaataaggataactcagaatttcaaaaggaaatcacaaattcagctaataatagcattttcagtacttttcgtaaactaagtaaatacacaaaatgttgatttttctgaccataagacgtattttatgtccttttgccaaggtggatttgttagtctcaggccctcctggccacattgcccaagtcacacaggcttctgtattatgtatttagataaaatgtgtgaaaatatatttgaaataaagttcataaatatgcattga

SEQ ID NO: 723 - protein, 663 aa, Homo sapiens
MGNILTCRVHPSVSLEFDQQQGSVCPSESEIYEAGAGDRMAGAPMAAAVQPAEVTVEVGEDLHMHHVRDREMPEALEFNPSANPEASTIFQRNSQTDVVEIRRSNCTNHVSTVRFSQQYSLCSTIFLDDSTAIQHYLTMTIISVTLEIPHHITQRDADRSLSIPDEQLHSFAVSTVHIMKKRNGGGSLNNYSSSIPSTPSTSQEDPQFSVPPTANTPTPVCKRSMRWSNLFTSEKGSDPDKERKAPENHADTIGSGRAIPIKQGMLLKRSGKWLKTWKKKYVTLCSNGVLTYYSSLGDYMKNIHKKEIDLQTSTIKVPGKWPSLATSACTPISTSKSNGLSKDMDTGLGDSICFSPSISSTTSPKLNPPPSPHANKKKHLKKKSTNNFMIVSATGQTWHFEATTYEERDAWVQAIQSQILASLQSCESSKSKSQLTSQSKAMALQSIQNMRGNAHCVDCETQNPKWASLNLGVLMCIECSGIHRSLGTRLSRVRSLELDDWPVELRKVMSSIGNDLANSIWEGSSQGQTKPSEKSTREEKERWIRSKYEEKLFLAPLPCTELSLGQQLLRATADEDLQTAILLLAHGSREEVNETCGEGDGCTALHLACRKGNVVLAQLLIWYGVDVMARDAHGNTALTYARQASSQECINVLLQYGCPDKCV

SEQ ID NO: 724 - DNA, 2478 bp, Homo sapiens
tggacccaactggcgaggctgctggggttgcagcgggacagttggggcggccccgcaggcccaggtgaacaaaaattgtttgctggcccccaggatactaactagacctttggcctgactcacaggacactaaggctccttttctgaagaagccttttaccagtctcatttaggggatgggaacaacatgtcttcacctagggactttagagcagagcctgtaaacgattatgagggaaatgactctgaagcagaagacttgaatttcagggagactttgccttcatcaagtcaggaaaacacacctagatcaaaggtttttgaaaataaagttaattcagagaaggtaaaactttctcttcggaatttcccacataatgattatgaggatgtttttgaagagccttcagaaagtggcagtgatcccagcatgtggacagccagaggccccttcagaagagacaggtggagcagtgaggatgaggaggctgcagggccatcacaggctctctcccctctactttctgatacgcgcaaaattgtttctgaaggagaactagatcagttggctcagattcggccattaatattcaattttcatgagcagacagccatcaaggattgtttgaaaatccttgaggaaaaaacagcagcgtatgatatcatgcaggaatttatggctttagaacttaagaatctgcctggtgagttcaactctgggaatcaaccaagcaacagagaaaaaaacagataccgagatattcttccatttcaacatcatggatatagtggcccaaatgagagaacaacgttctggcatggttcaaacgaaggagcagtatcacttttgttacgatattgtgcttgaagttcttcggaaacttctgactttggattaagaaagacttctgttgcctctcacttgaaattaccaagtgggtttgcacctcctcataaagaacatgtttgcactgtgctgaagggctttgctatgcatacaatctgctttcttggtttatcagtttattttctttctaaaagctccctgaagggcaatatcatttggcttggggtgatcagtgtttacttattgatcttgctagacaatatcaaaataacttcccacattttccagtgaaacagatgttacataaaacgattgcagcttggctatttggttgaagggattacagagcccaataaaggatttaaaatatattcattaagattttatttggaaaggtggctggagagagctgaggatttccaggactttgtaagttcttattctgggagaacataaggccaataatcatgacctcttccaggcatttttaagacagatgtctattcatgttctttagctagagcctgtactttttgctggcatttgaataacccagtttaaaaagagtccagttagggtggactaactttggacacaaattggcttccatttcctacattttcatactgctgccttcctacagctgctagaccaagacctgttggtctgggaagcatttcatggatagggagagctcctctcggtgaacagtccaaaactaaaatagatgtttatatagaaagcccaagaggagatttttgccatgcctgagttctttcctatcccaccctaacacttaacatattacttagtctgctttgttaaaagcaagtattacctttaacttgcctcttactctttgccctttagctaactaataaagtttgatataggcattattatataattctgagtcattcatggtatatctcatgtttgatgtatttttcaaactaagatctatgatagttttttttccagagttccattaaatcatttatttcctttactttctcacctctgttgaaacatttagaaactggatttgggaacccaattttggaaaaccagattcatagtcatgaaaatggaaacttccatattctgtttttgaaaagatgtggccattattacagtaattttattataggactttgcctcgtacaattaatagtgatattttggacaaggagttctggtgacaagctatacctaattataagctataaaacaatagatatgagtgtttgtacagtttaactcaatggagatcagaatattctatgtattgagaaaatgtttaatatcaatctataaatcttgaatttctaagaggcttattttgttcttttggctgaatgagtatatttgaattggttgaataattaataattctcattgtaaaaataattatatgccaaaaatatatttgatgttaaatcaaatagatgattctgtttacattgttcatatgaataataatctgtgttaatttcattttgataattggcctttaatatttgtatctctaattttattttctctctgttactgtaaaataatagctataatgtataacaattttcttcagaagaattctatgctattattaaaataaaatatttactgtg

SEQ ID NO: 725 - protein, 226 aa, Homo sapiens
MSSPRDFRAEPVNDYEGNDSEAEDLNFRETLPSSSQENTPRSKVFENKVNSEKVKLSLRNFPHNDYEDVFEEPSESGSDPSMWTARGPFRRDRWSSEDEEAAGPSQALSPLLSDTRKIVSEGELDQLAQIRPLIFNFHEQTAIKDCLKILEEKTAAYDIMQEFMALELKNLPGEFNSGNQPSNREKNRYRDILPFQHHGYSGPNERTTFWHGSNEGAVSLLLRYCA

SEQ ID NO: 726 - DNA, 2965 bp, Homo sapiens
gtgaacaaaaattgtttgctggcccccaggatactaactagacctttggcctgactcacaggacactaaggctccttttctgaagaagccttttaccagtctcatttaggggatgggaacaacatgtcttcacctagggactttagagcagagcctgtaaacgattatgagggaaatgactctgaagcagaagacttgaatttcagggagactttgccttcatcaagtcaggaaaacacacctagatcaaaggtttttgaaaataaagttaattcagagaaggtaaaactttctcttcggaatttcccacataatgattatgaggatgtttttgaagagccttcagaaagtggcagtgatcccagcatgtggacagccagaggccccttcagaagagacaggtggagcagtgaggatgaggaggctgcagggccatcacaggctctctcccctctactttctgatacgcgcaaaattgtttctgaaggagaactagatcagttggctcagattcggccattaatattcaattttcatgagcagacagccatcaaggattgtttgaaaatccttgaggaaaaaacagcagcgtatgatatcatgcaggaatttatggctttagaacttaagaatctgcctggtgagttcaactctgggaatcaaccaagcaacagagaaaaaaacagataccgagatattcttccatatgattcaacacgcgttcctcttggaaaaagcaaggactacatcaatgctagttatattagaatagtcaattgtggagaagagtatttttatatcgctactcaaggaccactgctgagcaccatagatgacttttggcaaatggtgttggaaaataattcaaatgttattgccatgataaccagagagatagaaggtggaattatcaaatgctaccattactggcccatttctctgaagaagccattggaattgaaacacttccgtgtattcctggagaactaccagatacttcaatatttcatcattcgaatgtttcaagttgtggagaagtccacgggaactagtcactctgtaaaacagttgcagttcaccaagtggccagaccatggcactcctgcctcagcagatagcttcataaaatatattcgttatgcaaggaagagccaccttacaggacccatggttgttcactgcagtgccggcataggccggacaggggtgttcctatgtgtggatgtcgtgttctgtgccatcgtaaagaactgttcattcaacatcatggatatagtggcccaaatgagagaacaacgttctggcatggttcaaacgaaggagcagtatcacttttgttacgatattgtgcttgaagttcttcggaaacttctgactttggattaagaaagacttctgttgcctctcacttgaaattaccaagtgggtttgcacctcctcataaagaacatgtttgcactgtgctgaagggctttgctatgcatacaatctgctttcttggtttatcagtttattttctttctaaaagctccctgaagggcaatatcatttggcttggggtgatcagtgtttacttattgatcttgctagacaatatcaaaataacttcccacattttccagtgaaacagatgttacataaaacgattgcagcttggctatttggttgaagggattacagagcccaataaaggatttaaaatatattcattaagattttatttggaaaggtggctggagagagctgaggatttccaggactttgtaagttcttattctgggagaacataaggccaataatcatgacctcttccaggcatttttaagacagatgtctattcatgttctttagctagagcctgtactttttgctggcatttgaataacccagtttaaaaagagtccagttagggtggactaactttggacacaaattggcttccatttcctacattttcatactgctgccttcctacagctgctagaccaagacctgttggtctgggaagcatttcatggatagggagagctcctctcggtgaacagtccaaaactaaaatagatgtttatatagaaagcccaagaggagatttttgccatgcctgagttctttcctatcccaccctaacacttaacatattacttagtctgctttgttaaaagcaagtattacctttaacttgcctcttactctttgccctttagctaactaataaagtttgatataggcattattatataattctgagtcattcatggtatatctcatgtttgatgtatttttcaaactaagatctatgatagttttttttccagagttccattaaatcatttatttcctttactttctcacctctgttgaaacatttagaaactggatttgggaacccaattttggaaaaccagattcatagtcatgaaaatggaaacttccatattctgtttttgaaaagatgtggccattattacagtaattttattataggactttgcctcgtacaattaatagtgatattttggacaaggagttctggtgacaagctatacctaattataagctataaaacaatagatatgagtgtttgtacagtttaactcaatggagatcagaatattctatgtattgagaaaatgtttaatatcaatctataaatcttgaatttctaagaggcttattttgttcttttggctgaatgagtatatttgaattggttgaataattaataattctcattgtaaaaataattatatgccaaaaatatatttgatgttaaatcaaatagatgattctgtttacattgttcatatgaataataatctgtgttaatttcattttgataattggcctttaatatttgtatctctaattttattttctctctgttactgtaaaataatagctataatgtataacaattttcttcagaagaattctatgctattattaaaataaaatatttactgtg

SEQ ID NO: 727 - protein, 420 aa, Homo sapiens
MSSPRDFRAEPVNDYEGNDSEAEDLNFRETLPSSSQENTPRSKVFENKVNSEKVKLSLRNFPHNDYEDVFEEPSESGSDPSMWTARGPFRRDRWSSEDEEAAGPSQALSPLLSDTRKIVSEGELDQLAQIRPLIFNFHEQTAIKDCLKILEEKTAAYDIMQEFMALELKNLPGEFNSGNQPSNREKNRYRDILPYDSTRVPLGKSKDYINASYIRIVNCGEEYFYIATQGPLLSTIDDFWQMVLENNSNVIAMITREIEGGIIKCYHYWPISLKKPLELKHFRVFLENYQILQYFIIRMFQVVEKSTGTSHSVKQLQFTKWPDHGTPASADSFIKYIRYARKSHLTGPMVVHCSAGIGRTGVFLCVDVVFCAIVKNCSFNIMDIVAQMREQRSGMVQTKEQYHFCYDIVLEVLRKLLTLD

SEQ ID NO: 728 - DNA, 2870 bp, Homo sapiens
ctgtggctctgtggtaggggaatgccaccaactccctgaggagcagccgtgtggtatgattgtaaacgattatgagggaaatgactctgaagcagaagacttgaatttcagggagactttgccttcatcaagtcaggaaaacacacctagatcaaaggtttttgaaaataaagttaattcagagaaggtaaaactttctcttcggaatttcccacataatgattatgaggatgtttttgaagagccttcagaaagtggcagtgatcccagcatgtggacagccagaggccccttcagaagagacaggtggagcagtgaggatgaggaggctgcagggccatcacaggctctctcccctctactttctgatacgcgcaaaattgtttctgaaggagaactagatcagttggctcagattcggccattaatattcaattttcatgagcagacagccatcaaggattgtttgaaaatccttgaggaaaaaacagcagcgtatgatatcatgcaggaatttatggctttagaacttaagaatctgcctggtgagttcaactctgggaatcaaccaagcaacagagaaaaaaacagataccgagatattcttccatatgattcaacacgcgttcctcttggaaaaagcaaggactacatcaatgctagttatattagaatagtcaattgtggagaagagtatttttatatcgctactcaaggaccactgctgagcaccatagatgacttttggcaaatggtgttggaaaataattcaaatgttattgccatgataaccagagagatagaaggtggaattatcaaatgctaccattactggcccatttctctgaagaagccattggaattgaaacacttccgtgtattcctggagaactaccagatacttcaatatttcatcattcgaatgtttcaagttgtggagaagtccacgggaactagtcactctgtaaaacagttgcagttcaccaagtggccagaccatggcactcctgcctcagcagatagcttcataaaatatattcgttatgcaaggaagagccaccttacaggacccatggttgttcactgcagtgccggcataggccggacaggggtgttcctatgtgtggatgtcgtgttctgtgccatcgtaaagaactgttcattcaacatcatggatatagtggcccaaatgagagaacaacgttctggcatggttcaaacgaaggagcagtatcacttttgttacgatattgtgcttgaagttcttcggaaacttctgactttggattaagaaagacttctgttgcctctcacttgaaattaccaagtgggtttgcacctcctcataaagaacatgtttgcactgtgctgaagggctttgctatgcatacaatctgctttcttggtttatcagtttattttctttctaaaagctccctgaagggcaatatcatttggcttggggtgatcagtgtttacttattgatcttgctagacaatatcaaaataacttcccacattttccagtgaaacagatgttacataaaacgattgcagcttggctatttggttgaagggattacagagcccaataaaggatttaaaatatattcattaagattttatttggaaaggtggctggagagagctgaggatttccaggactttgtaagttcttattctgggagaacataaggccaataatcatgacctcttccaggcatttttaagacagatgtctattcatgttctttagctagagcctgtactttttgctggcatttgaataacccagtttaaaaagagtccagttagggtggactaactttggacacaaattggcttccatttcctacattttcatactgctgccttcctacagctgctagaccaagacctgttggtctgggaagcatttcatggatagggagagctcctctcggtgaacagtccaaaactaaaatagatgtttatatagaaagcccaagaggagatttttgccatgcctgagttctttcctatcccaccctaacacttaacatattacttagtctgctttgttaaaagcaagtattacctttaacttgcctcttactctttgccctttagctaactaataaagtttgatataggcattattatataattctgagtcattcatggtatatctcatgtttgatgtatttttcaaactaagatctatgatagttttttttccagagttccattaaatcatttatttcctttactttctcacctctgttgaaacatttagaaactggatttgggaacccaattttggaaaaccagattcatagtcatgaaaatggaaacttccatattctgtttttgaaaagatgtggccattattacagtaattttattataggactttgcctcgtacaattaatagtgatattttggacaaggagttctggtgacaagctatacctaattataagctataaaacaatagatatgagtgtttgtacagtttaactcaatggagatcagaatattctatgtattgagaaaatgtttaatatcaatctataaatcttgaatttctaagaggcttattttgttcttttggctgaatgagtatatttgaattggttgaataattaataattctcattgtaaaaataattatatgccaaaaatatatttgatgttaaatcaaatagatgattctgtttacattgttcatatgaataataatctgtgttaatttcattttgataattggcctttaatatttgtatctctaattttattttctctctgttactgtaaaataatagctataatgtataacaattttcttcagaagaattctatgctattattaaaataaaatatttactgtg

SEQ ID NO: 729 - protein, 411 aa, Homo sapiens
MIVNDYEGNDSEAEDLNFRETLPSSSQENTPRSKVFENKVNSEKVKLSLRNFPHNDYEDVFEEPSESGSDPSMWTARGPFRRDRWSSEDEEAAGPSQALSPLLSDTRKIVSEGELDQLAQIRPLIFNFHEQTAIKDCLKILEEKTAAYDIMQEFMALELKNLPGEFNSGNQPSNREKNRYRDILPYDSTRVPLGKSKDYINASYIRIVNCGEEYFYIATQGPLLSTIDDFWQMVLENNSNVIAMITREIEGGIIKCYHYWPISLKKPLELKHFRVFLENYQILQYFIIRMFQVVEKSTGTSHSVKQLQFTKWPDHGTPASADSFIKYIRYARKSHLTGPMVVHCSAGIGRTGVFLCVDVVFCAIVKNCSFNIMDIVAQMREQRSGMVQTKEQYHFCYDIVLEVLRKLLTLD

SEQ ID NO: 730 - DNA, 2444 bp, Homo sapiens
ctgtggctctgtggtaggggaatgccaccaactccctgaggagcagccgtgtggtatgattgtaaacgattatgagggaaatgactctgaagcagaagacttgaatttcagggagactttgccttcatcaagtcaggaaaacacacctagatcaaaggtttttgaaaataaagttaattcagagaaggtaaaactttctcttcggaatttcccacataatgattatgaggatgtttttgaagagccttcagaaagtggcagtgatcccagcatgtggacagccagaggccccttcagaagagacaggtggagcagtgaggatgaggaggctgcagggccatcacaggctctctcccctctactttctgatacgcgcaaaattgtttctgaaggagaactagatcagttggctcagattcggccattaatattcaattttcatgagcagacagccatcaaggattgtttgaaaatccttgaggaaaaaacagcagcgtatgatatcatgcaggaatttatgacgggaactagtcactctgtaaaacagttgcagttcaccaagtggccagaccatggcactcctgcctcagcagatagcttcataaaatatattcgttatgcaaggaagagccaccttacaggacccatggttgttcactgcagtgccggcataggccggacaggggtgttcctatgtgtggatgtcgtgttctgtgccatcgtaaagaactgttcattcaacatcatggatatagtggcccaaatgagagaacaacgttctggcatggttcaaacgaaggagcagtatcacttttgttacgatattgtgcttgaagttcttcggaaacttctgactttggattaagaaagacttctgttgcctctcacttgaaattaccaagtgggtttgcacctcctcataaagaacatgtttgcactgtgctgaagggctttgctatgcatacaatctgctttcttggtttatcagtttattttctttctaaaagctccctgaagggcaatatcatttggcttggggtgatcagtgtttacttattgatcttgctagacaatatcaaaataacttcccacattttccagtgaaacagatgttacataaaacgattgcagcttggctatttggttgaagggattacagagcccaataaaggatttaaaatatattcattaagattttatttggaaaggtggctggagagagctgaggatttccaggactttgtaagttcttattctgggagaacataaggccaataatcatgacctcttccaggcatttttaagacagatgtctattcatgttctttagctagagcctgtactttttgctggcatttgaataacccagtttaaaaagagtccagttagggtggactaactttggacacaaattggcttccatttcctacattttcatactgctgccttcctacagctgctagaccaagacctgttggtctgggaagcatttcatggatagggagagctcctctcggtgaacagtccaaaactaaaatagatgtttatatagaaagcccaagaggagatttttgccatgcctgagttctttcctatcccaccctaacacttaacatattacttagtctgctttgttaaaagcaagtattacctttaacttgcctcttactctttgccctttagctaactaataaagtttgatataggcattattatataattctgagtcattcatggtatatctcatgtttgatgtatttttcaaactaagatctatgatagttttttttccagagttccattaaatcatttatttcctttactttctcacctctgttgaaacatttagaaactggatttgggaacccaattttggaaaaccagattcatagtcatgaaaatggaaacttccatattctgtttttgaaaagatgtggccattattacagtaattttattataggactttgcctcgtacaattaatagtgatattttggacaaggagttctggtgacaagctatacctaattataagctataaaacaatagatatgagtgtttgtacagtttaactcaatggagatcagaatattctatgtattgagaaaatgtttaatatcaatctataaatcttgaatttctaagaggcttattttgttcttttggctgaatgagtatatttgaattggttgaataattaataattctcattgtaaaaataattatatgccaaaaatatatttgatgttaaatcaaatagatgattctgtttacattgttcatatgaataataatctgtgttaatttcattttgataattggcctttaatatttgtatctctaattttattttctctctgttactgtaaaataatagctataatgtataacaattttcttcagaagaattctatgctattattaaaataaaatatttactgtg

SEQ ID NO: 731 - protein, 269 aa, Homo sapiens
MIVNDYEGNDSEAEDLNFRETLPSSSQENTPRSKVFENKVNSEKVKLSLRNFPHNDYEDVFEEPSESGSDPSMWTARGPFRRDRWSSEDEEAAGPSQALSPLLSDTRKIVSEGELDQLAQIRPLIFNFHEQTAIKDCLKILEEKTAAYDIMQEFMTGTSHSVKQLQFTKWPDHGTPASADSFIKYIRYARKSHLTGPMVVHCSAGIGRTGVFLCVDVVFCAIVKNCSFNIMDIVAQMREQRSGMVQTKEQYHFCYDIVLEVLRKLLTLD

SEQ ID NO: 732 - DNA, 2321 bp, Homo sapiens
ctgtggctctgtggtaggggaatgccaccaactccctgaggagcagccgtgtggtatgattgatgattcaacacgcgttcctcttggaaaaagcaaggactacatcaatgctagttatattagaatagtcaattgtggagaagagtatttttatatcgctactcaaggaccactgctgagcaccatagatgacttttggcaaatggtgttggaaaataattcaaatgttattgccatgataaccagagagatagaaggtggaattatcaaatgctaccattactggcccatttctctgaagaagccattggaattgaaacacttccgtgtattcctggagaactaccagatacttcaatatttcatcattcgaatgtttcaagttgtggagaagtccacgggaactagtcactctgtaaaacagttgcagttcaccaagtggccagaccatggcactcctgcctcagcagatagcttcataaaatatattcgttatgcaaggaagagccaccttacaggacccatggttgttcactgcagtgccggcataggccggacaggggtgttcctatgtgtggatgtcgtgttctgtgccatcgtaaagaactgttcattcaacatcatggatatagtggcccaaatgagagaacaacgttctggcatggttcaaacgaaggagcagtatcacttttgttacgatattgtgcttgaagttcttcggaaacttctgactttggattaagaaagacttctgttgcctctcacttgaaattaccaagtgggtttgcacctcctcataaagaacatgtttgcactgtgctgaagggctttgctatgcatacaatctgctttcttggtttatcagtttattttctttctaaaagctccctgaagggcaatatcatttggcttggggtgatcagtgtttacttattgatcttgctagacaatatcaaaataacttcccacattttccagtgaaacagatgttacataaaacgattgcagcttggctatttggttgaagggattacagagcccaataaaggatttaaaatatattcattaagattttatttggaaaggtggctggagagagctgaggatttccaggactttgtaagttcttattctgggagaacataaggccaataatcatgacctcttccaggcatttttaagacagatgtctattcatgttctttagctagagcctgtactttttgctggcatttgaataacccagtttaaaaagagtccagttagggtggactaactttggacacaaattggcttccatttcctacattttcatactgctgccttcctacagctgctagaccaagacctgttggtctgggaagcatttcatggatagggagagctcctctcggtgaacagtccaaaactaaaatagatgtttatatagaaagcccaagaggagatttttgccatgcctgagttctttcctatcccaccctaacacttaacatattacttagtctgctttgttaaaagcaagtattacctttaacttgcctcttactctttgccctttagctaactaataaagtttgatataggcattattatataattctgagtcattcatggtatatctcatgtttgatgtatttttcaaactaagatctatgatagttttttttccagagttccattaaatcatttatttcctttactttctcacctctgttgaaacatttagaaactggatttgggaacccaattttggaaaaccagattcatagtcatgaaaatggaaacttccatattctgtttttgaaaagatgtggccattattacagtaattttattataggactttgcctcgtacaattaatagtgatattttggacaaggagttctggtgacaagctatacctaattataagctataaaacaatagatatgagtgtttgtacagtttaactcaatggagatcagaatattctatgtattgagaaaatgtttaatatcaatctataaatcttgaatttctaagaggcttattttgttcttttggctgaatgagtatatttgaattggttgaataattaataattctcattgtaaaaataattatatgccaaaaatatatttgatgttaaatcaaatagatgattctgtttacattgttcatatgaataataatctgtgttaatttcattttgataattggcctttaatatttgtatctctaattttattttctctctgttactgtaaaataatagctataatgtataacaattttcttcagaagaattctatgctattattaaaataaaatatttactgtg

SEQ ID NO: 733 - protein, 228 aa, Homo sapiens
MIDDSTRVPLGKSKDYINASYIRIVNCGEEYFYIATQGPLLSTIDDFWQMVLENNSNVIAMITREIEGGIIKCYHYWPISLKKPLELKHFRVFLENYQILQYFIIRMFQVVEKSTGTSHSVKQLQFTKWPDHGTPASADSFIKYIRYARKSHLTGPMVVHCSAGIGRTGVFLCVDVVFCAIVKNCSFNIMDIVAQMREQRSGMVQTKEQYHFCYDIVLEVLRKLLTLD

SEQ ID NO: 734 - DNA, 2319 bp, Homo sapiens
ctgtggctctgtggtaggggaatgccaccaactccctgaggagcagccgtgtggtatgattgtaaacgattatgagggaaatgactctgaagcagaagacttgaatttcagggagactttgccttcatcaagtcaggaaaacacacctagatcaaaggtttttgaaaataaagttaattcagagaaggtaaaactttctcttcggaatttcccacataatgattatgaggatgtttttgaagagccttcagaaagtggcagtgatcccagcatgtggacagccagaggccccttcagaagagacaggtggagcagtgaggatgaggaggctgcagggccatcacaggctctctcccctctactttctgatacgcgcaaaattgtttctgaaggagaactagatcagttggctcagattcggccattaatattcaattttcatgagcagacagccatcaaggattgtttgaaaatccttgaggaaaaaacagcagcgtatgatatcatgcaggaatttatggctttagaacttaagaatctgcctggtgagttcaactctgggaatcaaccaagcaacagagaaaaaaacagataccgagatattcttccatttcaacatcatggatatagtggcccaaatgagagaacaacgttctggcatggttcaaacgaaggagcagtatcacttttgttacgatattgtgcttgaagttcttcggaaacttctgactttggattaagaaagacttctgttgcctctcacttgaaattaccaagtgggtttgcacctcctcataaagaacatgtttgcactgtgctgaagggctttgctatgcatacaatctgctttcttggtttatcagtttattttctttctaaaagctccctgaagggcaatatcatttggcttggggtgatcagtgtttacttattgatcttgctagacaatatcaaaataacttcccacattttccagtgaaacagatgttacataaaacgattgcagcttggctatttggttgaagggattacagagcccaataaaggatttaaaatatattcattaagattttatttggaaaggtggctggagagagctgaggatttccaggactttgtaagttcttattctgggagaacataaggccaataatcatgacctcttccaggcatttttaagacagatgtctattcatgttctttagctagagcctgtactttttgctggcatttgaataacccagtttaaaaagagtccagttagggtggactaactttggacacaaattggcttccatttcctacattttcatactgctgccttcctacagctgctagaccaagacctgttggtctgggaagcatttcatggatagggagagctcctctcggtgaacagtccaaaactaaaatagatgtttatatagaaagcccaagaggagatttttgccatgcctgagttctttcctatcccaccctaacacttaacatattacttagtctgctttgttaaaagcaagtattacctttaacttgcctcttactctttgccctttagctaactaataaagtttgatataggcattattatataattctgagtcattcatggtatatctcatgtttgatgtatttttcaaactaagatctatgatagttttttttccagagttccattaaatcatttatttcctttactttctcacctctgttgaaacatttagaaactggatttgggaacccaattttggaaaaccagattcatagtcatgaaaatggaaacttccatattctgtttttgaaaagatgtggccattattacagtaattttattataggactttgcctcgtacaattaatagtgatattttggacaaggagttctggtgacaagctatacctaattataagctataaaacaatagatatgagtgtttgtacagtttaactcaatggagatcagaatattctatgtattgagaaaatgtttaatatcaatctataaatcttgaatttctaagaggcttattttgttcttttggctgaatgagtatatttgaattggttgaataattaataattctcattgtaaaaataattatatgccaaaaatatatttgatgttaaatcaaatagatgattctgtttacattgttcatatgaataataatctgtgttaatttcattttgataattggcctttaatatttgtatctctaattttattttctctctgttactgtaaaataatagctataatgtataacaattttcttcagaagaattctatgctattattaaaataaaatatttactgtg

SEQ ID NO: 735 - protein, 217 aa, Homo sapiens
MIVNDYEGNDSEAEDLNFRETLPSSSQENTPRSKVFENKVNSEKVKLSLRNFPHNDYEDVFEEPSESGSDPSMWTARGPFRRDRWSSEDEEAAGPSQALSPLLSDTRKIVSEGELDQLAQIRPLIFNFHEQTAIKDCLKILEEKTAAYDIMQEFMALELKNLPGEFNSGNQPSNREKNRYRDILPFQHHGYSGPNERTTFWHGSNEGAVSLLLRYCA

SEQ ID NO: 736 - DNA, 2076 bp, Homo sapiens
ctgtggctctgtggtaggggaatgccaccaactccctgaggagcagccgtgtggtatgattgtaaacgattatgagggaaatgactctgaagcagaagacttgaatttcagggagactttgccttcatcaagtcaggaaaacacacctagatcaaaggtttttgaaaataaagttaattcagagaaggtaaaactttctcttcggaatttcccacataatgattatgaggatgtttttgaagagccttcagaaagtggcagtgatcccagcatgtggacagccagaggccccttcagaagagacaggtggagcagtgaggatgaggaggctgcagggccatcacaggctctctcccctctactttctgttcaacatcatggatatagtggcccaaatgagagaacaacgttctggcatggttcaaacgaaggagcagtatcacttttgttacgatattgtgcttgaagttcttcggaaacttctgactttggattaagaaagacttctgttgcctctcacttgaaattaccaagtgggtttgcacctcctcataaagaacatgtttgcactgtgctgaagggctttgctatgcatacaatctgctttcttggtttatcagtttattttctttctaaaagctccctgaagggcaatatcatttggcttggggtgatcagtgtttacttattgatcttgctagacaatatcaaaataacttcccacattttccagtgaaacagatgttacataaaacgattgcagcttggctatttggttgaagggattacagagcccaataaaggatttaaaatatattcattaagattttatttggaaaggtggctggagagagctgaggatttccaggactttgtaagttcttattctgggagaacataaggccaataatcatgacctcttccaggcatttttaagacagatgtctattcatgttctttagctagagcctgtactttttgctggcatttgaataacccagtttaaaaagagtccagttagggtggactaactttggacacaaattggcttccatttcctacattttcatactgctgccttcctacagctgctagaccaagacctgttggtctgggaagcatttcatggatagggagagctcctctcggtgaacagtccaaaactaaaatagatgtttatatagaaagcccaagaggagatttttgccatgcctgagttctttcctatcccaccctaacacttaacatattacttagtctgctttgttaaaagcaagtattacctttaacttgcctcttactctttgccctttagctaactaataaagtttgatataggcattattatataattctgagtcattcatggtatatctcatgtttgatgtatttttcaaactaagatctatgatagttttttttccagagttccattaaatcatttatttcctttactttctcacctctgttgaaacatttagaaactggatttgggaacccaattttggaaaaccagattcatagtcatgaaaatggaaacttccatattctgtttttgaaaagatgtggccattattacagtaattttattataggactttgcctcgtacaattaatagtgatattttggacaaggagttctggtgacaagctatacctaattataagctataaaacaatagatatgagtgtttgtacagtttaactcaatggagatcagaatattctatgtattgagaaaatgtttaatatcaatctataaatcttgaatttctaagaggcttattttgttcttttggctgaatgagtatatttgaattggttgaataattaataattctcattgtaaaaataattatatgccaaaaatatatttgatgttaaatcaaatagatgattctgtttacattgttcatatgaataataatctgtgttaatttcattttgataattggcctttaatatttgtatctctaattttattttctctctgttactgtaaaataatagctataatgtataacaattttcttcagaagaattctatgctattattaaaataaaatatttactgtg

SEQ ID NO: 737 - protein, 136 aa, Homo sapiens
MIVNDYEGNDSEAEDLNFRETLPSSSQENTPRSKVFENKVNSEKVKLSLRNFPHNDYEDVFEEPSESGSDPSMWTARGPFRRDRWSSEDEEAAGPSQALSPLLSVQHHGYSGPNERTTFWHGSNEGAVSLLLRYCA

SEQ ID NO: 738 - DNA, 2872 bp, Homo sapiens
tggacccaactggcgaggctgctggggttgcagcgggacagttggggcggccccgcaggcccagtaaacgattatgagggaaatgactctgaagcagaagacttgaatttcagggagactttgccttcatcaagtcaggaaaacacacctagatcaaaggtttttgaaaataaagttaattcagagaaggtaaaactttctcttcggaatttcccacataatgattatgaggatgtttttgaagagccttcagaaagtggcagtgatcccagcatgtggacagccagaggccccttcagaagagacaggtggagcagtgaggatgaggaggctgcagggccatcacaggctctctcccctctactttctgatacgcgcaaaattgtttctgaaggagaactagatcagttggctcagattcggccattaatattcaattttcatgagcagacagccatcaaggattgtttgaaaatccttgaggaaaaaacagcagcgtatgatatcatgcaggaatttatggctttagaacttaagaatctgcctggtgagttcaactctgggaatcaaccaagcaacagagaaaaaaacagataccgagatattcttccatatgattcaacacgcgttcctcttggaaaaagcaaggactacatcaatgctagttatattagaatagtcaattgtggagaagagtatttttatatcgctactcaaggaccactgctgagcaccatagatgacttttggcaaatggtgttggaaaataattcaaatgttattgccatgataaccagagagatagaaggtggaattatcaaatgctaccattactggcccatttctctgaagaagccattggaattgaaacacttccgtgtattcctggagaactaccagatacttcaatatttcatcattcgaatgtttcaagttgtggagaagtccacgggaactagtcactctgtaaaacagttgcagttcaccaagtggccagaccatggcactcctgcctcagcagatagcttcataaaatatattcgttatgcaaggaagagccaccttacaggacccatggttgttcactgcagtgccggcataggccggacaggggtgttcctatgtgtggatgtcgtgttctgtgccatcgtaaagaactgttcattcaacatcatggatatagtggcccaaatgagagaacaacgttctggcatggttcaaacgaaggagcagtatcacttttgttacgatattgtgcttgaagttcttcggaaacttctgactttggattaagaaagacttctgttgcctctcacttgaaattaccaagtgggtttgcacctcctcataaagaacatgtttgcactgtgctgaagggctttgctatgcatacaatctgctttcttggtttatcagtttattttctttctaaaagctccctgaagggcaatatcatttggcttggggtgatcagtgtttacttattgatcttgctagacaatatcaaaataacttcccacattttccagtgaaacagatgttacataaaacgattgcagcttggctatttggttgaagggattacagagcccaataaaggatttaaaatatattcattaagattttatttggaaaggtggctggagagagctgaggatttccaggactttgtaagttcttattctgggagaacataaggccaataatcatgacctcttccaggcatttttaagacagatgtctattcatgttctttagctagagcctgtactttttgctggcatttgaataacccagtttaaaaagagtccagttagggtggactaactttggacacaaattggcttccatttcctacattttcatactgctgccttcctacagctgctagaccaagacctgttggtctgggaagcatttcatggatagggagagctcctctcggtgaacagtccaaaactaaaatagatgtttatatagaaagcccaagaggagatttttgccatgcctgagttctttcctatcccaccctaacacttaacatattacttagtctgctttgttaaaagcaagtattacctttaacttgcctcttactctttgccctttagctaactaataaagtttgatataggcattattatataattctgagtcattcatggtatatctcatgtttgatgtatttttcaaactaagatctatgatagttttttttccagagttccattaaatcatttatttcctttactttctcacctctgttgaaacatttagaaactggatttgggaacccaattttggaaaaccagattcatagtcatgaaaatggaaacttccatattctgtttttgaaaagatgtggccattattacagtaattttattataggactttgcctcgtacaattaatagtgatattttggacaaggagttctggtgacaagctatacctaattataagctataaaacaatagatatgagtgtttgtacagtttaactcaatggagatcagaatattctatgtattgagaaaatgtttaatatcaatctataaatcttgaatttctaagaggcttattttgttcttttggctgaatgagtatatttgaattggttgaataattaataattctcattgtaaaaataattatatgccaaaaatatatttgatgttaaatcaaatagatgattctgtttacattgttcatatgaataataatctgtgttaatttcattttgataattggcctttaatatttgtatctctaattttattttctctctgttactgtaaaataatagctataatgtataacaattttcttcagaagaattctatgctattattaaaataaaatatttactgtg

SEQ ID NO: 739 - protein, 339 aa, Homo sapiens
MWTARGPFRRDRWSSEDEEAAGPSQALSPLLSDTRKIVSEGELDQLAQIRPLIFNFHEQTAIKDCLKILEEKTAAYDIMQEFMALELKNLPGEFNSGNQPSNREKNRYRDILPYDSTRVPLGKSKDYINASYIRIVNCGEEYFYIATQGPLLSTIDDFWQMVLENNSNVIAMITREIEGGIIKCYHYWPISLKKPLELKHFRVFLENYQILQYFIIRMFQVVEKSTGTSHSVKQLQFTKWPDHGTPASADSFIKYIRYARKSHLTGPMVVHCSAGIGRTGVFLCVDVVFCAIVKNCSFNIMDIVAQMREQRSGMVQTKEQYHFCYDIVLEVLRKLLTLD

SEQ ID NO: 740 - DNA, 2226 bp, Homo sapiens
tggacccaactggcgaggctgctggggttgcagcgggacagttggggcggccccgcaggcccaggtttttgaaaataaagttaattcagagaaggtaaaactttctcttcggaatttcccacataatgattatgaggatgtttttgaagagccttcagaaagtggcagtgatcccagcatgtggacagccagaggccccttcagaagagacaggtggagcagtgaggatgaggaggctgcagggccatcacaggctctctcccctctactttctgatacgcgcaaaattgtttctgaaggagaactagatcagttggctcagattcggccattaatattcaattttcatgagcagacagccatcaaggattgtttgaaaatccttgaggaaaaaacagcagcgtatgatatcatgcaggaatttatggctttagaacttaagaatctgcctggtgagttcaactctgggaatcaaccaagcaacagagaaaaaaacagataccgagatattcttccatttcaacatcatggatatagtggcccaaatgagagaacaacgttctggcatggttcaaacgaaggagcagtatcacttttgttacgatattgtgcttgaagttcttcggaaacttctgactttggattaagaaagacttctgttgcctctcacttgaaattaccaagtgggtttgcacctcctcataaagaacatgtttgcactgtgctgaagggctttgctatgcatacaatctgctttcttggtttatcagtttattttctttctaaaagctccctgaagggcaatatcatttggcttggggtgatcagtgtttacttattgatcttgctagacaatatcaaaataacttcccacattttccagtgaaacagatgttacataaaacgattgcagcttggctatttggttgaagggattacagagcccaataaaggatttaaaatatattcattaagattttatttggaaaggtggctggagagagctgaggatttccaggactttgtaagttcttattctgggagaacataaggccaataatcatgacctcttccaggcatttttaagacagatgtctattcatgttctttagctagagcctgtactttttgctggcatttgaataacccagtttaaaaagagtccagttagggtggactaactttggacacaaattggcttccatttcctacattttcatactgctgccttcctacagctgctagaccaagacctgttggtctgggaagcatttcatggatagggagagctcctctcggtgaacagtccaaaactaaaatagatgtttatatagaaagcccaagaggagatttttgccatgcctgagttctttcctatcccaccctaacacttaacatattacttagtctgctttgttaaaagcaagtattacctttaacttgcctcttactctttgccctttagctaactaataaagtttgatataggcattattatataattctgagtcattcatggtatatctcatgtttgatgtatttttcaaactaagatctatgatagttttttttccagagttccattaaatcatttatttcctttactttctcacctctgttgaaacatttagaaactggatttgggaacccaattttggaaaaccagattcatagtcatgaaaatggaaacttccatattctgtttttgaaaagatgtggccattattacagtaattttattataggactttgcctcgtacaattaatagtgatattttggacaaggagttctggtgacaagctatacctaattataagctataaaacaatagatatgagtgtttgtacagtttaactcaatggagatcagaatattctatgtattgagaaaatgtttaatatcaatctataaatcttgaatttctaagaggcttattttgttcttttggctgaatgagtatatttgaattggttgaataattaataattctcattgtaaaaataattatatgccaaaaatatatttgatgttaaatcaaatagatgattctgtttacattgttcatatgaataataatctgtgttaatttcattttgataattggcctttaatatttgtatctctaattttattttctctctgttactgtaaaataatagctataatgtataacaattttcttcagaagaattctatgctattattaaaataaaatatttactgtg

SEQ ID NO: 741 - protein, 145 aa, Homo sapiens
MWTARGPFRRDRWSSEDEEAAGPSQALSPLLSDTRKIVSEGELDQLAQIRPLIFNFHEQTAIKDCLKILEEKTAAYDIMQEFMALELKNLPGEFNSGNQPSNREKNRYRDILPFQHHGYSGPNERTTFWHGSNEGAVSLLLRYCA

SEQ ID NO: 742 - DNA, 1885 bp, Homo sapiens
tggacccaactggcgaggctgctggggttgcagcgggacagttggggcggccccgcaggcccagtggcagtgatcccagcatgtggacagccagaggccccttcagaagagacaggtggagcagtgaggatgaggaggctgcagggccatcacaggctctctcccctctactttctgttcaacatcatggatatagtggcccaaatgagagaacaacgttctggcatggttcaaacgaaggagcagtatcacttttgttacgatattgtgcttgaagttcttcggaaacttctgactttggattaagaaagacttctgttgcctctcacttgaaattaccaagtgggtttgcacctcctcataaagaacatgtttgcactgtgctgaagggctttgctatgcatacaatctgctttcttggtttatcagtttattttctttctaaaagctccctgaagggcaatatcatttggcttggggtgatcagtgtttacttattgatcttgctagacaatatcaaaataacttcccacattttccagtgaaacagatgttacataaaacgattgcagcttggctatttggttgaagggattacagagcccaataaaggatttaaaatatattcattaagattttatttggaaaggtggctggagagagctgaggatttccaggactttgtaagttcttattctgggagaacataaggccaataatcatgacctcttccaggcatttttaagacagatgtctattcatgttctttagctagagcctgtactttttgctggcatttgaataacccagtttaaaaagagtccagttagggtggactaactttggacacaaattggcttccatttcctacattttcatactgctgccttcctacagctgctagaccaagacctgttggtctgggaagcatttcatggatagggagagctcctctcggtgaacagtccaaaactaaaatagatgtttatatagaaagcccaagaggagatttttgccatgcctgagttctttcctatcccaccctaacacttaacatattacttagtctgctttgttaaaagcaagtattacctttaacttgcctcttactctttgccctttagctaactaataaagtttgatataggcattattatataattctgagtcattcatggtatatctcatgtttgatgtatttttcaaactaagatctatgatagttttttttccagagttccattaaatcatttatttcctttactttctcacctctgttgaaacatttagaaactggatttgggaacccaattttggaaaaccagattcatagtcatgaaaatggaaacttccatattctgtttttgaaaagatgtggccattattacagtaattttattataggactttgcctcgtacaattaatagtgatattttggacaaggagttctggtgacaagctatacctaattataagctataaaacaatagatatgagtgtttgtacagtttaactcaatggagatcagaatattctatgtattgagaaaatgtttaatatcaatctataaatcttgaatttctaagaggcttattttgttcttttggctgaatgagtatatttgaattggttgaataattaataattctcattgtaaaaataattatatgccaaaaatatatttgatgttaaatcaaatagatgattctgtttacattgttcatatgaataataatctgtgttaatttcattttgataattggcctttaatatttgtatctctaattttattttctctctgttactgtaaaataatagctataatgtataacaattttcttcagaagaattctatgctattattaaaataaaatatttactgtg

SEQ ID NO: 743 - protein, 64 aa, Homo sapiens
MWTARGPFRRDRWSSEDEEAAGPSQALSPLLSVQHHGYSGPNERTTFWHGSNEGAVSLLLRYCA

SEQ ID NO: 744 - DNA, 2631 bp, Homo sapiens
ataataataataataataataataataataatctacaatgtcatttcccatccaagcttgacttctacctttactttctgatatggttttgccatgtccccacccaaatctcatcatgaattataatccccataatcctgatgtgtcgagggaggggcctagggggaggtgattggatcatgggggcagttatcctcatgctgttcttgtgatattcagtaagtcctcatgagatcttatagggttttgttttgttttttgggatggagtcttgctctgttgtccaggcaggagtgccatggcatgatcttggctcactgcagtctctgcctcttgagttccattgattctcctgcctcagcctcctgagtagctgggattacaggcatgcaccaccacacccagctaatttttgtatttttagtagagacaggatttcactacattagctaggctggtctcaaactcctgacctcagttgatccacctgccttggcctcccaaagtactagggttacaagtgtgagccaccgtgcccagctgagatctgatggttttatacatgtttgacagttgctccttcacatgttcccactctctgtgcggccaccatgtaagtcggacctgcccttctgccatgattgtaagtttcctgaaggacttccccctctgccatgattgttaagtttcctgaggcctccccagccatgtgaaactgagtcaattaaacctctttcctttaaaaattacccaacctcaggtgtttctttatatcagtgtgaaaacagactgctatactttctgatactcatgcttaagcaattggggaattcagactacctgggatcaaaccatggccccacccttagcagtcatgtgaccttggggaggttacttaccttctccatctcaacaacttctgtaaaatctgtaacatgagattgtttctgagggttaaatgagcatagcacagtggggacactgtcaggcacacactacttgccagatgtcgagtattcatctttattgaaataggactgtggtaagccactttatggctctcgattttgtatgagaaaatcatgcttagtgccttgttagtaaaagaaagaaaacctgaaagtccctgccatggaaggaagaaatagcggggagaaaagggagttggtaagtttcagcatttcagagcttggaggtgccagttaggtttctattttatggagaaggaggtggaggcaggatgggtcctaaggtgtcattcaaaacacacagccataactctttattgagagtagagctagggccccagggattgctgtggtcaagttgcggacaaaaatgaccactcgttggaagacaggagaggagtgtttagttacaaaagcagtcaacaattcaggtgtatctatattcagacagcaaataaaagttgttcaacttggttgctaatgggacccactctactgaggctttgtatagaactcatagaggaagctggcttcaaggaatgaactaccctgtgcttttcttaggactaaaatctcaggaagctggtgatgaatgaaaaccttagtcccactggcactgcacgaggggccaggagagcagcagcatcataagccacagggtggggcagccaaggcaggggcattctgagctgttggggaggggtggcaggcagggtggggcactgtgaggtgtcggggagggcattgtgaagtgtggggtggggcattgtgtgccacatgcctgggctcccacctggggccagtgggcttcagtctgtaggtgactacagaaggagaaggagctccgtctgttctcttttcaggcagttgttgtgtctctcagcgcttgttgggttcacaacctattaaataagccggctggtcttcaccctcccagacaagtcaactcaggggaggcagcagggtgcgggccttggcccgcagccctagccggggccggggccggggccggggccagggctggtgcccggggccgcgctgtgaggtgggcaggcgaggagcgggaagaccatctctgcaagtgcagcatagcctcggcctaggacagcgggagtgcgtggccaaagctgtgagcagaggcacaggtggtggcagacagtagaggcgccccatggggaacatactgacctgtcgtgtgcaccctagcgtcagcctcgagtttgaccagcagcaggggtcggtgtgtccctctgaatctgagatctatgaggcaggagctgaggacaggatggcaggagcgcccatggctgctgctgtacagcctgctgaggtgactgttgaagttggtgaggacctccacatgcaccacgttcgtgaccgggagatgcctgaagctttggagtttaacctttctgccaatccagaggcaagcacaatattccagaggaactctcaaacagatgctttggagtttaacccttctgccaatccagaggcaaacacaatattccagaggaactctcaaacagatgttgtagaaataagaagaagcaactgtacaaaccatgtaagtgttggtggaaataacccagatgaagaaaagaatagcacagccaattctggggtctcctctacagacatcctgagcttcggatctggatga

SEQ ID NO: 745 - protein, 163 aa, Homo sapiens
MGNILTCRVHPSVSLEFDQQQGSVCPSESEIYEAGAEDRMAGAPMAAAVQPAEVTVEVGEDLHMHHVRDREMPEALEFNLSANPEASTIFQRNSQTDALEFNPSANPEANTIFQRNSQTDVVEIRRSNCTNHVSVGGNNPDEEKNSTANSGVSSTDILSFGSG

SEQ ID NO: 746 - DNA, 1568 bp, Homo sapiens
ggacctaaggagtcgcagttgtgaacaggttaggtgccgcgggctggggtaggcggcggttgggtccgtggctctggggcactgggaagatcgcgagtcgtgcgcgtgggaaggtactcccccggtcctccgggtcatctttgctccccaggagcggcatatttcgcatctgcctgaggttagagttacttgttattggtaaatagccactatggagactaaggaccagaagaaacacagaaagaaaaacagtggacccaaagctgcaaagaaaaagaagtggcatctgcaggatctccagctaggagacgaagaaaatgcccagaagagaaatgccaatgcttttgcagttcagtctgctgtgtggatgtctcgatcctttcacaggactctggatttgaagacacaaaagcatcatattccagtggttgatggaactccactagagccgccaccaatagcggtagtggtgacggggcctccaaagttggaaagagcactttgatataatgcctcattcggaacttcacctggcagaagttcaccgagatcagaggccctgtgacgatcgtgtcaggtaaaaagcgcagactcaccattattgaatgtgggtgtgacattaacatgatgattgatctggctaaagtagcagatctggtactgatgcttatagatgccagctttgggtttgaaatggaaatgtttgagtttctaaacatctgtcaagcacatggctttcctaaaattctgggagttctcacccacctcgactccttcaagcataacaagcaactgaagaagacaaagaagtgattaaaacacaggttctggacagaagtttaccaggttgccaaactgttctacctttctggaatggtgcatggagaatatcaaaaccaagaaatccacaatctgggccattttattacagttatgaagtttaggcctctcatggcaaacttttcacccttatatcctggcagacatttatttttctaggatggaagatttgacaaacccggaggatatccaaacaaacatcaaatgtgacctgcaggtgtcactttatggttatttaagaggagcacacttgaaaaataaaagccaaattcacatgccaggggtagaacattttgccatgagtgacatcagtttcctcccagacccttgtgttcttcctgaataacaaaagaagtgctgtttaaataagaaggagcagctggtttatgcgcctgtttctggagttgagggtgtgctgtatgacaaagacgctgtctgtgttgaccttggtggcagccacggttttcaggacaaggtggggctcacccatgagctggtccagagtctcatctccacctactccaccattgatgccaagatggcttcaagtcgagtgatgctgctttccaattccaaaccacttgggtcagaggctatagataatcaagggtaagtctgctttttttctatttttaataaaaagatatattacagaagatcatatcacccataattctgccatcataacacattttggtgggattcattctatgtcgttttgtttttct

SEQ ID NO: 747 - DNA, 2668 bp, Homo sapiens
ttaaatttcatttatttctttatgaagacatgatgtatttgttcactgaacaagggtagaaactgcttaaccatccccaatttcatttctctctgttatgctataaattagatgagttacctctgctaaggttacattctatggttaagttactttttactcgtctcaagtgtcaacatcaccagtacctatttctgcaaggatggaaatattctatatctgtacttttcagccatttagccattagccacatgtggttacttaaaatgtacttcagagaaactgaaaaaatgaattcttaattaatttcattctaactctaaatagtcacatgtggctaccatactggacagctcagacctagacatcgactggactaacgaagtggtttcctaacttaaactaaaacttaaatttcaataaaaaatttaaaacgtttttatgaacttccaataggatcgcagtattacttttagtacctgttgactctaaaacttctaaattacagctcatctacatacatttgaaaaatagcaatatctgtatgtgtgagatatgactggttctagatgatgcctggaggccccatggacttacagagacccttccagtgatttctgaggtacctgggaatctgtggccaataaattggtagtcactgaatctgtgagtttttttggaatatcgggctgcataaaatctgacagcttgattgagaaaaagcggggcagggtgccatttcattcagttaaggtcctgtattcattccgtttaataaacgtttgtgtctgtctatgatgtgctagccactgtgccagaaaatggatatagctatggtctgattgacagaggaaatccaaactagtatcttccgtgccatgcaataagagctacattgcaaggctgcagagggtgctactggagcacagaagtgagtcaaaggcttcccacagacacacacacgagcggaaacagaaagtctttatatatcaccatatgtcaaggaacactggccgggagttaggagagctgggcactaggaacgctttgaaactgaatagctgtgtgatttcagaggttatattgcttgtctactatattttactgccgaacttgtactgtttctctcccttttcttcttggtgggaaaagcacaatttggggtcaacagattcggctcaggtctaagtcgcctgccgggaccacgtcgccaggaaacgacgtctccccgacaccttccctcccagtccgggctctctgcagggattcatcccgtcactctcccaacgaccctcgggcacacctcaggcagatgcgaaatatgccgctcctggggagcaaagatgacccggaggaccgggggagtaccttcccacgcgcacgactcgcgatcttcccagtgccccagagccacggacccaaccgccgcctaccccagcccgcggcacctaacctgttcacaactgcgactccttaggtccgcttggacaccgccggaaacggaaattcaccctcgcgccgactcgccggaggtaaacaaaaaggcagaaaaaaagggaccgccgcctggacgacttgcaggggacagctggaagaaagactcgtcaacggccgagtgctggcgccggcgccgtctgcgcagtgcgttccaccgggtccgcgtccctcccgattcagccccaccccgccctcggaatccgctgcctcagctcctgctgtggcactccccagcagcttgcacctcgctcgcggagtccttgctgaaggccagggcagctgtgcggcctggcgcgggttacttgatgccgtgcaaaagccaggagacacatttggttctggccgccccggagtcaccgtgcccggggcgaatggactatggctggattgggagaccacttcctcctctgtaaagatgacagacgagggagatctcacgttctgggggtgccctatagccctcttttggccagaagcggtggatcacgcctgtaatcccagccctttgggaggccgaggtaggaggattgcttgagcccaggagttcaagaccaatctgggcaacatagggaggctacgtctctcaaaaaataaataaatacataaataaataaaaataaagccagcgtcgtggcggggcgcctgtggtccctgtggtcccagctactctggaggctgaggcgggacgatcgcttgagcctgggaggcagaagttgtagtgagctgagatcgagccactgcactccagcctgggcgacagagcaagacactgtctcaaagaaaaataaataaataaaataaggccctctttttccgggaccaacagactctgagggcagggacaaactgacccagcctaaactgcctcgccttccctgctcccgggaaaggggttttccctgagggaaggtagcatcttgccattttcttcctgcacagctttgccttcccagggatccacccattgccacctgaggaaatgccttggagcccatctaatccccagcccagctacttgggacgcctacagagactacattgtcagaggatgcatcttcctctagtcttggagggtttcttttcaatatgatcccaccggtgcatgcaaggctcaattctacatcaaaaaactaggcccactcctgtcgccgagacccccaggcttcaggtc

SEQ ID NO: 748 - protein, 188 aa, Homo sapiens
MTRRTGGVPSHAHDSRSSQCPRATDPTAAYPSPRHLTCSQLRLLRSAWTPPETEIHPRADSPEVNKKAEKKGPPPGRLAGDSWKKDSSTAECWRRRRLRSAFHRVRVPPDSAPPRPRNPLPQLLLWHSPAACTSLAESLLKARAAVRPGAGYLMPCKSQETHLVLAAPESPCPGRMDYGWIGRPLPPL

SEQ ID NO: 749 - DNA, 2052 bp, Homo sapiens
tttttttacgggagggagctaattggattttaagtctagatctttgttttcaattcctcaacatattctataaataagaccaaattatagtagaaggagagtaaataagctattatctttttaaagtggtgaagagcactgattaaatatatattagagccccagcccccgccccagctgcgcgggcccccgcctggcccatggactgcacagcccagcgggcgccttgagcgcggtgcgggtcctcggagcacccccgaggtgagcgcaagcaaggtccggcatcatgtgctaggttattcccagtgcgaggccacacttgggccgtcggagcagcccctcctcacttcaggggtcaccctccccaagacccattgccccatcatggccggggaccggctccccaggaaggtgatggacgccaagaagctggccagcctgctgcggggcgggcctgggggggcctggtcatcgacagtcactccttcctggagtacaacagctggcatgtgctcagctccgtcaacatctgctgctccaagctggtgaagtggcggttgcagaagggcaaggtgaccattgtggagttcatccagccggctgcacgcagccaggtggaggccactgagccacaggacgtggtggtctatgaccagagcacgcggccgcagacagcttcctctccatcctgctgagcaagctggatggctgcttccacagcgtggccggctgcttccacagcatggccatcatcacggggggcttcgccaccttctcctcctgcttccccgacctctgcgagggcgagcctgctgccctgctacccatgagcctctcccagtcctgcctgctcgtgcccagcgtgggcctgaccctcatcctgcctcacctctacctgggctcgcaggaagacgtcctgaacaaggatctgatgacgcagaatggaataagctacgtcctctatgccagcaactcctgccccaagcctgacttcatctaccagagccacttcttgcaggtccccatcaacgacaactactgtgaaaagctgctgccctggctggacaagtccatcgagttcatcgataaagccaagctgtccagctgccaagtcatcgtccaccatctggccggcatctcctgctgtgccactatcgccatcgcctacatcatgaagaccatgggcatgtcctccgaagacgcctacaggtttgtgaaggaccagcgcccgtccatctcgcccaacttcaacttcctgggccagctgctggagtaccagagcagcccgaagctgctggccgccgtgcagggcgacgcgggcaccccctcaggaatgcaggagcctccccccagccctgcggccggggccccactgccatggctgccaccacctacctcagagaccgctgccaccaggagtgcggctgccagggagggcggcccgagcgcgggcaggaagcccccggcgccccccacggccaccagcacgctgcagcagggcctgcgcagcctgcgcctctcctcggaccacctgcaggacaccagccgcctcaagccctccttctctctggacatcaagtcggcctacgcccccagcaggcggcccggcggcccgggcccagcgaccccggcgaggccccgaagctctctgaaagctggacagccagctacgcggctgccgggccctggccagccggccagccccggagcctggacgccaccgctcgactccctgaagcgtcctcggtgcttcagccccgagggcgtgcaagggccgggcagggtgctgtttgcgcccttcggccgggcgggcgccccggaacccaacggctgcagcgacctgccacggcgggaggcagcaagggctgagcccgggacgcgcggaccagctggtcagacgagctggccccggattcgcacttcaagtgctgcagctgccagatggagttcgaggagggcatggtggaggggcgcgcgcgcagcgaggagctggccgccctgggcaagcaggggagcttctcgggcagcgtggaggtcatcgagatgtcctga

SEQ ID NO: 750 - DNA, 4862 bp, Homo sapiens
actgcgcggctccccgcgccgcagctgggcaccagcagcaccacggaccgcccctgtgctcgcccgacggcgccccgcggcgctttaagagacggcctggcagcccagccccagccgcccagaccggcgagaccagcctgcgggagcagccccatggcggagcagctggccctggtgattgggggcaccatcggggggctgctgctgctgctgttgatcggggcaagctgctgtctgtggagaaggttctgtgccaccctcacctatgaggagctgcctgggacaccagccatggccaccacagctgcctccagtgggcagcgggacaggccctgccagccgcatgctaggacccaactgagcaggccaccagctgtgccattcgtggtgcccccaacccttcaaggccgagattgggtgcccctgcacagtggagagtgggccgatgccccatgggacccctgcccggcatcagagctgctgcctcacacctccagcggcggccttggagatgcatgtatggtgggggccatcaacccagagctgtacaagttcccggaggacaaaagtgagaccgacttccccgacggctgcctggggcggctgtggttctcggtggaatatgagcaggaggctgagcggctgctggtgggcttgatcaaggcacagcacctgcaagccccctcggagacctgcagccccctggtgaagctctacctgctgcccgatgagcggcgcttcctccaatccaagaccaaacgcaaaacctccaacccgcagtttgacgagcacttcatctttcaggtgtccagcaagaccatcacccagagggtgctgaagttctccgtctaccacgtggacaggcagaggaagcaccagctcctgggccaggtgctcttccccttgaagaatgagaccctagtgggggactgccggcgtgtcatctggagagacctggaggccgagagcctggagcccccctcggagtttggcgacctccagttctgcctcagctacaacgactacctgagccgcctgacggtggttgtgctgcgtgccaagggcctccggctccaggaggacagaggcattgtcagtgtgtttgtcaaagtgtctctgatgaaccacaacaagtttgtcaagtgcaagaagacttcagctgtgctgggctccatcaaccctgtgtacaatgagaccttcagcttcaaggccgatgccaccgagctggataccgctagcctcagcctgactgtggtgcagaacatggaaggggacaagagccagcagctgggccgagtggtggtgggcccctacatgtacacccgcggcagagagctggagcactgggacgagatgctcagcaagcccaaggagctggtgaagcgctggcatgcgctctgccgcaccacggagccctgacccttcgcccagcaccgcggttccgctttgggagccgaccatcctcgcagttgcatgtgacagccacagccacacgcatggacgtttcatccaacagctccccgagctgccagccagcccgagccaggaggacgtgagtgctgatatgcaggagagaagaggggacaaagaagccctggcccggtcagcggctctggccatacagccttccgacacactccctcctccttatctgcggggctgcctgggctcggaatcccggctcctggtcctcacagccctgatttggaccagaatctcagatgctcagaagaaagatcctgtttagtgatgacccagctctacctgctgaatggacctgcagggtaaacttgggtgcctccatctgggaaagctgatgatgtgttcatgcagtcgatgaccctcactgctttttcagccagggtttctctgccttctgcctggcagagaaaacacactgctatggggaaaatcacagggagggcgctgtgaccagcgcactcaggcaccaagtgtcggcatggctcactgtgctgggtgaaggcctccccgagcattaggtcctccacggggctgtgtcaaatgccctcccacattgtgtcaagtctgcccatggcccaccctccccacagtccaaaaccacacagccctggttctccagctgttctgctgctgtttctgtgctctccctgattaagagcattcagttcctgggctctccctttgagcaggaaatggtgaaagcatgtggctatggtatagcccacagggctgagattgctgtgttgcagtattgatgtaaaatttgttaagaaggaagtacccacagatcactgccatcaactccccagaagttgcactcaagctagtgagcagcccttgtgcttgtcacagttactgtaacaggtagtgtgtatttgcacctggcatcgtgcagcctgcacgtcaacacgttgttttgtgtaactagaacagcacatggaaccactatctctttctcttttttccttctttttcttttttttttttttattttaattttttgagacggagtttccctcttgtcacccaggctggagtgcaatggcgtgatctcggctcactgcaccctccacctcccaggttcaagcgattctcctgcctcagcctcccaagtagctgggattactggcgcccgccaccatgcctggctaattttttttatttttagtagagacggaattttaccatgttggctaggctggtctcaaattcctggcctcaggtgatccacctgcctcagcctcccaaagtgctgggattacaggcatgagtcaccgcacccagcccgaccagtatctttttcttatgcagtgaaacaactttagcaaaagaggcaatgaatgttatactgagtttctacctctttaactccacctccaatttctgtcaatctacaaacacaagtgtcgcctcgcagtgtttcgtatgaacagaatatcttgtgtttgctttttgtcacttatttcacttgcacattttttgtttgtttgtttgtttgtttgtttgttttttgagatggagtcttgctctgtcgcccaggctggagtgcggtggcgcgatctaggcttactgcaagctccgcctcccgggtttacttacaccactgtcctgcctcagcctccggagtagctgggactacagacacctgccaccacgccctgctaattttttgtattttcaagtagagacggggtttcactgtgttagccaggatggtctcgatctcctgacctcatgatctacccgcctcggcctcccaaagtgctgggattacaggcgtgagccaccacgcccggcccacttgcacattttcaaagtagtccgcaaagctgtagtttctaatagcttcatagctcacatgtaataggggttctctgtgtgtttatagagcaggctactacagtggaactgtttctgtttcatctgacatccggatagatgccagccacccccacattccaaggtgagatttctgactagcagtgacttttctagggccgcttggaaaagttgataagtatccttttctgcaggacagagtagactggtatctctgactcatccctgaaaaatctaaatggcaagagactagctggctctctgctctgatggggaggaggttgttgtttgggctgttctctacagacatagtcagggcaaaaagcatacgcatgcttcccatggaccagagaaacctggcctgggttgtctcaaatcctgtccacaaggcaactccagaagaaagaagccctttacatttccataaaacactttagaatcagctagtcaatttccacaaaataaagtgctagaatttgattggatttaattgattatgtagaacaatttgggggccatttgacatcattaaaatattcaatcttcctattcattaacatggtatatctcttcactttaagtcttttgtatgtttctcagaactatttttgtggttttcagtaaagtgttcttgcacatccttcaatagatttattcttagacgttttatatttgtttatggctagtatatacagattctgttgctacaaaactatgttgaccttgttatccagtgagaggctttgtgacattcatttaaattgtaataatttgcagattatttttgtataatcatgtcctctgtgaatgacagttttatttcttcctttcttaatctttatgccttatttagctcttgccaaactgcagtggctgagcaattggacaagataaagaaataaaagtgatccagatcataaagaaagaagtaaaactatatctgcacatgacataatcttgtctatggaaaatcctaaggaatccacacacaaaaaaactactagagctaataagtttggcaaggttgcaagatataaaattggtatacaaattgcagtggctaggacctccagcagaatgctgactataagtagtgatagtgggtattcttgtctcatcctcaatctcaggggtggtgggtgtggcatgtggagagttgtcaatattcaccatgaagtttgatggttgttataggatttttaatgtactcattaacatatattctcaagctgttaaaaagatttttttaattacaaataaggttaaatttctctcaaatacttactctgcaccttttgaaataattttatttttctcctttattctttggatgtgatgacttatactaattgactgttgaatgtcaaaccaaacttaacattcttgtaatagaaaccagcagggtgtgtacacttttgtgtgtgtgcgcaggtttatacacataaacacaacaatacttggacttatttatttaaaatttagatttattagagggagcatggccataaaataaaataaaataaaatttagatttaagtcga

SEQ ID NO: 751 - protein, 421 aa, Homo sapiens
MAEQLALVIGGTIGGLLLLLLIGASCCLWRRFCATLTYEELPGTPAMATTAASSGQRDRPCQPHARTQLSRPPAVPFVVPPTLQGRDWVPLHSGEWADAPWDPCPASELLPHTSSGGLGDACMVGAINPELYKFPEDKSETDFPDGCLGRLWFSVEYEQEAERLLVGLIKAQHLQAPSETCSPLVKLYLLPDERRFLQSKTKRKTSNPQFDEHFIFQVSSKTITQRVLKFSVYHVDRQRKHQLLGQVLFPLKNETLVGDCRRVIWRDLEAESLEPPSEFGDLQFCLSYNDYLSRLTVVVLRAKGLRLQEDRGIVSVFVKVSLMNHNKFVKCKKTSAVLGSINPVYNETFSFKADATELDTASLSLTVVQNMEGDKSQQLGRVVVGPYMYTRGRELEHWDEMLSKPKELVKRWHALCRTTEP

SEQ ID NO: 752 - DNA, 1536 bp, Homo sapiens
actgcgcggctccccgcgccgcagctgggcaccagcagcaccacggaccgcccctgtgctcgcccgacggcgccccgcggcgctttaagagacggcctggcagcccagccccagccgcccagaccggcgagaccagcctgcgggagcagccccatggcggagcagctggccctggtgattgggggcaccatcggggggctgctgctgctgctgttgatcggggcaagctgctgtctgtggagaaggttctgtgccaccctcacctatgaggagctgcctgggacaccagccatggccaccacagctgcctccagtgggcagcgggacaggccctgccagccgcatgctaggacccaactgagcaggccaccagctgtgccattcgtggtgcccccaacccttcaaggccgagattgggtgcccctgcacagtggagagtgggccgatgccccatgggacccctgcccggcatcagagctgctgcctcacacctccagcggcggccttggagatgcatgtatggtgggggccatcaacccagagctgtacaagttcccggaggacaaaagtgagaccgacttccccgacggctgcctggggcggctgtggttctcggtggaatatgagcaggaggctgagcggctgctggtgggcttgatcaaggcacagcacctgcaagccccctcggagacctgcagccccctggtgaagctctacctgctgcccgatgagcggcgcttcctccaatccaagaccaaacgcaaaacctccaacccgcagtttgacgagcacttcatctttcaggtgtccagcaagaccatcacccagagggtgctgaagttctccgtctaccacgtggacaggcagaggaagcaccagctcctgggccaggtgctcttccccttgaagaatgagaccctagtgggggactgccggcgtgtcatctggagagacctggaggccgagagcctggagcccccctcggagtttggcgacctccagttctgcctcagctacaacgactacctgagccgcctgacggtggttgtgctgcgtgccaagggcctccggctccaggaggacagaggcattgtcagtgtgtttgtcaaagtgtctctgatgaaccacaacaagtttgtcaagtgcaagaagacttcagctgtgctgggctccatcaaccctgtgtacaatgagaccttcagcttcaaggccgatgccaccgagctggataccgctagcctcagcctgactgtggtgcagaacatggaaggggacaagcaggctactacagtggaactgtttctgtttcatctgacatccggatagatgccagccacccccacattccaagattccagttctttgatgaaagtctctattccacccatcaagtctgtgtctgataacaccaatatctgggtcattagtggctccgttttgttgtgtctgttttcccctccttcctgttttgtggtgtgtttgatcacttattgttgaatgctaaccattataataaattttagtggctccaggaaa

SEQ ID NO: 753 - protein, 390 aa, Homo sapiens
MAEQLALVIGGTIGGLLLLLLIGASCCLWRRFCATLTYEELPGTPAMATTAASSGQRDRPCQPHARTQLSRPPAVPFVVPPTLQGRDWVPLHSGEWADAPWDPCPASELLPHTSSGGLGDACMVGAINPELYKFPEDKSETDFPDGCLGRLWFSVEYEQEAERLLVGLIKAQHLQAPSETCSPLVKLYLLPDERRFLQSKTKRKTSNPQFDEHFIFQVSSKTITQRVLKFSVYHVDRQRKHQLLGQVLFPLKNETLVGDCRRVIWRDLEAESLEPPSEFGDLQFCLSYNDYLSRLTVVVLRAKGLRLQEDRGIVSVFVKVSLMNHNKFVKCKKTSAVLGSINPVYNETFSFKADATELDTASLSLTVVQNMEGDKQATTVELFLFHLTSG

SEQ ID NO: 754 - DNA, 807 bp, Homo sapiens
atgagaggcggagcgcggggagtgcgatgcggccaccgggggctctgggcgctgggcaggggccaggatgccgggggtctgagcgcaggcagcgggaaggagtgggttctgaggctcagcaagggggaggtgccgcccaccacgccccccgccccaacgggagcgcgcggagccagcctctcaccctctcgcccgccggggccgcgcaggcgggggaagcgctgctcctgcggccgccacaggtgccaggtgccgcggcccaagatggagccagagccgacctggcctgggcgcgagacgccgcccgccgccgtcggcccggcccgcggagcaagcgccgggtacagggaggggccagcggggcagctggcaccggggcggcgggaggggcggcgggcggagacctcgctcacctgggcccgtgccactctggagcctgccaccgccccgccgcggcccgggatctgcgtccgcgcgcccccacccctccttcccgacccctcctcaggccgggtccccactgtcctcggtcttttcggccccgcccgcaccacgaccgcctgttctccaggctgcccagcgaacccccaagactcccacttccccgacgcaaccccaccgtcccgggtgtataggcgcagctccccacgattctccggccccagacccagcccctcaagtccacctcctcgtagccccaccccctcgctccagtgcccctcgctccagttccccctccgcaccacgccccgcattgaggtctccgcgccggcggctacccctttcctctcgccttctccatcctag

SEQ ID NO: 755 - protein, 268 aa, Homo sapiens [sequence omitted]

SEQ ID NO: 756 - DNA, 1823 bp, Homo sapiens
gcctttgctcctgagaagttgctgacaggtggaacctgaggcagcaggacagcctggcattggccacgggacatcggccacaaccatagcaacttcggcatcaaatggggcaggagagagaacattaaggcagccatgagctccagccgccccgagccgggtccctgggcacccctgagcccccgccttcagcccctgtcccagagctcttccagcctgctgggtgaaggccgggaacagaggccagagctccgcaagactgccagcagcaccgtgtggcaggcccagctgggcgaggccagcaccagaccccaggccccggaggaagaggggaacccgcctgagagcatgaagccagcacgggcctctggccccaaggcgcgacccagtgctggaggccactggtggagcagcactgtgggcaatgtgtccaccatgggcggcagtgacctgtgtcgcctgcgggcccctagtgctgctgctatgcagaggagccattcagacctggtccgtagcacccagatgcggggacacagtggtgctcggaaggccagtctcagctgctcagcccttggcagcagccctgtccacagggctcagctgcagccaggtggtacttctggccagggtggccaggcccctgcaggcctggaaagggacctggctcctgaggatgagacttctaactcagcctggatgctgggggcgagtcagttgtcagtgccaccactagacctgggggacacaactgcccacagcagcagtgcccaggctgagcccaaagctgctgaacagctggctaccaccacctgccatgctctgcccccagctgctctactctgtggcatgagggaggtgagggctggtggctgctgccatgccctacctgccacagggatcctggcctttcccaaactagtggcgtcagtgagcgagtctgggctgcaggctcagcatggggtgaagatccactgtaggttgtctggggggctccctgggcattcccattgctgtgcccacctttggggtcccgctgggttagtcccagagcctggctctaggaccaaagatgtgtggaccatgacctcagccaatgacttggcccctgcagaggcatccccgctgtcagcccaggatgctggtgtgcaggcggccccagtggcggcctgcaaggctgtggccaccagtccgtccctggaagcgcctgcagccctgcatgtgttcccagaggtaactctggggtccagcctggaggaggtgccgtcccctgtgcgggatgtgcgatgggatgctgagggcatgacatgggaggtgtacggagctgcggtggacctggaggtgctcggtgtggccatccagaagcacctggagatgcagtttgagcagctgcagcgggcgcccgccagcgaggacagcctgtctgtggagggccggagggggccactgcgggctgtcatgcagtccctgcggcgccccagctgctgcggctgctccggcgcggcccccgagtgaggagctgtggcccttggagctggcctgggcccactgacttagtcctagacctgggccagggacggtgggggctccgtgccccctggacccaccggcagctgggcacatctctcacctgaatattggctgcctccagaccacaggactgcagcctggggcttccggccctacacagctgggctgttttcttaagggcttgatttccaagggccacatctctgcaccttccgggctctgaactttgagacagggctttagcactgtgcagaggggagatcctgagttttctgtaaaaaatgaccttttgttca

SEQ ID NO: 757 - protein, 458 aa, Homo sapiens
MSSSRPEPGPWAPLSPRLQPLSQSSSSLLGEGREQRPELRKTASSTVWQAQLGEASTRPQAPEEEGNPPESMKPARASGPKARPSAGGHWWSSTVGNVSTMGGSDLCRLRAPSAAAMQRSHSDLVRSTQMRGHSGARKASLSCSALGSSPVHRAQLQPGGTSGQGGQAPAGLERDLAPEDETSNSAWMLGASQLSVPPLDLGDTTAHSSSAQAEPKAAEQLATTTCHALPPAALLCGMREVRAGGCCHALPATGILAFPKLVASVSESGLQAQHGVKIHCRLSGGLPGHSHCCAHLWGPAGLVPEPGSRTKDVWTMTSANDLAPAEASPLSAQDAGVQAAPVAACKAVATSPSLEAPAALHVFPEVTLGSSLEEVPSPVRDVRWDAEGMTWEVYGAAVDLEVLGVAIQKHLEMQFEQLQRAPASEDSLSVEGRRGPLRAVMQSLRRPSCCGCSGAAPE

SEQ ID NO: 758 - DNA, 1956 bp, Homo sapiens
gggcacaggagtgcggccgggggcggggccgagtgggccccggtacgaaccctccgggaagccgggcgcgctgcctgcccttggcccggggcgcagagcgtcacactggatctggggagcatcctacccccactgtggacctcagtctcctcacctgagacatgggcggccccatccgcaccctgtaagccgcaagccaaggagattcctggcccccatcctggattcacttaactacatctcctggtggaagggccctgggatctgcactttcaacatgcttctagaatgattctgatgtttactgaaggttgagaactgcaaccctgtgggattaataatgactagagaatctgagaggcgtcatccctcaagtgtatcacttagttcaagagtcctggaatcttttcacatccactatgaacacctctcacctcctggccttgctgctcccaaaatctccacaaggtgaaaacagaagcaaacccctgggcaccccatacaacttctctgaacattgccaggattccgtggacgtgatggtcttcatcgtcacttcctacagcattgagactgtcgtgggggtcctgggtaacctctgcctgatgtgtgtgactgtgaggcagaaggagaaagccaacgtgaccaacctgcttatcgccaacctggccttctctgacttcctcatgtgcctcctctgccagccgctgaccgccgtctacaccatcatggactactggatctttggagagaccctctgcaagatgtcggccttcatccagtgcatgtcggtgacggtctccatcctctcgctcgtcctcgtggccctggagaggcatcagctcatcatcaacccaacaggctggaagcccagcatctcacaggcctacctggggattgtgctcatctgggtcattgcctgtgtcctctccctgcccttcctggccaacagcatcctggagaatgtcttccacaagaaccactccaaggctctggagttcctggcggataaggtggtctgtaccgagtcctggccactggctcaccaccgcaccatctacaccaccttcctgctcctcttccagtactgcctcccactgggcttcatcttggtctgttatgcacgcatctaccggcgcctgcagaggcaggggcgcgtgtttcacaagggcacctacagcttgcgagctgggcacatgaagcaggtcaatgtggtgctggtggtgatggtggtggcctttgccgtgctctggctgcctctgcatgtgttcaacagcctggaagactggcaccatgaggccatccccatctgccacgggaacctcatcttcttagtgtgccacttgcttgccatggcctccacctgcgtcaacccattcatctatggctttctcaacaccaacttcaagaaggagatcaaggccctggtgctgacttgccagcagagcgcccccctggaggagtcggagcatctgcccctgtccacagtacatacggaagtctccaaagggtccctgaggctaagtggcaggtccaatcccatttaaccaggtctaggtcttctccctgccatgtcccttgccaggctcttccacttagctaagtgggcacactgcaagctggggtggcaccccagcattcctggctttctggggtccagataggctggcaagagctgtttttgcatccatttgcatcgtgaagactggcattttgatacttcagctgtttgttcctgggagaattctgagcacagattccagaggtcacagtaagccttgcagcttgagctgaaagatgccagagccggagatgtctgctggcagcaggcagggttcattctggtgacacagcaacagatgcctggcctgggaacccagggatttcacctccaccagtgagaccacggggccactgtggggtgagggaaggagcgcttggagtcagagctctaga

SEQ ID NO: 759 - protein, 375 aa, Homo sapiens
MNTSHLLALLLPKSPQGENRSKPLGTPYNFSEHCQDSVDVMVFIVTSYSIETVVGVLGNLCLMCVTVRQKEKANVTNLLIANLAFSDFLMCLLCQPLTAVYTIMDYWIFGETLCKMSAFIQCMSVTVSILSLVLVALERHQLIINPTGWKPSISQAYLGIVLIWVIACVLSLPFLANSILENVFHKNHSKALEFLADKVVCTESWPLAHHRTIYTTFLLLFQYCLPLGFILVCYARIYRRLQRQGRVFHKGTYSLRAGHMKQVNVVLVVMVVAFAVLWLPLHVFNSLEDWHHEAIPICHGNLIFLVCHLLAMASTCVNPFIYGFLNTNFKKEIKALVLTCQQSAPLEESEHLPLSTVHTEVSKGSLRLSGRSNPI

SEQ ID NO: 760 - DNA, 362 bp, Homo sapiens
tcagcatcctagttcgccactgtctgctgccacacgatgctgggaggcctggggaagctggctgccgagggcctggcccaccgcaccgagaaggccaccgagggagccattcatgccgtggaggaagtggtgaaggaggtggtgggacatgccaaggagactggagagaaagccattgctgaagccataaagaaagcccaggagtcaggggacaaaaagatgaaggaaatcaccgagacagtgaccaacacagtcacaaatgccatcacccatgcagcagaaagtctggacaaacttggacagtgagtgcacctgctaccacggcccttccccagtctcaataaaaagccatgacatgtgta

SEQ ID NO: 761 - protein, 89 aa, Homo sapiens
MLGGLGKLAAEGLAHRTEKATEGAIHAVEEVVKEVVGHAKETGEKAIAEAIKKAQESGDKKMKEITETVTNTVTNAITHAAESLDKLGQ

SEQ ID NO: 762 - DNA, 3817 bp, Homo sapiens
gtgaacaggtttggtgccgcgggctggggttagagttacttgttattggtaaatagccactatggagactaaggaccagaagaaacacagaaagaaaaacggtggacccaaagctgcaaagaaaaagaagtggcatctgcaggatctccagctaggagactaagaaaatgcccagaagagaaatgccaatgcttttgcagttcagtctgctgtgtggatgtctcgatcctttcacaggactctggatttgaagacacaaaagcatcatattccagtggttgatggaactccactagagccgccaccaataccggtagtggtgacggggcctccaaagttggaaagagcactttgatataatgcctcattcggaacttcacctggcagaagttcaccgagatcagaggccctgtgacgatcgtgtcaggtaaaaagcgcagactcaccattattgaatgtgggtgtgacattaacatgatgattgatctggctaaagtagcagatctggtactgatgcttatagatgccagctttgggtttgaaatggaaatgtttgagtttctaaacatctgtcaagcacatggctttcctaaaattctgggagttctcacccacctcgactccttcaagcataacaagcaactgaagaagacaaagaagcgattaaaacacaggttctggacagaagtttaccaggttgccaaactgttctacctttctggaatggtgcatggagaatatcaaaaccaagaaatccacaatctgggccattttattacagttatgaagtttaggcctctcatggcaaacttttcacccttatatcctggcagacaggatggaagatttgacaaacccggaggatatccaaacaaacatcaaatgtgaccggcaggtgtcactttatggttatttaagaggagcacacttcaaagataaaagccaaattcacatgccaggacaaggtggggctcacccatgagctggtccagagtctcatctccacctactccaccattgatgccaagatggcttcaagtcgagtgacgctgctttccaattccaaaccacttgggtcagaggctatagataatcaaggggacgagttctcactatgttgcctaggctggtctcgaactcctgggctcaagcaatcctcccgacttggcctcccaaaatcctgggattacatatgtgagccactatgcctggcctgttattcctgtattctaacttatccatcccttatgtgtcagagatggctttggattccctgttctgtgtgctcctgtctggctcctgaacccagctggagaggtgtgtcaatcccaactggtgaagtactgagaggaagctacacaaaaggcagcaaggtactagtgagtggtgtcattgagcaaacacaaagtcgggctcatccaaggatgagattttgccagagaaaggatgagcagcaagtcagggagcttaagcgtcagcctcgagtttgaccagcagcaggggtcggtgtgtccctctgaatctgagatctatgaggcaggagctgaggacaggatggcaggagcgcccatggctgctgctgtacagcctgctgaggtgactgttgaagttggtgaggacctccacatgcaccaggttcgtgaccgggagatgcctgaagctttggagtttaacctttctgccaatccagaggcaagcacaatattccagaggaactctcaaacagatgctttggagtttaactcttctgccaatccagaggcaagcacaatattccagaggaactctcaaacagatgttgtagaaataagaagaagcaactgtacaaaccatgtatctactgagcgtttcagtcaacaatacagctcgtgttcgacaatattccttgatgacagcacagccatccagcattatcttacaatgacaataatatctgtgaccttggagatacctcatcatatcacacaaagagatgcagatagatctttgagcatacctgatgaacagttacactcatttgcggtttccaccgtgcacattatgaagaaaagaaatggaggtgggagtttaaataactattcctcctccattccaccgactcccagcaccagccaggaggaccctcagttcagtgttcctcccactgccaacacacccacccccgtttgcaagctgtccatgcgctggtccaacctgtttacatctgagaaagggagtgacccagacaaagagaggaaagccccggagaatcatgctgacaccatcgggagcggcagagccatccccattaaacagggcatgctcttaaagcgaagtggaaaatggctgaagacatggaaaaagaaatacgtcaccctgtgttccaatggcgtgctcacctattattcaagcttaggtgattatatgaagaatattcataaaaaagagattgaccttcggacatctaccatcaaagtcccaggaaagtggccatccctagccacatcagcctgtgcacccatctccagctctaaaagcaatggcctatccaaggacatggacaccgggctgggtgactccatatgcttcagccccggtatctccagcaccaccagccccaagctcaacccgcccccctctcctcatgccaataaaaagaaacacctaaagaagaaaagcaccaacaactttatgattgtgtctgccactggccaaacgtggcactttgaagccacgacgtatgaggagcgggatgcctgggtccaagccatccagagccagatcctggccagcctgcagtcatgcaagagcagtaaaagcaagtcccagctgaccagccagagtgaggccatggccctgcagtcgatccaaaacatgcgtgggaacgcccactgtgtggactgtgagacccagaatcctaagtgggccagtttgaacttgggagtcctcatgtgtattgaatgctcaggtatccaccgcagttttggcacccgcctttcccgtgtgcgatctctggagctggatgactggccagttgagctcaggaaggttatgtcatctattggcaatgagctagccaacagcatctgggaagggagcagccaggggcagacaaaaccctcaataaagtccacgagggaagagaaggaatggtggatccgttccaaatatgaggagaagctctttctggccccactaccctgcactgagctgtccctgggccagcagctgctgcgggccaccactgatgaggacctgcagacagccatcctgctgctggcacatggctcccgtgaggaggtgaacgagacctgtggggagggagacggctgcacggcactccatctggcctgccgcaaggggaatgtggtcctggagcagctcctgacggggtggacgtcatggcccgagatgcccacgggaacacagcgctgacctacgcccggcaggcctccagccaggagtgcatcaacgtgcttctgcagtacggctgccccgacgagtgcgtgtagtatctgttttatttgactgcagtctccttggtgcaaaaacaaaatgggaaaaataaggataactcagaatttcaaaaggaaatcacaaattcagctagtaatagcattttcagtacttttcgtaaactaagtaaatacacaaaatgttgatttttctgaccataagacatattttatgtccttttgccaaggtggatgtgttagtctcaggccctcctggccacattgcccaagtcacacaggcttctgtattatgtatttagataaaatgtgtgaaaatatatttgaaaaaaaatttcataaatgtgcattgatttttgtacaca

SEQ ID NO: 763 - DNA, 2136 bp, Homo sapiens
ttaaatttcatttatttctttatgaagacatgatgtatttgttcactgaacaagggtagaaactgcttaaccatccccaatttcatttctctctgttatgctataaattagatgagttacctctgctaaggttacattctatggttaagttactttttattcatctcaagtgtcaacatcaccagtacctatttctgcaaggatggaaatattctatatctgtacttttcagccatttagccattagccacatgtggttacttaaaatgtacttcagagaaactgaaaaaatgaattcttaattaatttcattctaactctaaatagtcacatgtggctaccatactggacagctcagacctagacatcgactggactaacgaagtggtttcctaacttaaaccagaacttaaatttcaataaaaaatttaaaacgtttttatgaacttccaataggatcgcagtattacttttagtacctgttgactctaaaacttctaaattacagctcatctacatacatttgaaaaatagcaatatctgtatgtgtgagatatgactggttttagatgatgcctggagaccccatggacttacagagacccttccagtgatttctgaggtacctgggaatctgtggccaataaattggtagtcactgaatctgtgagtttttttggaatatcgggctgcataaaatctgacagcttgattgagaaaaagcggggcagggtaccatttcattcagttaaggtcctgtattcattccgtttaataaatgtttgtgtctgtctatgatgtgctagccactgtgccagaaaatggatatagctatggtctgattggcagaggaaatccaaactagtatcttccgtgccatgcaataagggctacattgcaaggctgcagagggtgctactggagcacagaagtgagtcagaggcttctcacagacacacacacgagcggaaacagaaagtctttatatatcaccatatgtcaaggaacactggccgggagttaggagagctgggcactaggaacgctttgaaactgaatagctgtgtgatttcagaggttatattgcttctctactatattttactgccgaacttgtactgtttctctcccttttcttcttggtgggaaaagcacaatttggggtcaacagattcggctcaggtctaagtcgcctgccgggaccacgtcgccaggaaacgacgtctccccgacaccttccctcccagtccgggctctctgcagggattcatcccgtcactctcccaacgacccccgggcacacctcaggcagatgcgaaatatgccgctcctcgggagcaaagatgacccggaggaccgggggaggaccttcccatgcgcacgactcgcgatcttcccagtgccccagagccacggacccaaccgccgcctaccccagcccgcggcaccaaacctgttcacaactgcgactccttaggtccgcttggacaccgccggaaacggaaattcaccctcgcgccgactcgccggagggaaacaaaaaggcagaaaaaaagggaccgccgcctggatgactttcaggggacagctggaagaaagactcgtcaacggccgagtgctggcgccggcgccgtctgcgcagtgcgttccaccgggtccgcgtccctcccgattcagccccaccccgccctcggaatccgctgcctcagctcctgctgtggcactccccagcagcttgcacctcgctcgcggagtccttgctgaaggccagggcagctgtgcggcctggcgcgggttacttgatgccgtgcaaaagccaggagacacatttggttctggccgccccggagtcaccgtgcccggggcgaatggactatggctggattgggagtccacttcctcctctgtaaagatgacagacgagggagatctcgcgttctgggggtgccctatagccctcttttggccagaagcggtggatcacgcctgtaatcccagccttttgggaggccgaggcaggaggattgcttgagcccaggagttcaagaccaatctgggcaacatagggaggctacatctctcaaaaaataaataaataaataaataaataaataaataaataaataaataaataaa

SEQ ID NO: 764 - DNA, 2061 bp, Homo sapiens
tttttttacgggagggagctaattggattttaagtctagatctttgttttcaattcctcaacatattctataaataagaccaaattatagtagaaggagagtaaataagctattatctttttaaagtggtgaagagcactgattaaatatatattagagccccagcccccgccccagctgcgcgggcccccgcctggcccatggactgcacagccgagcgggcgccttgagcgcggtgcgggtcctcggagcacccccgaggtgagcgcaagcaaggtccggcatcatgtgctaggttattcccagtgcgaggccacacttgggccgtcggagcagcccctcctcacttcaggggtcaccctccccaagacccattgccccatcatggccggggaccggctccccaggaaggtgatggacgccaagaagctggccagcctgctgcggggcgggcctgggggggcctggtcatcgacagtcactccttcctggagtacaacagctggcatgtgctcagctccgtcaacatctgctgctccaagctggtgaagtggcggttgcagaagggcaaggtgaccattgtggagttcatccagccggccgcacgcagccaggtggaggccactgagccacaggacgtggtggtctatgaccagagcacgcggccgcagacagcttcctctccatcctgctgagcaagctggatggctgcttccacagcgtggccggctgcttccacagcatggccatcatcacggggggcttcgccaccttctcctcctgcttccccgacctctgcgagggcgagcctgctgccctgctacccatgagcctctcccagtcctgcctgctcgtgcccagcgtgggcctgaccctcatcctgcctcacctctacctgggctcgcaggaagacgtcctgaacaaggatctgatgacgcagaatggaataagctacgtcctctatgccagcaactcctgccccaagcctgacttcatctaccagagccacttcttgcgggtccccatcaacgacaactactgtgaaaagctgctgccctggctggacaagtccatcgagttcgtcgataaagccaagctgtccagctgccaagtcatcgtccaccgtctggccggcatctcctgctgtgccactatcgccatcgcctacatcatgaagaccatgggcatgtcctccgaagacgcctacaggtttgtgaaggaccagcgcccgtccatctcgcccaacttcaacttcctgggccagctgctggaggaccagagcagcccgaagctgctggccgccgtgcagggcgacgcgggcaccccctcaggaatgcaggagcctccccccagccctgcggccggggccccactgccatggctgccaccacctacctcagagaccgctgccaccaggagtgcggctgccagggagggcggcccgagcgcgggcaggaagcccccggcgccccccacggccaccagcacgctgcagcagggcctgcgcagcctgcgcctctcctcggaccacctgcaggacaccagccgcctcaagccctccttctctctggacatcaagtcggcctacgcccccagcaggcggcccggcggcccgggcccagcgaccccggcgaggccccgaagctctctgaaagctggacagccagtcggggccattacgcggctgccgggccctggccagccggccagccccggagcctggacgccaccgctcgactccctgaagcgtcctcggtgcttcagccccgagggcgtgcaagggccgggcagggtgctgtttgcgcccttcggccgggcgggcgccccggaacccaacggctgcagcgacctgccacggcgggaggcagcaagggctgagcccgggacgcgcggaccagctggtcagacgagctggccccggattcgcacttcaagtgctgcagctgccagatggagttcgaggagggcatggtggaggggcgcgcgcgcggcgaggagctggccgccctgggcaagcaggggagcttctcgggcagcgtggaggtcatcgagatgtcctga

SEQ ID NO: 765 - DNA, 3497 bp, Homo sapiens
atgagtggaggatctcaagtccacattttttggggtgctccagttgctccactgaaaatgacagtatcagaagacacagcttctttaatgtctgttgctgacccctggaaaaaaattcagcttttatacagtcaacattctttatatctgaaggatgaaaaacagcacaaaaatcttgaaaactatgaagtcccagattctattggttctccagatctttgtggtcatttcttagcaaactgtatgaatagacatgttcatgtgaaagatgactttgtacgttctgtttctgaaacacagaatatagaatcccagaagattcactcctctagactgagtggcataactagctctaatatgcaaatatgtggatttaaaagcacagttccgcatttaaccgaagaagaaaagtatcaaagcttctcagtgaaaataaaattagagatgaacagcctaaacatcagccagatatatgtggtcagaactttaacacaaatttgtttcagttgggccataaatgtgcagctgtgttggatttggtttgtagtactgaaaaaattaatatagggcctgaagtggtacaaagagagtgtgtgccaacagaatatcatgaaatacaaaaccagcgtttgggattattttcctcgaactcagtagataagtcaaggtctgaagcagcagttaagaaggtctcagaccttaaaatatcaactgataaagaatttctcagtataattacctccagccaggttgctttttttagctcaaaagaaagataaaaggcggagtcctgtaaataaagggaatgtaaacatggagactgaaccaaaggcaagttacggggagataagaatacctgaagagaattcgattcagcttgatggttttacagaagcatatgaaagtggacaaaaccaagcatattcccttgaactttttagtcctgtttgtcctaaaacagaaaatagccgcattcacataaactctgataaaggtcttgaagaacatacaggatctcaagaacttttcagttctgaagatgaactgccaccaaatgagatacgtattgagttgtgtagctcaggaatactgtgttcccaactaaataccttccacaaaagtgctattaaaagaagctgtacctctgaagataaagtggcccagtctgaagctctatctagagtccttcaagtagctaagaaaatgaagttgatttctaatggaggagattctgctgtagaaatggatcggagaaatgtgtctgaatttaagagtattaaaaaaatcattaataaaaaactgtgattctaaaagccagaagtataattgtttagtcatggtgctatctccatgccatgtgaaggaaataaacataaaattcggaccaaattctggctctaaagtgcctttagcaacagttacagtaagtgatcaatcagaaactaagaagaaggtttttctgtggaggactgcagcattttgggcatttacagtgtttcttggagatataattttactcacggatgttgttattcatgaggaccaatggattggtgagacagtactacaatcaacatttagcagtcagttattaaatcttgggagttattcatctattcagcctgaagaatattccagtgtagttagtgacgttgtacttcaagacttactggcatatgtgtcctcaaaacattcctacctcagagatcttcctccgagacagcctcagagggtgaacagtatagactttgtagaattggagcaccttcaacctgatgtgttagtccacgcagtactaagagttgttgatttcctatactgacaggcagtatacagttatagaggacagaagcagaaaaaagttatgttaacagtggaacaggcccaagatcaacattatgcgcttgtattatggggtcctggagcagcctggtaccctcaacttcaaaggaaaaaaggttatatttgggaatttaaatatctttttgttcagcgcaattacacactagaaaacctagaattgcatacaacgccttggtcatcctgtgagtgcttgtttgatgatgatataagggcaattacatttaaagcaaaatttcaaaaaagtgcaccctcctttgtgaagatatcagacttagcaacccacctagaggataagtgttcaggagtggttctaattaaagcccagatttcagagctggcatttcctcttacagcagctcagaagatatctctaaatgctcacagttctctgaagagtattttttcttctcttcccaacatcatatatactggctgtgcaaaatgtggattggaactagaaacagatgagaacaggatctacaaacaatgttttagctgcttgccatttactatgaagaaaatatattataggccagcgttaatgactgccgttgatggaagacataatgtttacatccatgtagaatcaaagctgatagagaagattcttctcaacatttctgcagactgcctcaacagagtgatagttccttcctcagagatcacctatgggatggttgtggcagacctgttccactccttgttggcagtcagcgcagaaccttgtgtattgaagattcagagcctttttgtgttagatgaaaacagctatccattacaacaagatttctccctcctggatttttatcctgacatggtaaagcatggagccaatgcccgtctctgaggccagaggaagaaattgcaggcatttcaaggaagaagtactgaaatgatttgtcttttgaaataaatgaatgacagggcttttgctttggattttttatgaaatatattttacaaagagaattgcactagatatataaattaaaacttttttctaagaaaatcctgtgaggtttaaaaagattgtttttgtcttttggtttcttcctttcttctggagaaatgatctaccagtcaaggcaatatgtagcagatccctgggaattaaaggtttgcccatttgttcactgtatttagtccctgctacattccaggcatcgtactaagtatggggaaccacagagaagacactccttcagaaactgctgcagtgctttcgcttatccctacctaaaaaaccgtcaatgtgaaatcatttccttgattataactataatgataatggattagtttatataaacctatgtttagacaagttcaagacaagcgtgtctttctataaaaagtattgaaagtgaaggaaatgagatcatgtttcaatttattaaagcagggaagagcgttctgtggttagttcgtgtctaggatttgagtgccttactgaatgtatttaccagcaaacatgtagcaatctgttctctcattgtgattgtggaagaagctcatgtaaaatgatagtcattaatgaggaagtatggcgtggtacttattctgtaagttcagagtatgctgagtgttaatagattgtcatattgcctgaaaataaattcatgatgacatgaacaagc

SEQ ID NO: 766 - DNA, 1074 bp, Homo sapiens
gcggccgccgccgatcacagcagcaggagccgccgccgccgcggttgatgtggttgggccggggctgaggaggccgccaagatgccgcagtcaaagtcccggaagatcgcgatcctgggctaccggtctgtggggaaatcctcattgacgattcaatttgttgaaggccaatttgtggactcctacgatccaaccatagaaaacacttttacaaagttgatcacagtaaatggacaagaatatcatctttaacttgtagacacagccgggcaagatgaatattctatctttcctcagacatactccatagatattaatggctatattcttgtgtattctgttacatcaatcaaaagttttgaagtgattaaagttatccatggcaaattgttggatatggtggggaaagtacaaatacctattatgttggttggaaataagaaagacctgcatatggaaagggtgatcagttatgaagaagggaaagctttggcagaatcttggaatgcagcttttttggaatcttctgctaaagaaaatcagactgctgttgatgtttttcgaaggatgattttggaggcagaaaaaatggacgggggcagcttcacaaggcaagtcttcatgctcggtgatgtgattctgctgcaaagcccgaggacactgggaatatattctagctgaagaagcaaactgcccgttctccttgaagataaactatgcttcttttttcttctgttaacctgaaagatatcatttgggtcagagctcccctcccttcagattatgttaactctgagtctgtccaaatgagttcacttccattttcaaattttaagcaatcatattttcaatttatatattgtgtttcttaatattatgaccaagaattttatcggcattaatttttcagtgtagtttgttgtttaaaataatgtaatcatcaaaatgatgcatattgttacactactattaactaggcttcaatatatcagtgtttatttcattgtgttaaatgtatacttgtaaataaaatagctgcaaacctcaaaaaaacaaaaaaaaacaaaaaaaaga

SEQ ID NO: 767 - DNA, 1632 bp, Homo sapiens
atgagcagggggtcactgccccagaaccatgagggcacccacatggtctaccctggctcctcactcatcagaggaaatgacgagattccaaggtcccctccggtattgcaagctggcctgagccatagggtcctgtcccagcatggcatcaaatgcctggagctcatcctgcaggagcagccatggcggagcccccagggttgggtcaaagtcttgtgtccagaagccccctggtcggcagtcctcttggcttcccctatcacccagtgtccagcctgcatgggcccttcagtcccaggggccatgaccaaggcccagtccccttcacctgtctccatcataagcgtcaccagcctgtctgacaaactgcccagcaaagttattgacattggcctggccgcctggggatgcaaggccctgaacattgtagagaatgagatgccaggcctgatgcacatgtgggagctgtactcggcctccaagccactagagggcaaccacagtgccagctgcctgcacatgaccatggagatggccatccacattgggtccctcatcaccctgggtgccccagcagcaacatcttcctcaccctggaccatgtgttggctgccattgccaaggctggcattccagtttacacctggaagggcaaaagaacgcagagtacccatggtgcatcgagcagtcactgtaattcagggatgggctctcaacattattctggaggatgggggtgaccttgccaacctcttccacaccaagtactcacagctcttgctgggcatctgaggcacctccaaggagaccatgacgggtccacaacccacacaggatgatggtcaatgggatcctgaaggtgcctgccatcaatgtcaatgactccctcaccaagagtgagttcaacaagctctatggctgctgggagtccctcatagatggcatcaagtgggccacagtggtgatgattgccggcaaggtagcgatggtagcaggctatggcaatgtgggcaagggctgtgcccaggccctgtggggtttcggggcccacgtcatcatcaccaagatcgaccccatcaatgcactgcaggctgccatggagggctatgaggtgaccaccatggatgaagcctgtcaggagggcaacatctttatcaccaccacagcctgtgtcaacatcatccttggccggcactttgaacagatgaaggatgatgccattgtatgtaacactggacactttgaggtggagatcaatgtcaagtggctcagtgagaacccttggagaaggtggccatcaagccccaggtggccgggtactggatgaagaatgggcgccacaccatcctgctggctgagggtcggctggtcagcctgggttgtgccatgggccaccctggctttgtgatgagtgactcatcaaccaggtgactgcacagaatgagctgtgaatccacccagagaagtaccccattgaggttcatgtcctacccaagaagctggatgaggcagtggctgaagcccacctgggcaagctgatcatgaaattgaccaagctgactgagaaacaggcccagtacctggggcatctcccctgattgccccttcaaggctgatcactaccgctactga

SEQ ID NO: 768 - DNA, 9601 bp, Homo sapiens
agacactgctgctccggggggctgacctggcggggagtggccgcgcagtctgctccggcgccgctttgtgcgcgcagccgctggcccctctactcccgggtctgccccccgggacacccctctgcctcgcccaagtcatgcagccctacctgcctctccactgtggacctttgggaaccgactcctcacctcgggggctcgggccttgactgtgctgggagccggtaggcgtcctccgcgacccgcccgcgcccctcgcgcccgccggggccccgggctccaaagttgtggggaccggcgcgagttggaaagtttgcccgagggctggtgcaggcttggagctgggggccgtgcgctgccctgggaatgtgacccggccagcgaccaaaaccttgtgtgactgagctgaagagcagtgcatccagattctcctcagaagtgagactttccaaaggaccaatgactctgtttcctgcgccctttcattttttcctactctgtagctatgtctcgatcccgccatgcaaggccttccagattagtcaggaaggaagatgtaaacaaaaaaaagaaaaacagccaactacgaaagacaaccaagggagccaacaaaaatgtggcatcagtcaagactttaagccctggaaaattaaagcaattaattcaagaaagagatgttaagaaaaaaacagaacctaaaccacccgtgccagtcagaagccttctgacaagagctggagcagcacgcatgaatttggataggactgaggttctttttcagaacccagagtccttaacctgcaatgggtttacaatggcgctacgaagcacctctcttagcaggcgactctcccaacccccactggtcgtagccaaatccaaaaaggttccactttctaagggtttagaaaagcaacatgattgtgattataagatactccctgctttgggagtaaagcactcagaaaatgattcggttccaatgcaagacacccaagtccttcctgatatagagactctaattggtgtacaaaatccctctttacttaaaggtaagagccaagagacaactcagttttggtcccaaagagttgaggattccaagatcaatatccctacccacagtggccctgcagctgagatccttcctgggccactggaagggacacgctgtggtgaaggactattctctgaagagacattgaatgataccagtggttccccaaaaatgtttgctcaggacacagtgtgtgctccttttccccaaagagcaacccccaaagttacctctcaaggaaaccccagcattcagttagaagagttgggttcacgagtagaatctcttaagttatctgattcttacctggatcccattaaaagtgaacatgattgctaccccacctccagtcttaataaggttatacctgacttgaaccttagaaactgcttggctcttggtgggtctacgtctcctacctctgtaataaaattcctcttggcaggctcaaaacaagcgacccttggtgctaaaccagatcatcaagaggccttcgaagctactgcaaatcaacaggaagtttctgataccacctctttcctaggacaggcctttggtgctatcccacatcaatgggaacttcctggtgctgacccagttcatggtgaggccctgggtgagaccccagatctaccagagattcctggtgctattccagtccaaggagaggtctttggtactattttagaccaacaagaaactcttggtatgagtgggagtgttgtcccagacttgcctgtcttccttcctgttcctccaaatccaattgctacctttaatgctccttccaaatggcctgagccccaaagcactgtctcatatggacttgcagtccagggtgctatacagattttgcctttgggctcaggacacactcctcaatcatcatcaaactcagagaaaaattcattacctccagtaatggctataagcaatgtagaaaatgagaagcaggttcatataagcttcctgccagctaacactcaggggttcccattagcccctgagagaggactcttccatgcttcactgggtatagcccaactctctcaggctggtcctagcaaatcagacagagggagctcccaggtcagtgtaaccagcacagttcatgttgtcaacaccacagtggtgactatgccagtgccaatggtcagtacctcctcttcttcctataccactttgctaccgactttggaaaagaagaaaagaaagcgatgtggggtctgtgaaccctgccagcagaagaccaactgtggtgaatgcacttactgcaagaacagaaagaacagccatcagatctgtaagaaaagaaaatgtgaggagctgaaaaagaaaccatctgttgttgtgcctctggaggttataaaggaaaacaagaggccccagagggaaaagaagcccaaagttttaaaggcagattttgacaacaaaccagtaaatggccccaagtcagaatccatggactacagtagatgtggtcatggggaagaacaaaaattggaattgaacccacatactgttgaaaatgtaactaaaaatgaagacagcatgacaggcatcgaggtggagaagtggacacaaaacaagaaatcacagttaactgatcacgtgaaaggagattttagtgctaatgtcccagaagctgaaaaatcgaaaaactctgaagttgacaagaaacgaaccaaatctccaaaattgtttgtacaaaccgtaagaaatggcattaaacatgtacactgtttaccagctgaaacaaatgtttcatttaaaaaattcaatattgaagaattcggcaagacattggaaaacaattcttataaattcctaaaagacactgcaaaccataaaaacgctatgagctctgttgctactgatatgagttgtgatcatctcaaggggagaagtaacgttttagtattccagcagcctggctttaactgcagttccattccacattcttcacactccatcataaatcatcatgctagtatacacaatgaaggtgatcaaccaaaaactcctgagaatataccaagtaaagaaccaaaagatggatctcccgttcaaccaagtctcttatcgttaatgaaagataggagattaacattggagcaagtggtagccatagaggccctgactcaactctcagaagccccatcagagaattcctccccatcaaagtcagagaaggatgaggaatcagagcagagaacagccagtttgcttaatagctgcaaagctatcctctacactgtaagaaaagacctccaagacccaaacttacagggagagccaccaaaacttaatcactgtccatctttggaaaaacaaagttcatgcaacacggtggttttcaatgggcaaactactaccctttccaactcacatatcaactcagctactaaccaagcatccacaaagtcacatgaatattcaaaagtcacaaattcattatctctttttataccaaaatcaaattcatccaagattgacaccaataaaagtattgctcaagggataattactcttgacaattgttccaatgatttgcatcagttgccaccaagaaataatgaagtggagtattgcaaccagttactggacagcagcaaaaaattggactcagatgatctatcatgtcaggatgcaacccatacccaaattgaggaagatgttgcaacacagttgacacaacttgcttcgataattaagatcaattatataaaaccagaggacaaaaaagttgaaagtacaccaacaagccttgtcacatgtaatgtacagcaaaaatacaatcaggagaagggcacaatacaacagaaaccaccttcaagtgtacacaataatcatggttcatcattaacaaaacaaaagaacccaacccagaaaaagacaaaatccaccccatcaagagatcggcggaaaaagaagcccacagttgtaagttatcaagaaaatgatcggcagaagtgggaaaagttgtcctatatgtatggcacaatatgcgacatttggatagcatcgaaatttcaaaattttgggcaattttgtccacatgattttcctactgtatttgggaaaatttcttcctcgaccaaaatatggaaaccactggctcaaacgaggtccattatgcaacccaaaacagtatttccaccactcactcagataaaattacagagatatcctgaatcagcagaggaaaaggtgaaggttgaaccattggattcactcagcttatttcatcttaaaacggaatccaacgggaaggcattcactgataaagcttataattctcaggtacagttaacggtgaatgccaatcagaaagcccatcctttgacccagccctcctctccacctaaccagtgtgctaacgtgatggcaggcgatgaccaaatacggtttcagcaggttgttaaggagcaactcatgcatcagagactgccaacattgcctggtatctctcatgaaacacccttaccggagtcagcactaactctcaggaatgtaaatgtagtgtgttcaggtggaattacagtggtttctaccaaaagtgaagaggaagtctgttcatccagttttggaacatcagaattttccacagtggacagtgcacagaaaaattttaatgattatgccatgaacttctttactaaccctacaaaaaacctagtgtctataactaaagattctgaactgcccacctgcagctgtcttgatcgagttatacaaaaagacaaaggcccatattatacacaccttggggcaggaccaagtgttgctgctgtcagggaaatcatggagaataggtatggtcaaaaaggaaacgcaataaggatagaaatagtagtgtacaccggtaaagaagggaaaagctctcatgggtgtccaattgctaagtgggttttaagaagaagcagtgatgaagaaaaagttctttgtttggtccggcagcgtacaggccaccactgtccaactgctgtgatggtggtgctcatcatggtgtgggatggcatccctcttccaatggccgaccggctatacacagagctcacagagaatctaaagtcatacaatgggcaccctaccgacagaagatgcaccctcaatgaaaatcgtacctgtacatgtcaaggaattgatccagagacttgtggagcttcattctcttttggctgttcatggagtatgtactttaatggctgtaagtttggtagaagcccaagccccagaagatttagaattgatccaagctctcccttacatgaaaaaaaccttgaagataacttacagagtttggctacacgattagctccaatttataagcagtatgctccagtagcttaccaaaatcaggtggaatatgaaaatgttgcccgagaatgtcggcttggcagcaaggaaggtcgtcccttctctggggtcactgcttgcctggacttctgtgctcatccccacagggacattcacaacatgaataatggaagcactgtggtttgtaccttaactcgagaagataaccgctctttgggtgttattcctcaagatgagcagctccatgtgctacctctttataagctttcagacacagatgagtttggctccaaggaaggaatggaagccaagatcaaatctggggccatcgaggtcctggcaccccgccgcaaaaaaagaacgtgtttcactcagcctgttccccgttctggaaagaagagggctgcgatgatgacagaggttcttgcacataagataagggcagtggaaaagaaacctattccccgaatcaagcggaagaataactcaacaacaacaaacaacagtaagccttcgtcactgccaaccttagggagtaacactgagaccgtgcaacctgaagtaaaaagtgaaaccgaaccccattttatcttaaaaagttcagacaacactaaaacttattcgctgatgccatccgctcctcacccagtgaaagaggcatctccaggcttctcctggtccccgaagactgcttcagccacaccagctccactgaagaatgacgcaacagcctcatgcgggttttcagaaagaagcagcactccccactgtacgatgccttcgggaagactcagtggtgccaatgcagctgctgctgatggccctggcatttcacagcttggcgaagtggctcctctccccaccctgtctgctcctgtgatggagcccctcattaattctgagccttccactggtgtgactgagccgctaacgcctcatcagccaaaccaccagccctccttcctcacctctcctcaagaccttgcctcttctccaatggaagaagatgagcagcattctgaagcagatgagcctccatcagacgaacccctatctgatgaccccctgtcacctgctgaggagaaattgccccacattgatgagtattggtcagacagtgagcacatctttttggatgcaaatattggtggggtggccatcgcacctgctcacggctcggttttgattgagtgtgcccggcgagagctgcacgctaccactcctgttgagcaccccaaccgtaatcatccaacccgcctctcccttgtcttttaccagcacaaaaacctaaataagccccaacatggttttgaactaaacaagattaagtttgaggctaaagaagctaagaataagaaaatgaaggcctcagagcaaaaagaccaggcagctaatgaaggtccagaacagtcctctgaagtaaatgaattgaaccaaattccttctcataaagcattaacattaacccatgacaatgttgtcaccgtgtccccttatgctctcacacacgttgcggggccctataaccattgggtctgaaggcttttctccccctcttaatgcctttgctagtgcagtgtattttttcaaggtgctgttaaaagaaagtcatgttgtcgtttactatcttcatctcacccatttcaagtctgaggtaaaaaaataataatgataacaaaacggggtgggtattcttaactgtgactatattttgacaattggtagaaggtgcacattttaagcaaaaataaaagttttatagttttaaatacataaagaaatgtttcagttaggcattaaccttgatagaatcactcagtttggtgctttaaattaagtctgtttactatgaaacaagagtcatttttagaggattttaacaggttcatgttctatgatgtaaaatcaagacacacagtgttaactctacacagcttctggtgcttaaccacatccacacagttaaaaataagctgaattattatttcatggtgccattgttccaacatcttccaatcattgctagaaaattggcatattcctttgaaataaacttatgaaatgttttctctcttaaaatatttctcctgtgtaaaataaatcattgttgttagtaatggttggaggctgttcataaattgtaaatatatattttaaaagcactttctatttttaaaagtaacttgaaataatatagtataagaatcctattgtctattgtttgtgcatatttgcatacaagagaaatcatttatccttgctgtgtagagttccatcttgttaactgcagtatgtattctaatcatgtatatggtttgtgttcttttactgtgtcctctcacattcaagtattagcaacttgcagtatataaaatagttagataatgagaagttgttaattatctctaaaattggaattaggaagcatatcaccaatactgattaacattctctttggaactaggtaagagtggtctcttcttattgaacaacctcaatttagtttcatcccacctttctcagtataatccatgagaggtgtttccaaaaggagatgagggaacaggataggtttcagaagagtcaaatgcttctaatgtctcaaggtgataaaatacaaaaactaagtagacagatatttgtactgaagtctgatacagaattagaaaaaaaaaattcttgttgaaatattttgaaaacaaattccctactatcatcacatgcctccccaaccccaagtcaaaaacaagaggaatggtactacaaacatggctttgtccattaagagctaattcatttgtttatcttagcatactagatttgggaaaatgataactcatcttttctgataattgcctatgttctaggtaacaggaaaacaggcattaagtttattttagtcttcccattttcttcctattactttattgactcattttattgcaaaacaaaaaggattacccaaacaacatgtttcgaacaaggagaattttcaatgaaatacttgattctgttaaaatgcagaggtgctataacattcaaagtgtcagattccttgggagtatggaaaacctaatggtgcttctcccttggaaatgccataggaagcccacaaccgctaacacttacaattttggtgcaaaagcaaacagttccagcaggctctctaaagaaaaactcattgtaacttattaaaataatatctggtgcaaagtatctgttttgagcttttgactaatccaagtaaaggaatatgaagggattgtaaaaaacaaaatgtccattgatagaccatcgtgtacaagtagatttctgcttgttgaatatgtaaaatagggtaattcattgacttgttttagtattttgtgtgccttagatttccgttttaagacatgtatatttttgtgagcctaaggtttcttatatacatataagtatataaataagtgattgtttattgcttcagctgcttcaacaagatatttactagtattagactatcaggaatacacccttgcgagattatgttttagattttaggccttagctcccactagaaattatttcttcaccagatttaatggataaagttttatggctctttatgcatccactcatctactcattcttcgagtctacacttattgaatgcctgcaaaatctaagtatcacttttatttttctttggatcaccacctatgacatagtaaacttgaagaataaaaactaccctcagaaatatttttaaaagaagtagcaaattatcttcagtataatccatggtaatgtatgcagtaattcaaattgatctctctctcaataggtttcttaacaatctaaacttgaaacatcaatgttaatttttggaactattgggatttgtgacgcttgttgcagtttaccaaaacaagtatttgaaaatatatagtatcaactgaaatgtttccattccgttgttgtagttaacatcatgaatggacttcttaagctgattaccccactgtgggaaccaaattggattcctactttgttggactctctttcctgattttaacaatttaccatcccattctctgccctgtgattttttttaaaagcttattcaatgttctgcagcattgtgattgtatgctggctacactgcttttagaatgctctttctcatgaagcaaggaaataaatttgtttgaaatgacattttctctcaaaaaaaaaaaaaaaaaa

SEQ ID NO: 769 - protein, 2136 aa, Homo sapiens
MSRSRHARPSRLVRKEDVNKKKKNSQLRKTTKGANKNVASVKTLSPGKLKQLIQERDVKKKTEPKPPVPVRSLLTRAGAARMNLDRTEVLFQNPESLTCNGFTMALRSTSLSRRLSQPPLVVAKSKKVPLSKGLEKQHDCDYKILPALGVKHSENDSVPMQDTQVLPDIETLIGVQNPSLLKGKSQETTQFWSQRVEDSKINIPTHSGPAAEILPGPLEGTRCGEGLFSEETLNDTSGSPKMFAQDTVCAPFPQRATPKVTSQGNPSIQLEELGSRVESLKLSDSYLDPIKSEHDCYPTSSLNKVIPDLNLRNCLALGGSTSPTSVIKFLLAGSKQATLGAKPDHQEAFEATANQQEVSDTTSFLGQAFGAIPHQWELPGADPVHGEALGETPDLPEIPGAIPVQGEVFGTILDQQETLGMSGSVVPDLPVFLPVPPNPIATFNAPSKWPEPQSTVSYGLAVQGAIQILPLGSGHTPQSSSNSEKNSLPPVMAISNVENEKQVHISFLPANTQGFPLAPERGLFHASLGIAQLSQAGPSKSDRGSSQVSVTSTVHVVNTTVVTMPVPMVSTSSSSYTTLLPTLEKKKRKRCGVCEPCQQKTNCGECTYCKNRKNSHQICKKRKCEELKKKPSVVVPLEVIKENKRPQREKKPKVLKADFDNKPVNGPKSESMDYSRCGHGEEQKLELNPHTVENVTKNEDSMTGIEVEKWTQNKKSQLTDHVKGDFSANVPEAEKSKNSEVDKKRTKSPKLFVQTVRNGIKHVHCLPAETNVSFKKFNIEEFGKTLENNSYKFLKDTANHKNAMSSVATDMSCDHLKGRSNVLVFQQPGFNCSSIPHSSHSIINHHASIHNEGDQPKTPENIPSKEPKDGSPVQPSLLSLMKDRRLTLEQVVAIEALTQLSEAPSENSSPSKSEKDEESEQRTASLLNSCKAILYTVRKDLQDPNLQGEPPKLNHCPSLEKQSSCNTVVFNGQTTTLSNSHINSATNQASTKSHEYSKVTNSLSLFIPKSNSSKIDTNKSIAQGIITLDNCSNDLHQLPPRNNEVEYCNQLLDSSKKLDSDDLSCQDATHTQIEEDVATQLTQLASIIKINYIKPEDKKVESTPTSLVTCNVQQKYNQEKGTIQQKPPSSVHNNHGSSLTKQKNPTQKKTKSTPSRDRRKKKPTVVSYQENDRQKWEKLSYMYGTICDIWIASKFQNFGQFCPHDFPTVFGKISSSTKIWKPLAQTRSIMQPKTVFPPLTQIKLQRYPESAEEKVKVEPLDSLSLFHLKTESNGKAFTDKAYNSQVQLTVNANQKAHPLTQPSSPPNQCANVMAGDDQIRFQQVVKEQLMHQRLPTLPGISHETPLPESALTLRNVNVVCSGGITVVSTKSEEEVCSSSFGTSEFSTVDSAQKNFNDYAMNFFTNPTKNLVSITKDSELPTCSCLDRVIQKDKGPYYTHLGAGPSVAAVREIMENRYGQKGNAIRIEIVVYTGKEGKSSHGCPIAKWVLRRSSDEEKVLCLVRQRTGHHCPTAVMVVLIMVWDGIPLPMADRLYTELTENLKSYNGHPTDRRCTLNENRTCTCQGIDPETCGASFSFGCSWSMYFNGCKFGRSPSPRRFRIDPSSPLHEKNLEDNLQSLATRLAPIYKQYAPVAYQNQVEYENVARECRLGSKEGRPFSGVTACLDFCAHPHRDIHNMNNGSTVVCTLTREDNRSLGVIPQDEQLHVLPLYKLSDTDEFGSKEGMEAKIKSGAIEVLAPRRKKRTCFTQPVPRSGKKRAAMMTEVLAHKIRAVEKKPIPRIKRKNNSTTTNNSKPSSLPTLGSNTETVQPEVKSETEPHFILKSSDNTKTYSLMPSAPHPVKEASPGFSWSPKTASATPAPLKNDATASCGFSERSSTPHCTMPSGRLSGANAAAADGPGISQLGEVAPLPTLSAPVMEPLINSEPSTGVTEPLTPHQPNHQPSFLTSPQDLASSPMEEDEQHSEADEPPSDEPLSDDPLSPAEEKLPHIDEYWSDSEHIFLDANIGGVAIAPAHGSVLIECARRELHATTPVEHPNRNHPTRLSLVFYQHKNLNKPQHGFELNKIKFEAKEAKNKKMKASEQKDQAANEGPEQSSEVNELNQIPSHKALTLTHDNVVTVSPYALTHVAGPYNHWV

SEQ ID NO: 770 - DNA, 3858 bp, Homo sapiens
gaagttggcgcatgcgcctaaagctgacgggtttgaaatggcttcgatgttagccgggacccgactcagatcgatgctatagaagacaaacaagggaaggttttttttccttttgcatcatggctcaatttggaggacagaagaatccgccatgggctactcagtttacagccactgcagtatcacagccagctgcactgggtgttcaacagccatcactccttggagcatctcctaccatttatacacagcaaactgcattggcagcagcaggccttaccacacaaactccagcaaactatcagttaacacaaactgctgcattgcagcaacaagccgcagctgcagcagctgcattacaacagcaatattcacaacctcagcaggccctgtatagtgtgcaacaacagttacagcaaccccagcaaaccctcttaacacagccagctgttgcactgcctacaagccttagcctgtctactcctcagccaacagcacaaataactgtatcatatccaacaccaaggtccagtcaacagcaaacccagcctcagaagcagcgtgttttcacaggggtggttacaaaactacatgatacgtttggatttgtggatgaagatgtattctttcagcttagtgctgtcaaagggaaaaccccccaagtaggtgacagagtattggttgaagctacttataatcctaatatgccttttaaatggaatgcacagagaattcaaacactaccaaatcagaatcagtcgcaaacccagccattactgaagactcctcctgctgtacttcagccaattgcaccacagacaacatttggtgttcagactcagccccagccccagtcactgctgcaggcacagatttcagcagcttctattacaccactattgcagactcaaccacagcccttattacagcagcctcagcaaaaagctggtttattgcagcctcctgttcgtatagtttcacagccacaaccggcacgacgattagatcccccatcccgattttcaggaagaaatgacagaggggatcaagtgcctaacagaaaagatgatcgaagtcgtgagagagagagagaaagacgtagatcgagagaaagatcacctcagaggaaacgttcccgggaaagatctccacgaagagagcgagagcgatcacctcggagagttcgacgtgttgttccacgttacacagttcagttttcaaagttttctttagattgtcccagttgtgacatgatggaactaaggcgccgttatcaaaatttgtatatacctagtgacttttttgatgctcaatttacatgggtggatgctttccctttgtcaagaccatttcagctgggaaattactgcaatttttatgtaatgcacagagaagtagagtccttagaaaaaaatatggccattcttgatccaccagatgctgaccacttatacagtgcaaaggtaatgctgatggctagccctagtatggaagatttatatcataagtcatgtgctcttgctgaggacccacaagaacttcgagatggattccaacatcctgctagacttgttaagtttttagtgggcatgaaaggcaaggatgaagctatggccattggaggccactggtctccttcgttggatggaccagacccagaaaaagatccctctgtgttgattaagactgctattcgttgttgtaaggctctgacaggcattgatctaagtgtgtgcacacaatggtaccgttttgcagagattcgctaccatcgccctgaggagacccacaaggggcgtacagttccagctcatgtggagacagtggttttatttttcccggatgtttggcattgccttcccacccgctcagagtgggaaaccctctcccgaggatacaagcagcagctggtcgagaagcttcagggtgaacgcaaggaggctgatggagaacaggatgaagaagagaaggatgatggtgaagctaaagaaatttctacacctacccattggtctaaacttgatccaaagacaatgaaggtaaatgacctccgaaaagaattagaaagtcgagctcttagttccaaaggattaaaatcccagttaatagcccgattgacaaaacagcttaaagtagaggaacaaaaagaagaacagaaggagttagagaaatctgaaaaagaagaggatgaggatgatgataggaaatctgaagacgataaagaggaagaagaaaggaaacgtcaagaggaaatagaacgccagcgtcgagaaagaagatatattttgcctgatgaaccggccatcattgtacatccaaattgggctgcaaaaagtggcaagtttgattgtagcatcatgtctttgagtgtcctattggactacagattagaggataataaagaacattcatttgaggtttcattgtttgcggaacttttcaacgaaatgcttcaaagagattttggtgtccgtatatacaaatcattactgtctcttcctgagaaagaggacaaaaaagaaaaggataaaaaaagcaaaaaagatgagagaaaagataaaaaagaagaaagagatgatgaaactgatgaaccaaaacccaaacggagaaaatcaggcgatgataaagataaaaaagaagatagagatgaaaggaagaaagaagataaaagaaaagatgattctaaagatgatgatgaaactgaagaagataacaatcaagatgaatatgaccctatggaagcagaagaagctgaggatgaagaagatgatagggatgaggaagaaatgaccaaacgagatgacaaaagagatatcaacagatactgcaaggagaggccctctaaagataaggaaaaagaaaagactcaaatgatcacaattaacagagatctgttaatggcttttgtttattttgatcaaagtcattgtggttaccttcttgaaaaggatttggaagaaatactttatactcttggactacatctttctcgggctcaggtaaagaagcttcttaataaagtagtgctccgtgaatcttgcttttaccggaaattaacagacacctcaaaagatgaagagaaccatgaagagtctgagtcattgcaggaagatatgctaggaaacagattattacttccaacaccaacagtaaagcaggaatcaaaggatgtggaagaaaatgttggcctcattgtgtacaatggtgcaatggtagatgtaggaagcctcttgcaaaaattggaaaagagcgaaaaagtaagagctgaggtagaacagaagctgcagttactagaagaaaaaacagatgaagatgaaaaaaccatattaaatttggagaattccaacaaaagcctctctggtgaactcagagaagttaaaaaggaccttagtcagttacaagaaaacttaaagatttcggaaaacatgaatttacaatttgaaaaccaaatgaataagacaatcagaaacttatctacggtaatggatgaaatccacactgttctcaagaaggataatgtaaagaatgaagacaaagatcaaaaatccaaggagaatggtgccagtgtatgataaaatccatgtagtgatgaggaatggtgttaaataatgtaatatataaaaatcatgatataagaatgtttgaaggtgatgcatgtttgattttagtagtataaatgtattttagttcaaatgatgtataaagttttatgaatgtgagtttctgcttttgaaaattgcttgtaattcctagccttcaaattattaaacactccttgagtgaaataattttgcattgcaaagtgttttaggatgaactttgttatagttttaactccaataaagttcatcagtttaa

SEQ ID NO: 771 - protein, 1150 aa, Homo sapiens
MAQFGGQKNPPWATQFTATAVSQPAALGVQQPSLLGASPTIYTQQTALAAAGLTTQTPANYQLTQTAALQQQAAAAAAALQQQYSQPQQALYSVQQQLQQPQQTLLTQPAVALPTSLSLSTPQPTAQITVSYPTPRSSQQQTQPQKQRVFTGVVTKLHDTFGFVDEDVFFQLSAVKGKTPQVGDRVLVEATYNPNMPFKWNAQRIQTLPNQNQSQTQPLLKTPPAVLQPIAPQTTFGVQTQPQPQSLLQAQISAASITPLLQTQPQPLLQQPQQKAGLLQPPVRIVSQPQPARRLDPPSRFSGRNDRGDQVPNRKDDRSRERERERRRSRERSPQRKRSRERSPRRERERSPRRVRRVVPRYTVQFSKFSLDCPSCDMMELRRRYQNLYIPSDFFDAQFTWVDAFPLSRPFQLGNYCNFYVMHREVESLEKNMAILDPPDADHLYSAKVMLMASPSMEDLYHKSCALAEDPQELRDGFQHPARLVKFLVGMKGKDEAMAIGGHWSPSLDGPDPEKDPSVLIKTAIRCCKALTGIDLSVCTQWYRFAEIRYHRPEETHKGRTVPAHVETVVLFFPDVWHCLPTRSEWETLSRGYKQQLVEKLQGERKEADGEQDEEEKDDGEAKEISTPTHWSKLDPKTMKVNDLRKELESRALSSKGLKSQLIARLTKQLKVEEQKEEQKELEKSEKEEDEDDDRKSEDDKEEEERKRQEEIERQRRERRYILPDEPAIIVHPNWAAKSGKFDCSIMSLSVLLDYRLEDNKEHSFEVSLFAELFNEMLQRDFGVRIYKSLLSLPEKEDKKEKDKKSKKDERKDKKEERDDETDEPKPKRRKSGDDKDKKEDRDERKKEDKRKDDSKDDDETEEDNNQDEYDPMEAEEAEDEEDDRDEEEMTKRDDKRDINRYCKERPSKDKEKEKTQMITINRDLLMAFVYFDQSHCGYLLEKDLEEILYTLGLHLSRAQVKKLLNKVVLRESCFYRKLTDTSKDEENHEESESLQEDMLGNRLLLPTPTVKQESKDVEENVGLIVYNGAMVDVGSLLQKLEKSEKVRAEVEQKLQLLEEKTDEDEKTILNLENSNKSLSGELREVKKDLSQLQENLKISENMNLQFENQMNKTIRNLSTVMDEIHTVLKKDNVKNEDKDQKSKENGASV

SEQ ID NO: 772 - DNA, 3293 bp, Homo sapiens
atggcccggcccgtgcagctggcgccgggctcgctggcgctagtgctgtgccggctggaggcgcagaaggcggcgggggccgcggaggagcctggtgggcgcgcggtgttccgcgctttccgtcgcgccaacgcgcgctgcttctggaacgcgcggctggcgcgcgccgcctcgcggctggccttccagggctggctgcggcggggggtgctgctggtgcgcgcgccccccgcctgcctgcaggtgctgcgcgatgcctggcggcgccgggccctgcggccgccgcgcggcttccgcatcagggcggtgggtgatgtctttccagtgcaaatgaatccaataactcaatctcagttcgtacctttgggtgaagttctttgctgtgctatatctgatatgaatacagctcagattgtagtaacgcaggaatcacttttggagcgtttgatgaaacattacccaggcattgcaattccatcggaagatattctttataccactctgggaacgctgattaaagaaaggaagatttatcacactggagaaggatacttcatagttactcctcagacttacttcattacaaatacaaccacccaggaaaataagagaatgctgccatcagatgaaagtcgcctgatgccagcttccatgacatatctggtgagcatggagagctgtgcagagtcagcccaagagaatgctgcccccatatcccactgtcagtcttgccagtgtttccgggacatgcacactcaggatgttcaggaagcaccagttgctgcagaagtgactaggaagagtcacagaggtcttggggaatccgtatcttgggtacagaatggggcagtttcagtgtctgcggagcaccacatttgtgagagcaccaaacctttaccatacacaagagataaagaaaaaggcaagaagtttggttttagtctcttatggcgcagcttatctagaaaggagaagcccaaaacagaacacagcagtttctctgctcagttcccacctgaagaatggcccgtccgagatgaagatgacttggacaatatccctcgagatgttgaacatgagataatcaaacgaattaaccccattttgactgttgacaatttaatcaaacacactgtcctaatgcaaaaatacgaagaacagaaaaaatataatagccagggcacttccactgacatgctgacaatcgggcataagtatccttcaaaagagggggttaagaaaaggcagggtctgtctgcaaaacctcaagggcagggccattctcgaagggatagacacaaagccaggaatcagggaagtgagtttcagccaggaagcattagactggagaaacaccccaagctccctgctacacagcccatccccagaattaaaagcccaaatgaaatggtaggtcagaaaccacttggtgagattacaacagtgctaggttcccatttgatttacaaaaagcgaatcagtaatcctttccagggtttgtctcaccgaggaagcacaatatccaaagggcacaaaattcagaagacgagtgatctgaaacccagccagactggaccaaaggaaaagcctttccaaaagcctaggtccttggattcctcaagaatctttgatggtaaagccaaagagccatatgctgaacaacctaatgataaaatggaagcagaatccatttacataaatgaccctactgtcaaacccatcaatgatgacttcagaggtcacctcttcagtcaccctcaacagagcatgttgcaaaatgatggtaaatgctgtccctttatggaaagcatgttgagatatgaagtgtatggtggagaaaatgaggtaattcctgaagtcttgaggaaaagtcattcccactttgacaaattaggggagaccaaacagactccgcatagtctgccatcacgaggtgcctccttttcagaccgaacaccctctgcttgtagattagtggataacacaatacaccagtttcaaaatcttggccttttggattacccagttggcgtgaaccctttaagacaagctgcaagacaagacaaagactcagaagaattattgagaaaaggatttgtccaggatgcagagactacaagcctagaaaatgaacagctttctaacgatgaccaggccttgtatcagaatgaagtggaagatgatgatggtgcctgtagttcattatatctagaggaggatgacatttctgagaatgacgacttacgtcaaatgctgcctggccacagtcagtattccttcacaggtggaagccagggaaatcatttaggaaaacaaaaagtgattgagagatctctgaccgagtacaacagcacaatggagagggttgagtctcaggtgcttaaaagaaatgaatgctacaaacccactgggctgcatgctaccccaggtgaaagccaagaacctaacctctctgctgaaagttgtggcctaaattcaggggcccagtttggttttaactacgaagaagaacccagtgttgctaaatgtgtacaggcctcagcacctgctgatgaaagaatctttgattactatagcgcaagaaaagccagttttgaagctgaagtcatacaagacactattggtgacacaggaaagaagccagctagctggagtcagagtcctcagaatcaggaaatgagaaaacatttcccacaaaagttccaacttttcaacacttcacatatgccagtgttggctcaggatgtccaatatgaacacagtcacttggaagggacagaaaatcacagcatggcaggagatagtggaatagattctccacggacacagagtctgggatctaataattcagtcattttggatggactaaaaagaagacagaattttctgcaaaatgtcgaaggcacaaagagcagtcaaccactcacatctaattccttactaccgctaactccagtcataaacgtttaattttcttttggaaacctacttttttctttataaaaaggtagagcattattacagaatctttcaatcatgtaagaattgagtatataagaattgtctaaaggcaagcatatctatactattaaccacattacacattttgttctaattactggctttttttcctcttttggtgtcttaaggctttttgaagcttattttactgtgagtttattgggagtatatagattattttcgattaaaaagtggaattattggtccccttccaattgtaattatcttgaatttttatacattagtttctcaaatatatagaatgccaattt

SEQ ID NO: 773 - protein, 989 aa, Homo sapiens
MARPVQLAPGSLALVLCRLEAQKAAGAAEEPGGRAVFRAFRRANARCFWNARLARAASRLAFQGWLRRGVLLVRAPPACLQVLRDAWRRRALRPPRGFRIRAVGDVFPVQMNPITQSQFVPLGEVLCCAISDMNTAQIVVTQESLLERLMKHYPGIAIPSEDILYTTLGTLIKERKIYHTGEGYFIVTPQTYFITNTTTQENKRMLPSDESRLMPASMTYLVSMESCAESAQENAAPISHCQSCQCFRDMHTQDVQEAPVAAEVTRKSHRGLGESVSWVQNGAVSVSAEHHICESTKPLPYTRDKEKGKKFGFSLLWRSLSRKEKPKTEHSSFSAQFPPEEWPVRDEDDLDNIPRDVEHEIIKRINPILTVDNLIKHTVLMQKYEEQKKYNSQGTSTDMLTIGHKYPSKEGVKKRQGLSAKPQGQGHSRRDRHKARNQGSEFQPGSIRLEKHPKLPATQPIPRIKSPNEMVGQKPLGEITTVLGSHLIYKKRISNPFQGLSHRGSTISKGHKIQKTSDLKPSQTGPKEKPFQKPRSLDSSRIFDGKAKEPYAEQPNDKMEAESIYINDPTVKPINDDFRGHLFSHPQQSMLQNDGKCCPFMESMLRYEVYGGENEVIPEVLRKSHSHFDKLGETKQTPHSLPSRGASFSDRTPSACRLVDNTIHQFQNLGLLDYPVGVNPLRQAARQDKDSEELLRKGFVQDAETTSLENEQLSNDDQALYQNEVEDDDGACSSLYLEEDDISENDDLRQMLPGHSQYSFTGGSQGNHLGKQKVIERSLTEYNSTMERVESQVLKRNECYKPTGLHATPGESQEPNLSAESCGLNSGAQFGFNYEEEPSVAKCVQASAPADERIFDYYSARKASFEAEVIQDTIGDTGKKPASWSQSPQNQEMRKHFPQKFQLFNTSHMPVLAQDVQYEHSHLEGTENHSMAGDSGIDSPRTQSLGSNNSVILDGLKRRQNFLQNVEGTKSSQPLTSNSLLPLTPVINV

SEQ ID NO: 774 - DNA, 1450 bp, Homo sapiens
cgaaaaagaagcagtcctgggctgtacccggcgcagctgggagcggctgcttcctccggggtcgtatctccgcccggcatggggctgctggacctttgcgaggaagtgttcggcaccgccgacctttaccgggtgctgggcgtgcgacgcgaggcctccgacggcgaggtccgacgaggctaccacaaggtgtccctgcaggtacacccggaccgggtgggcgagggcgacaaggaggacgccacccgccgcttccagatcctgggaaaagtctattccgttctcagtgacagagaacagagagcagtgtacgatgagcagggaacagtggacgaggactctcctgtgctcacccaagaccgagactgggaggcgtattggcggctactctttaaaaagatatctttagaggacattcaagcttttgaaaagacatacaaaggttcggaagaagagctggctgatattaagcaggcctatctggacttcaagggtgacatggatcagatcatggagtctgtgctttgcgtgcagtacacagaggaacccaggataaggaatatcattcagcaagctattgacgccggagaggtcccatcctataatgcctttgtcaaagaatcgaaacaaaagatgaatgcaaggaaaaggagggctcaggaagaggccaaagaagcagaaatgagcagaaaggagttggggcttgatgaaggcgtggatagcctgaaggcagccattcagagcagacaaaaggatcggcaaaaggaaatggacaattttctggctcagatggaagcaaagtactgcaaatcttccaaaggaggagggaaaaaatctgctctcaagaaagaaaagaaataatggaatttttctcttcaaaggtccttaggtgtaaattgatgccatcgtaggcaaggtgcaggcaagatttgaaggcaaaagtcaattcagctcttgagaaaaggtgtctttccagcctgaatttttcagattgactagaccaagcagaatctctcaacctgatcttagtatttcctagaaagcacttgacattgtgtgaggtctcacctgaaggaacttggtggtgacatttgggagggtggagggaggcagtgtccttcctgacagcacttgcctccatggatcttctgtacacagaactcttatctaggatgtggttctgttcatgctgctttctgcgatgtgcgtgtctgttagaataggctctctacccagctagaacaccttccagacacttgctggacagctatcttccacatacttcccagtttacatttggtcttaatgatcttgaatagatcctctcttcattttactcagccaggttttgtactgatgtacaggtgttaaattacttcaagcatttttgtaagaggtgtatataattcaataaaaaaggtaagacatgatgattaaaaaaaaaaaaaaa

SEQ ID NO: 775 - protein, 260 aa, Homo sapiens
MGLLDLCEEVFGTADLYRVLGVRREASDGEVRRGYHKVSLQVHPDRVGEGDKEDATRRFQILGKVYSVLSDREQRAVYDEQGTVDEDSPVLTQDRDWEAYWRLLFKKISLEDIQAFEKTYKGSEEELADIKQAYLDFKGDMDQIMESVLCVQYTEEPRIRNIIQQAIDAGEVPSYNAFVKESKQKMNARKRRAQEEAKEAEMSRKELGLDEGVDSLKAAIQSRQKDRQKEMDNFLAQMEAKYCKSSKGGGKKSALKKEKK

SEQ ID NO: 776 - DNA, 2651 bp, Homo sapiens
attgtgggaagtatagggcggcaagcggaggaggcgtggcgagcggatcatccgcttccggagtcgaggttttcgggcttgtaccgcttggcggtgcggcctggtgtcggcttgcaggttctttctgtgtttgttctctgccctgccaaggccgtagagctggtgcgtgcgggtagcggggctctccgaggagccgcacgccggcggcaccatggtccacctcactactctcctctgcaaggcctaccgtgggggccacttaaccatccgccttgccctgggtggctgcaccaatcggccgttctaccgcattgtggctgctcacaacaagtgtcccagggatggccgtttcgtagagcagctgggctcctatgatccattgcccaacagtcatggagaaaaactcgttgccctcaacctagacaggatccgtcattggattggctgcggggcccacctctctaagcctatggaaaagcttctgggtcttgctggctttttccctctgcatcctatgatgatcacaaatgctgagagactgcgaaggaaacgggcacgtgaagtcctgttagcttctcagaaaacagatgcagaagctacagatacagaggctacagaaacataaatgagctgactttagtgagcatagcagtgggaacaaggtcaaggtccttttgaaacactgcagcgatcttaattttgttagatttggagttcaataaatggagtatcctgagttgcccttgctcttctggcctggcctgcacagggcccagggagagatttgttcttgtgtgacttagagctgggtgtgggtactaattagcttttttcgactttgtcttgggatagacagtggctatgggaggattggacttttgagttgggctctgggtctcttggacaactttacaatttactggcttccaagacttcctgcttcaaaacccccagccagactattcatggcccattcagatcttcatgttcatcccacaagtgcaagaacagttaacctttcttaattgatttttgtaattggaggtttatattgtcttgcctaatgcatattctctttttttttttttttttgagacggagtcttgttctgttgccaggctggagtgcggtggtgcaatctcagctcactgcaatctccacctcctgggttcaagaggttctcctgcctcagcctcctgagtagccggggagctacaagcatgcaccaccacacccagctaattttttttttttttttgagaggagtctcgctctgtcgcccaggcttgagtgcagtggcgcgatctcggctcactgcaagctctgtctcctgggttcatgccattctcctgcttcagcctcccgagtagtcccaggagtagctgggactacaggtgcccaccaccacacccagctaatttttttgtatttttagtagagatggggtttcaccatgttatccaggatggttttgatctcctgacctcgtgatccgcccgccttggcctcccaaaagtgctgggattataggcgtgagccaccgcccgggcaaatttttgtatttttagtagagatggggtttcaccgtgttggccaggatggtctcaatctgaccttgtgatctgcccacctcggcctcccaaagtgctaggattactggcgtgagccaccactcctagccttaatgcatattcttaaatatacaaaggtagatttgttatgaaaattgctttggggctctaataacctaccttttaagaatgagaaactgctgggcttaagggagttcagtatgaatcaagattgaaccattcaaatgtggctgtgatttctgcatatatcatagatgggatccttctgagaatactggaatagggaattaggacaccaagccaattcagctgtgaaccttattcttgtacttttctttcttgctggtaattttatggagcaggttaagaaggctgctctgtgttaggataaactgtataccaataatgttgacaacctgtaatgagtgttgcattttacttcttgtatcttttccttcctaccttgatgccagtaatctataagggatctttatagtttgaatgtatttgaataacttcagtatactttagttctacttttttatttgactcacaaccattcttaggtctcaagtattcccatgtgttttaaaagcctgaagtcagtgagatgaaattcaacatcaagaatttgaagtaacttgtaaggaaaaataatataaagataccattggggcagtggctcacacctgtaatctcagcactttgggaggctgaggtggaaggatcacttgaagccagagtttgagaccagcctgtgcaacacagcaagaccccgtctctacaaaaacttaaaaaattagctggctgtggtgttgctcacccatagttccagctactcgggaagctgaggcagtaagatcacttgagcccaggaggccgatgctgcagtgaactgtgattgttccactacagtccagcctgggtgacagagaaaagaaaaagaaaacattacataatttggctagagcataataatttgattttctggtttttgaaaatttgagttgcaataaaaggatatttcagtgtgcgatttcaaaaaaaaaaaaaaaaaaa

SEQ ID NO: 777 - protein, 137 aa, Homo sapiens
MVHLTTLLCKAYRGGHLTIRLALGGCTNRPFYRIVAAHNKCPRDGRFVEQLGSYDPLPNSHGEKLVALNLDRIRHWIGCGAHLSKPMEKLLGLAGFFPLHPMMITNAERLRRKRAREVLLASQKTDAEATDTEATET

SEQ ID NO: 778 - DNA, 3707 bp, Homo sapiens
agcgtctcgctccctgctcccggccccagagggttatcgcgagtcttggaataaacttgctcgtgcgatggccaaaaagaccaaagaaaacagagggacttttcccagttggtgatatggagcaagtgccatcagcaggcagactcgtgcagatcaccgtgacagagggatatgatttgaaaggttttaaaggagatactccagttacctttattcgagcagaattcaatcaagtggttctgggagactctgcaaaaattactgtttctccagaaggaagtgcaaaatacaacttcactagcagttttgagtttaatcctgaaggaggaatcacttcagatgacctcgctcacaaacctgtgttcttaactgtgactgaagttttaccaaaggaaaagaaacagaaagaagagaagaccttaattcttggtcaggctgtggtggaccttcttcccttactggaaggacagagttcatttcaaacaacagttccattgcaccctgtgcaaggctcacccttagaaactcctagatcaagtgctaagcagtgcagtcttgaagttaaagtattagtggcagagcctttactgaccacagcccagatctcagggggcaatctactgaaggtcacgttggaggctgcttactctgtgcctgaatccttcattccaacaggtcctgggcagaactacatggtcggtctgcaagttccatcacttggagagaaggactatcccattttatttaagaatggaactctgaagcttggaggggaaagggaacctgttccccggcccaaaaagtggccaattgccaacattctggctccaggagctaataacattcctgatgcattcattgttggtggtccctatgaagaagaagaaggagaactcaaccatcctgaggacagcgaatttaggaatcaagcagagtgcataaagaaaaggattatttgggacttggaaagtcgctgctaccttgatccttctgcagtggtcagttttcagaagcgaattgccgattgccggctttggcctgtagagatcacaagagttcctctggtcactatacccaaagggaaagctggcaaaactgaaaagactgatgaagaagctcagctttcgtttcatggtgtggcttatgttaatatggtcccattgttgtatccaggtgtgaagagaattcggggagcttttcatgtttacccttacctagacagtgtagtccatgaaaagaccaaatgtttattgagcttgttccgggatattggccatcacttgattcataataataaaataggaggaattaattctctgctgtccaaacaagctgtttctaagaatctgaaagaagataaaccagtgaaagaaaaggatatagatggaaggcctaggcctggggatgtgcaggcacctagtataaaatctcagagctcagatactcctttggaaggtgaaccccctctaagtcacaatcctgaaggacagcaatatgtagaagcagggacatacattgtgttggaaattcagttggacaaagccttggttccaaagcgaatgccagaggagctagccagaagggtcaaggaaatgattcctccaaggcctcctcttacccgtcggacaggaggagctcagaaggcagtgagtgactaccacatacagatcaagaatatttctagagccattctagatgaatactacagaatgtttggaaaacaggtggccaaactggagagtgatatggatagtgaaaccttggaggagcagaagtgccagctcagctatgaacttaattgctctggaaaatactttgctttcaaagaacaactcaagcatgctgtggtaaagattgtgagagataaatacttgaagacaacatcatttgaaagccaggaggaacttcagacatttatcagtgagctctatgtgttcttagtagatcagatgcatgtagccctaaaccagaccatgccagatgatgtccaaggcactgttgcaaccatttatacaagcagtgaacagcttcaactctttgcatttgaagcagaagtcaatgagaactttgagatggcagcagcatattataaagagagattggtccgtgagccccagaatctggatcactggttggactatggtgccttctgcctcctaactgaagacaacatcaaagcacaagagtgttttcagaaagccctttccctcaaccagagtcatatccacagcttgttgctgtgtggtgtcctggctgtcctgttggagaactatgagcaagcagaaattttctttgaggatgctacttgcttggaaccaactaatgttgtagcctggactttacttggtttgtactatgaaattcaaaacaatgatattcgaatggaaatggcatttcatgaggcctccaaacagcttcaggcacggatgcttcaggcacaagtaacaaagcaaaagagcactggtgtagaagacactgaggaaagagggaagagagaatctagtttaggcccttggggaatcacaaatggttctgcaacagcaatcaaggtggaagccccagcaggaccaggagctgcattatctattctagacaaatttcttgaagaatcctccaaactgcagtctgattcacaagaacccattttgactacacaaacttgggatccaagtataagccaaaaaccatctaacacatttatcaaggagataccaacaaagaaagaagcatcaaaatgtcaagattcatcagctcttctgcatcccggccttcattatggtgtttctcaaactaccaccatcttcatggagaccatacatttcttgatgaaagtcaaggctgtgcagtatgtgcacagagtgcttgcacatgagctgttatgccctcaaggaggccccagctgtgaatattacttggtgctggcccaaacacacattcttaagaagaactttgccaaggcagaggaataccttcaacaagcagcccagatggactacctgaaccccaatgtctggggcctgaagggccatctctattttctgagtggaaatcattctgaggccaaggcatgctatgaacgaaccattagctttgtagtggatgcttctgagatgcacttcatcttcctgagactggggctcatctatctggaagagaaagagtatgaaaaggcaaagaaaacctatatgcaagcctgtaagagatcaccttcatgccttacctggctaggactgggaatcgcctgctatcggctggaggagctcacagaggctgaggatgctctttctgaagccaatgcattgaacaactacaatgctgaagtatgggcatatctggctctggtctgcctgaaagttggacggcaattagaagctgagcaggcctacaagtacatgatcaagctgaaattgaaagatgaggctctgcttgcagagatccacacactacaggaaacagttggctttggaaatccatctttctgatacccctccagctgaacaattttctgcatgggactctgagttcctttccttcccagagagttttaccgtatgaagcctggagctggagaacgaaagaatcttcactataaacagagacccattcatttatttccattggctgtgttactggatgttttactggttgacgagaaactgggtcacaataaaaaaatggagatatgaaactcaaaaaaaaaaaaaaaa

SEQ ID NO: 779 - protein, 1121 aa, Homo sapiens
MEQVPSAGRLVQITVTEGYDLKGFKGDTPVTFIRAEFNQVVLGDSAKITVSPEGSAKYNFTSSFEFNPEGGITSDDLAHKPVFLTVTEVLPKEKKQKEEKTLILGQAVVDLLPLLEGQSSFQTTVPLHPVQGSPLETPRSSAKQCSLEVKVLVAEPLLTTAQISGGNLLKVTLEAAYSVPESFIPTGPGQNYMVGLQVPSLGEKDYPILFKNGTLKLGGEREPVPRPKKWPIANILAPGANNIPDAFIVGGPYEEEEGELNHPEDSEFRNQAECIKKRIIWDLESRCYLDPSAVVSFQKRIADCRLWPVEITRVPLVTIPKGKAGKTEKTDEEAQLSFHGVAYVNMVPLLYPGVKRIRGAFHVYPYLDSVVHEKTKCLLSLFRDIGHHLIHNNKIGGINSLLSKQAVSKNLKEDKPVKEKDIDGRPRPGDVQAPSIKSQSSDTPLEGEPPLSHNPEGQQYVEAGTYIVLEIQLDKALVPKRMPEELARRVKEMIPPRPPLTRRTGGAQKAVSDYHIQIKNISRAILDEYYRMFGKQVAKLESDMDSETLEEQKCQLSYELNCSGKYFAFKEQLKHAVVKIVRDKYLKTTSFESQEELQTFISELYVFLVDQMHVALNQTMPDDVQGTVATIYTSSEQLQLFAFEAEVNENFEMAAAYYKERLVREPQNLDHWLDYGAFCLLTEDNIKAQECFQKALSLNQSHIHSLLLCGVLAVLLENYEQAEIFFEDATCLEPTNVVAWTLLGLYYEIQNNDIRMEMAFHEASKQLQARMLQAQVTKQKSTGVEDTEERGKRESSLGPWGITNGSATAIKVEAPAGPGAALSILDKFLEESSKLQSDSQEPILTTQTWDPSISQKPSNTFIKEIPTKKEASKCQDSSALLHPGLHYGVSQTTTIFMETIHFLMKVKAVQYVHRVLAHELLCPQGGPSCEYYLVLAQTHILKKNFAKAEEYLQQAAQMDYLNPNVWGLKGHLYFLSGNHSEAKACYERTISFVVDASEMHFIFLRLGLIYLEEKEYEKAKKTYMQACKRSPSCLTWLGLGIACYRLEELTEAEDALSEANALNNYNAEVWAYLALVCLKVGRQLEAEQAYKYMIKLKLKDEALLAEIHTLQETVGFGNPSF

SEQ ID NO: 780 - DNA, 2110 bp, Homo sapiens
gaacccggtctcccgcaagatggagccgggttgggctgtgacgctgctgctggggtcagaatgtcatacccaggctatcccccaacaggctacccacctttccctggatatcctcctgcaggtcaggagtcatcttttcccccttctggtcagtatccttatcctagtggctttcctccaatgggaggaggtgcctacccacaagtgccaagtagtggctacccaggagctggaggctaccctgcgcctggaggttatccagcccctggaggctatcctggtgccccacagccagggggagctccatcctatcccggagttcctccaggccaaggatttggagtcccaccaggtggagcaggcttttctgggtatccacagccaccttcacagtcttatggaggtggtccagcacaggttccactacctggtggctttcctggaggacagatgccttctcagtatcctggaggacaacctacttaccctagtcagcctgccacagtgactcaggtcactcaaggaactatccgaccagctgccaacttcgatgctataagagatgcagaaattcttcgtaaggcaatgaagggttttgggacagatgagcaggcaattgtggatgtggtggccaaccgttccaatgatcagaggcaaaaaattaaagcagcatttaagacctcctatggcaaggatttaatcaaagatctcaaatcagagttaagtggaaatatggaagaactgatcctggccctcttcatgcctcctacgtattacgatgcctggagcttacggaaagcaatgcagggagcaggaactcaggaacgtgtattgattgagattttgtgcacaagaacaaatcaggaaatccgagaaattgtcagatgttatcagtcagaatttggacgagaccttgaaaaggacattaggtcagatacatcaggacattttgaacgtttacttgtgtccatgtgccagggaaatcgtgatgagaaccagagtataaaccaccaaatggctcaggaagatgctcagcgtctctatcaagctggtgaggggagactagggaccgatgaatcttgctttaacatgatccttgccacaagaagctttcctcagctgagagctaccatggaggcttattctaggatggctaatcgagacttgttaagcagtgtgagccgtgagttttccggatatgtagaaagtggtttgaagaccatcttgcagtgtgccctgaaccgccctgccttctttgctgagaggctctactatgctatgaaaggtgctggcacagatgactccaccctggtccggattgtggtcactcgaagtgagattgaccttgtacaaataaaacagatgttcgctcagatgtatcagaagactctgggcacaatgattgcaggtgacacgagtggagattaccgaagacttcttctggctattgtgggccagtaggagggatttttttttttttaatgaaaaaaaaatttctattcatagcttatccttcagagcaatgacctgcatgcagcaatatcaaacatcagctaaccgaaagagctttctgtcaaggaccgtatcagggtaatgtgcttggtttgcacatgttgttattgccttaattctaattttattttgttctctacatacaatcaatgtaaagccatatcacaatgatacagtaatattgcaatgtttgtaaaccttcattcttactagtttcattctaatcaagatgtcaaattgaataaaaatcacagcaatctctgattctgtgtaataatattgaataattttttagaaggttactgaaagctctgccttccggaatccctctaagtctgcttgatagagtggatagtatgttaaaactgtgtactttaaaaaaaaattcaacctttacatctagaataatttgcatctcattttgcctaaattggttctgtattcataaacactttccacatagaaaatagattagtattacctgtggcaccttttaagaaagggtcaaatgtttatatgcttaagatacatagcctccctttttttcgcgttgtttcctttttttaaattgagttatgacaaataaaaaattgcatat

SEQ ID NO: 781 - protein, 466 aa, Homo sapiens
MSYPGYPPTGYPPFPGYPPAGQESSFPPSGQYPYPSGFPPMGGGAYPQVPSSGYPGAGGYPAPGGYPAPGGYPGAPQPGGAPSYPGVPPGQGFGVPPGGAGFSGYPQPPSQSYGGGPAQVPLPGGFPGGQMPSQYPGGQPTYPSQPATVTQVTQGTIRPAANFDAIRDAEILRKAMKGFGTDEQAIVDVVANRSNDQRQKIKAAFKTSYGKDLIKDLKSELSGNMEELILALFMPPTYYDAWSLRKAMQGAGTQERVLIEILCTRTNQEIREIVRCYQSEFGRDLEKDIRSDTSGHFERLLVSMCQGNRDENQSINHQMAQEDAQRLYQAGEGRLGTDESCFNMILATRSFPQLRATMEAYSRMANRDLLSSVSREFSGYVESGLKTILQCALNRPAFFAERLYYAMKGAGTDDSTLVRIVVTRSEIDLVQIKQMFAQMYQKTLGTMIAGDTSGDYRRLLLAIVGQ

SEQ ID NO: 782 - DNA, 2176 bp, Homo sapiens
gaacccggtctcccgcaagatggagccgggttgggctgtgacgctgctgctggggtcagaatgtcatacccaggctatcccccaacaggctacccacctttccctggatatcctcctgcaggtcaggagtcatcttttcccccttctggtcagtatccttatcctagtggctttcctccaatgggaggaggtgcctacccacaagtgccaagtagtggctacccaggagctggaggctaccctgcgcctggaggttatccagcccctggaggctatcctggtgccccacagccagggggagctccatcctatcccggagttcctccaggccaaggatttggagtcccaccaggtggagcaggcttttctgggtatccacagccaccttcacagtcttatggaggtggtccagcacaggttccactacctggtggctttcctggaggacagatgccttctcagtatcctggaggacaacctacttaccctagtcagatcaatacagattctttttcttcctatcctgttttctctcctgtttctttggattatagcagtgaacctgccacagtgactcaggtcactcaaggaactatccgaccagctgccaacttcgatgctataagagatgcagaaattcttcgtaaggcaatgaagggttttgggacagatgagcaggcaattgtggatgtggtggccaaccgttccaatgatcagaggcaaaaaattaaagcagcatttaagacctcctatggcaaggatttaatcaaagatctcaaatcagagttaagtggaaatatggaagaactgatcctggccctcttcatgcctcctacgtattacgatgcctggagcttacggaaagcaatgcagggagcaggaactcaggaacgtgtattgattgagattttgtgcacaagaacaaatcaggaaatccgagaaattgtcagatgttatcagtcagaatttggacgagaccttgaaaaggacattaggtcagatacatcaggacattttgaacgtttacttgtgtccatgtgccagggaaatcgtgatgagaaccagagtataaaccaccaaatggctcaggaagatgctcagcgtctctatcaagctggtgaggggagactagggaccgatgaatcttgctttaacatgatccttgccacaagaagctttcctcagctgagagctaccatggaggcttattctaggatggctaatcgagacttgttaagcagtgtgagccgtgagttttccggatatgtagaaagtggtttgaagaccatcttgcagtgtgccctgaaccgccctgccttctttgctgagaggctctactatgctatgaaaggtgctggcacagatgactccaccctggtccggattgtggtcactcgaagtgagattgaccttgtacaaataaaacagatgttcgctcagatgtatcagaagactctgggcacaatgattgcaggtgacacgagtggagattaccgaagacttcttctggctattgtgggccagtaggagggatttttttttttttaatgaaaaaaaaatttctattcatagcttatccttcagagcaatgacctgcatgcagcaatatcaaacatcagctaaccgaaagagctttctgtcaaggaccgtatcagggtaatgtgcttggtttgcacatgttgttattgccttaattctaattttattttgttctctacatacaatcaatgtaaagccatatcacaatgatacagtaatattgcaatgtttgtaaaccttcattcttactagtttcattctaatcaagatgtcaaattgaataaaaatcacagcaatctctgattctgtgtaataatattgaataattttttagaaggttactgaaagctctgccttccggaatccctctaagtctgcttgatagagtggatagtatgttaaaactgtgtactttaaaaaaaaattcaacctttacatctagaataatttgcatctcattttgcctaaattggttctgtattcataaacactttccacatagaaaatagattagtattacctgtggcaccttttaagaaagggtcaaatgtttatatgcttaagatacatagcctccctttttttcgcgttgtttcctttttttaaattgagttatgacaaataaaaaattgcatat

SEQ ID NO: 783 - protein, 488 aa, Homo sapiens
MSYPGYPPTGYPPFPGYPPAGQESSFPPSGQYPYPSGFPPMGGGAYPQVPSSGYPGAGGYPAPGGYPAPGGYPGAPQPGGAPSYPGVPPGQGFGVPPGGAGFSGYPQPPSQSYGGGPAQVPLPGGFPGGQMPSQYPGGQPTYPSQINTDSFSSYPVFSPVSLDYSSEPATVTQVTQGTIRPAANFDAIRDAEILRKAMKGFGTDEQAIVDVVANRSNDQRQKIKAAFKTSYGKDLIKDLKSELSGNMEELILALFMPPTYYDAWSLRKAMQGAGTQERVLIEILCTRTNQEIREIVRCYQSEFGRDLEKDIRSDTSGHFERLLVSMCQGNRDENQSINHQMAQEDAQRLYQAGEGRLGTDESCFNMILATRSFPQLRATMEAYSRMANRDLLSSVSREFSGYVESGLKTILQCALNRPAFFAERLYYAMKGAGTDDSTLVRIVVTRSEIDLVQIKQMFAQMYQKTLGTMIAGDTSGDYRRLLLAIVGQ

SEQ ID NO: 784 - DNA, 2433 bp, Homo sapiens
atttcacttggaggaaagagagaaggaaggaagctgaggacttagcagggtatcactggacaggccatggctccacggtcccggcgacgaaggcacaagaaacctccctcatcagtggctcccatcatcatggccccaaccacaattgtgacccctgtgcctctgaccccctcaaaacctggccctagcattgacacacttggcttcttctccttggatgataatgttcctggcctatcgcagctgatccttcaaaagctgaacatgaaaagctatgaagaatataagttggtggtagatgggggtacccccgtatcaggctttggatttcgatgtcctcaagaaatgttccagaggatggaagacacatttcgattctgtgctcactgtagagcactccctagtgggctttcagactccaaggttctccggcactgtaagaggtgcagaaatgtctattactgtggtccagagtgccagaagtcagactggcccgcacacaggagggtttgtcaagagcttcgtcttgtggctgtggaccgtctcatggaatggcttctggtcacaggtgattttgttctaccctcaggaccttggccatggccacctgaagctgtacaggactgggactcctggttttctatgaaggggttacacctagatgctacattggatgctgtgctagttagtcatgctgtgaccaccttatgggccagtgtaggacggccaaggccagacccggatgtcctgcagggatctttgaagcggctgctgacagatgtcctgtcacggcccttgactctaggcctaggacttagggccttggggatagatgttaggaggactgggggaagcacagtgcatgtggttggtgcttcccatgtggagacatttcttactcgcccaggggactatgatgagcttggttacatgtttcctgggcaccttggactccgtgtggtcatggtgggtgtagatgtagctactggcttttcacagagcacctcaacttcacccctggaacctggcacaattcagcttagtgcccacaggggcctctaccatgacttctgggaggagcaagtagagaccgggcagacacaccatccagatttggtggcggcattccatccaggttttcattcctccccagacttgatggaggcttggctgcccaccctgctgctacttcgtgactataagattcctacattgattactgtttacagccatcaggagttggtatcctctttgcagattctggtggaactggatacacacatcactgcctttgggtctaatcctttcatgtccctcaaacctgaacaggtctattccagtcccaacaagcagccagtatactgcagtgcatactatatcatgtttcttggaagctcctgtcagctggataataggcaattagaagagaaagtggacggcgggatttaaatagatcataactggacatctggaaaacggggagtttgtgatgaaattaccctgctaatgccaggttcttgcaaactttgaaaaacattatattctaaacctcatttactgtttgggtaaaaattctaagctgaatgagagtttctgtataacataactggtttctttctttttttgagatggagtcttgctctgttgcccaggctggagtgcagcggcatgatctcgactcactgcagcctccgcctcctgggttcaagtggttctcctgcctcagcctccctagtagctgggattacaggtgcacaccaccacacctggctaatttttgtatttttagcagacagggtttcaccatgttggccaggctcgtatcaaacccttgaccccaggtgatctgcctgcctcagcctcccaaagttctgggattacaggcatgagccaccatgcccagccaatgtaactggtttctaagagtttagccacagtagcttctagagataggaaattagatttagtgggtgggaagaggccctgatgctggtctttccagagcttatagttgctaacacttttctttgtaaagaagtttaccttttgactggaaccagatggcactgagaaaaagaatgagaaccaccttattcttctgaaaaagactttcttctcatccagtaatttgggctaaaaaatggaaagatgttgatgacttgaagtgatgcaagaatggacaagtcagggaagtcattgggaacatggatgaggttgtaagcattggtacagtgtcctgtttcctgacttttttgagagaaatgtctacttttcctgttttctcttggggacttttgaccctagagtagccctggtgttatattttagatatcccaagctatatcagactttacctgaatatactggagttacttattatcccccattctataccccaataaactcagtttggggcttcttaaaaaaaaaaaa

SEQ ID NO: 785 - protein, 460 aa, Homo sapiens
MAPRSRRRRHKKPPSSVAPIIMAPTTIVTPVPLTPSKPGPSIDTLGFFSLDDNVPGLSQLILQKLNMKSYEEYKLVVDGGTPVSGFGFRCPQEMFQRMEDTFRFCAHCRALPSGLSDSKVLRHCKRCRNVYYCGPECQKSDWPAHRRVCQELRLVAVDRLMEWLLVTGDFVLPSGPWPWPPEAVQDWDSWFSMKGLHLDATLDAVLVSHAVTTLWASVGRPRPDPDVLQGSLKRLLTDVLSRPLTLGLGLRALGIDVRRTGGSTVHVVGASHVETFLTRPGDYDELGYMFPGHLGLRVVMVGVDVATGFSQSTSTSPLEPGTIQLSAHRGLYHDFWEEQVETGQTHHPDLVAAFHPGFHSSPDLMEAWLPTLLLLRDYKIPTLITVYSHQELVSSLQILVELDTHITAFGSNPFMSLKPEQVYSSPNKQPVYCSAYYIMFLGSSCQLDNRQLEEKVDGGI

SEQ ID NO: 786 - DNA, 3079 bp, Homo sapiens
gggccctacagagggtccgccatgttccccggcggcgccgccgcttggctctggtagccgccgcccccgcccccaaccccgcccggcccagagcctagccgagccccgggcccagcatggccgccccggagccggcccgggctgcaccgcccccacccccgcccccgccgccccctcccggggctgaccgcgtcgtcaaagctgtccctttccccccaacacatcgcttgacatctgaagaagtatttgatttggatgggatacccagggttgatgttctgaagaaccacttggtgaaagaaggtcgagtagatgaagaaattgcgcttagaattatcaatgagggtgctgccatccttcggagagagaaaaccatgatagaagtagaagctccaatcacagtgtgtggtgacatccatggccaattttttgatctgatgaaactttttgaagtaggaggatcacctgctaatacacgatacctttttcttggcgattatgtggacagaggttattttagtatagagtgtgtcttatatttatgggttctgaagattctatacccaagcacattatttcttctgagaggcaaccatgaatgcagacaccttactgaatattttacctttaagcaggaatgtaaaattaagtattcggaaagagtctatgaagcttgtatggaagcttttgatagtttgcctcttgctgcacttttaaaccaacagtttctttgtgttcatggtggactttcaccagaaatacacacactggatgatattaggagattagatagattcaaagagccacctgcatttggaccaatgtgtgacttgttatggtccgatccttctgaagattttggaaatgaaaaatcacaggaacattttagtcacaatacagttcgaggatgttcttatttttataactatccagcagtgtgtgaatttttgcaaaacaataatttgttatcgattattagagctcatgaagctcaagatgcaggctatagaatgtacagaaaaagtcaaactacagggttcccttcattaataacaattttttcggcacctaattacttagatgtctacaataataaagctgctgtattaaagtatgaaaataatgtgatgaatattcgacagtttaactgttctccacatccttactggttgcctaattttatggatgtcttcacgtggtctttaccgtttgttggagaaaaagtgacagaaatgttggtaaatgttctgagtatttgctctgatgatgaactaatgactgaaggtgaagaccagtttgatggttcagctgcagcccggaaagaaatcataagaaacaaaattcgagcaattggcaagatggcaagagtcttctctgttctcagggaggagagtgaaagtgtgctgacactcaagggcctgactcccacagggatgttgcctagtggagtgttagctggaggacggcagaccctgcaaagtgccacagttgaggctattgaggctgaaaaagcaatacgaggattctctccaccacatagaatctgcagttttgaagaggcaaagggtttggataggatcaatgagagaatgccacctcggaaagatgctgtacagcaagatggtttcaattctctgaacaccgcacatgccactgagaaccacgggacgggcaaccatactgcccagtgacccactacttcccagggactctcacatctcgggccccaaatggacagatcacccgaggagctggaggggtcggccaagctgactgtaaatttcacagtctctctgaagaaaccattgtgcttctgagaccctagcccccttcctggatggaggcttgagggccctgggacatgtgctatctgataagattgggtcatcgctgccaaggtggagagcagtgagcaaggggcttggggcaatttccagtggagggcatccacacctccattttatgcttgtggttcacacatttaagtttacaaatcagatttcttttccccttcagtagaattagattttgtttttcaatcatgatttcaaatgcaatcctaagagctaatgtggacttttctttttccatgaaatgtctttaaaggatgaattagcatggtcttaaaatacatttctgaggttactagctgtattttgaattgtgagcaaaatgccgagaaacccagttggcatttatacaaaatgttgacctcaggtctatagttcttaaatgtggctaattctgtaacatagtcttggtattttttaattatgaatgcatatcctatttccaggcaggctctcttacttgaacacaaatccaaaaactaatttagagtcttttttgcccagatcttttaagacttacaccccagagatttaagaagaaaacctctaaatttcaaaattatgaagaattacagaattactcatttaaggtactttaaaagaagtttgtacattgtcaaagtaaattttaattcaaatcatgtctgtaaaacttgacgtattttgtgtatgcatgttttcattttgcaaatatttaatatatagacctatgatgtacaggtacgacatgtataggttacctagatgttatgagaaattttagtttattgtgagtactcaagttgcttagagagccaccagggtgatttgctgctggctttctatcatttttatgttttaatgcaaaggaaattttaaaatgttctggaagtgtttttgattaagcaatgcagcctagaagcaatggttctgttcaatcattcagatgttagtggaagcataaaagtcaagactgcatgttgaaacctttcttttgatagttactgaactgcttggttaaactaaatggaaccatgtgctaatttttcacaattattgacctgtattgattgccactgtagtttggtatttccctttactttggtggcctgcttccctcatgccctggaatacaactcagagctccaggcagcggaaccatctattgttttgtttgccagaaagtgcaccctgtatggtctcctgtctaagttggaaatattatgcatgtgcaggactattcgagtatt

SEQ ID NO: 787 - protein, 524 aa, Homo sapiens
MAAPEPARAAPPPPPPPPPPPGADRVVKAVPFPPTHRLTSEEVFDLDGIPRVDVLKNHLVKEGRVDEEIALRIINEGAAILRREKTMIEVEAPITVCGDIHGQFFDLMKLFEVGGSPANTRYLFLGDYVDRGYFSIECVLYLWVLKILYPSTLFLLRGNHECRHLTEYFTFKQECKIKYSERVYEACMEAFDSLPLAALLNQQFLCVHGGLSPEIHTLDDIRRLDRFKEPPAFGPMCDLLWSDPSEDFGNEKSQEHFSHNTVRGCSYFYNYPAVCEFLQNNNLLSIIRAHEAQDAGYRMYRKSQTTGFPSLITIFSAPNYLDVYNNKAAVLKYENNVMNIRQFNCSPHPYWLPNFMDVFTWSLPFVGEKVTEMLVNVLSICSDDELMTEGEDQFDGSAAARKEIIRNKIRAIGKMARVFSVLREESESVLTLKGLTPTGMLPSGVLAGGRQTLQSATVEAIEAEKAIRGFSPPHRICSFEEAKGLDRINERMPPRKDAVQQDGFNSLNTAHATENHGTGNHTAQ

SEQ ID NO: 788 - DNA, 6202 bp, Homo sapiens
gctaaatgtgaacaataatgtcttggaagagaaattatttttcagggggtcgtggtagtgtacaagggatgtttgcacctcgaagctcaacctccatagcccccagcaaaggcctcagcaatgagccagggcaaaacagctgcttcctcaacagtgccctgcaggttttgtggcacttggatatcttccgacgtagctttaggcagcttacaactcacaagtgcatgggagattcctgcatcttttgcgctctcaagggaatctttaaccagtttcagtgtagtagtgaaaaagtgcttccatctgacactctccgcagtgctctggcaaagactttccaggatgaacaacgtttccagctgggaattatggatgatgctgcagagtgctttgaaaacctcctgatgagaattcacttccacattgctgatgaaaccaaagaggatatatgtactgcccaacactgcatttcccatcagaaatttgcaatgacattgtttgagcagtgtgtatgtactagctgtggtgccacttctgatccgctgcctttcatccagatggtacattatatctccaccacttccctttgcaatcaggctatttgtatgctggaaagacgagagaaaccttcaccaagcatgtttggtgagctgctgcagaatgccagcaccatgggggatctgcggaactgtccaagcaactgtggagagaggatcaggattcgccgtgtgttgatgaatgctccacagattatcacgattgggctggtatgggactcagaccactcagacttagcagaagatgttatccacagcctgggaacctgccttaagctgggtgatctgtttttcagagtgacggatgaccgggccaagcaatctgaactgtacttagttggaatgatctgttactatggcaaacattattctacattcttttttcaaacaaagattcgcaaatggatgtattttgatgatgctcatgtcaaggagattgggcccaaatggaaggatgtggtgaccaaatgcatcaaggggcattatcagcccctgctgctgctttatgcagatccccagggtaccccagtttccacccaggacctgcctccccaagctgagttccagtcatacagcaggacatgctacgacagtgaagattcagggagggagccctccatctcaagtgacactcgaacagattcctcaacggagagctatccctacaaacattcccaccatgagtctgtggtcagtcacttctcttctgattctcaggggacagtcatctataatgtggaaaatgattccatgtctcagagcagtcgggacacaggacacctgactgatagtgaatgtaatcagaaacacacatccaagaaagggtcactgatagagcgcaagaggagctctggtcgggttaggaggaaaggcgatgagccccaggcctcgggataccacagtgaaggagaaacactgaaagagaagcaggctcctagaaatgcctccaaaccatccagcagcaccaacaggctgagagattttaaagagacagtcagcaatatgatccataacagaccatccctggcttctcagaccaatgtaggctctcactgcaggggcagaggaggagaccagcctgacaaaaaacctcctaggaccctgcctttacactctcgtgactgggaaatagagagtaccagcagtgagtcaaaatccagttcttccagcaagtatcgtcccacatggagacccaaacgagaatctctgaatattgacagtatctttagtaaggacaaaaggaagcactgtggctatacccagcttagccccttttctgaggattcagctaaagaatttataccagatgaaccaagcaagccaccttcttacgacattaaatttggtggaccaagcccccagtacaagcgctggggcccagcacggccaggctctcaccttttagagcagcacccccgactaatccagcgaatggaatctggctatgaaagcagtgagaggaacagcagcagccctgtcagcctggatgcagccctgcctgagagctcaaatgtctacagggatccaagtgctaagagatcagctgggttggttccttcctggcgtcatatcccaaagtcgcacagcagtagcatcctggaggtagactccacagcatccatgggtggctggacaaagagtcagcctttctctggtgaggagatatcttctaaaagtgaactggatgaattgcaggaagaggtggccaggagggcgcaggaacaggaacttcgaagaaaacgggagaaggagttagaggcagcgaaagggtttaaccctcatcctagccgcttcatggacttggatgaactgcagaatcaggggaggagtgacggctttgagaggtccctgcaagaggcagagtcagtgtttgaagagtcactacatctggaacagaaaggagactgtgctgcagctttggctctctgtaatgaagctatctctaaactaagacttgccctgcatggtgccagctgtagcacgcacagcagagccctagtcgataagaagttgcaaatcagtattcgaaaagcacggagcctgcaggatcgcatgcagcagcagcaatcaccacagcagccgtcgcagccctcagcctgcctcccaacacaggcggggactctctctcagccaacaagtgaacagcctatcccgctccaagtattgttaagccaagaggcccaactggaatccggcatggatacagagtttggggccagttctttcttccattcacctgcttcctgccatgagtcacactcatcactatctccagagtcatctgccccacagcacagctcccccagtagatctgccttgaagcttctgacttcggttgaagtagacaacattgaaccctctgcattccacaggcaaggtttacctaaagcaccagggtggactgagaagaattctcatcatagttgggagccattggatgccccagagggtaagctgcaaggctctaggtgtgacaacagcagttgcagcaagctccctccacaagaaggaagaggcattgctcaagaacagctgttccaagaaaagaaggatcctgctaacccctccccggtgatgcctggaatagccacctctgagaggggtgatgaacacagcctaggctgtagtccttcaaattcatcagctcagcccagccttcccctgtatagaacctgccaccccataatgcctgttgcttcttcatttgtgcttcactgtcctgatcctgtgcagaaaactaaccaatgcctccaaggccaaagcctcaaaacttcattgactttaaaagtggacagaggcagtgaggagacctataggccagagtttcccagcacaaaggggcttgtccgttctctggctgagcagttccagaggatgcagggtgtctccatgagggatagtacaggtttcaaggatagaagtttgtcaggtagtctaaggaagaactcttccccttctgattctaagcctcctttctcacagggtcaagagaaaggccactggccatgggcaaagcaacaatcctctctggagggtggggatagaccactttcctgggaagagtccactgaacattcttctcttgccttaaactctgggctgcctaatggtgaaacttctagcggaggacagcccaggttggcagagccagacatataccaagagaagctgtcccaagtgagagatgttaggtctaaggatctgggcagcagtactgacttggggacttccttgcctttggattcctgggtgaatatcacaaggttctgtgattctcagcttaagcatggggcacctaggccaggaatgaagtcctcccctcatgattcccatacgtgtgtaacctatccagagagaaatcacatccttttgcatccacattggaaccaagacacagagcaggagacctcagaattggagtctctgtatcaggccagtcttcaggcttctcaagctggctgttctggatgggggcagcaggataccgcctggcacccacttagccaaacaggctctgcagatggcatggggaggaggttgcactcagcccatgatcctggtctctcaaagacttcaacagcagaaatggagcatggtctccatgaagccagaacagtgcgtacttctcaggctacaccttgccgaggcctcagcagggagtgtggggaggatgagcagtacagtgcagagaatttacgtcgcatctcacgcagtctcagtggcaccgttgtctcagagagggaggaagctccggtttcttcccacagttttgattcatcaaacgtgaggaagcctttggaaaccgggcaccgttgttccagctcctcttccctccctgtcatccatgacccttctgtgtttctcctcggtccccaactctaccttccccaaccacagttcctgtccccagatgtcctgatgcccaccatggcaggggagcccaatagactcccaggaacttcaaggagtgtccagcagtttctggctatgtgtgacaggggtgaaacttcccaaggggccaagtacacaggaaggactttgaactaccagagcctcccccatcgctccagaacagacaactcctgggcaccctggtcagagaccaaccagcatattgggaccagattcctgactactccagggtgcaatcctcaactaacctacactgccacactaccagaaagaagcaagggccttcaggttcctcacactcagtcctggagtgatcttttccattcaccctcccaccctcccattgttcatcctgtgtacccaccatctagcagtcttcatgtacccctgaggtcagcttggaattcagatcctgttccagggtcccgaacccctggtcctcgaagagtagatatgcccccagatgatgactggaggcaaagcagttatgcctcccactctggacacaggagaacagtgggagaggggtttctgtttgttctatcagatgctcccagaagagagcagatcagggctagagtcctgcagcacagtcaatggtaaaggttattcctttcctttcctggagctacacctttctttgtaaaactgtactgtgggccgggcgcggtggctcacacctgtaatcccagcactttgggaggctgaggcgggtggatcacgaggtcaggagattgagaccatcctggccaacatggtgaaaccccgtctctaccaaaatacaaaaaattagccaggcgtgacggtgcgtgcctgtagtcccaactactcggaaggctgaggcaggagaattgcttgaacccgggaggcagaggttgcagtgagccgagatcgcaccactgcactccagcttggcaatagagtgagactccatctcaaaaaacaaaacaaaacaacaacaaaataaactactgtggcagcgttggtaccctgcatcactgccatggttgtgctattctcatctcaacatagaattggtgggttctcctaagggtgtcaggaacctctaaaaagatgtgattctttgggaggggatatttgaaattccaacttccattccccctagcaaaaggaagcagctgctgtttaagggttttatctgagccactttaaagatgaatccatggtattactctggatactagccattccttaggattttaaggtcacattttattcctggatgctttatgtccccacctccacctgagccctcatcctctgttccctactatactcccaacttctactctttgttttatccacctatccctattacctgaccctttgtcttccctgtctcccatccttggggggacatgtagccctgtggtcatggttctgatgacatcatcagggcagcccccctgcccaggtattatggcctgtcagcattccctgtgccctccaaaccttaggcctagaatgcggagctgccaacataacattcacccttttgaacagatggagtcaggcacactaacacagccttctgtcctcaataacacagccattattgccacttgctcagtcgtcaatgtaaaccctcagagtcagctgaactattttaggccaaacatactgtttttgtaaagtatttttcattaataaatctataagacagttctatttaaaaaaaaaaaaaaaaaaaaaaaaaaaaaaaaaaaaaaaaa

SEQ ID NO: 789 - protein, 1684 aa, Homo sapiens
MSWKRNYFSGGRGSVQGMFAPRSSTSIAPSKGLSNEPGQNSCFLNSALQVLWHLDIFRRSFRQLTTHKCMGDSCIFCALKGIFNQFQCSSEKVLPSDTLRSALAKTFQDEQRFQLGIMDDAAECFENLLMRIHFHIADETKEDICTAQHCISHQKFAMTLFEQCVCTSCGATSDPLPFIQMVHYISTTSLCNQAICMLERREKPSPSMFGELLQNASTMGDLRNCPSNCGERIRIRRVLMNAPQIITIGLVWDSDHSDLAEDVIHSLGTCLKLGDLFFRVTDDRAKQSELYLVGMICYYGKHYSTFFFQTKIRKWMYFDDAHVKEIGPKWKDVVTKCIKGHYQPLLLLYADPQGTPVSTQDLPPQAEFQSYSRTCYDSEDSGREPSISSDTRTDSSTESYPYKHSHHESVVSHFSSDSQGTVIYNVENDSMSQSSRDTGHLTDSECNQKHTSKKGSLIERKRSSGRVRRKGDEPQASGYHSEGETLKEKQAPRNASKPSSSTNRLRDFKETVSNMIHNRPSLASQTNVGSHCRGRGGDQPDKKPPRTLPLHSRDWEIESTSSESKSSSSSKYRPTWRPKRESLNIDSIFSKDKRKHCGYTQLSPFSEDSAKEFIPDEPSKPPSYDIKFGGPSPQYKRWGPARPGSHLLEQHPRLIQRMESGYESSERNSSSPVSLDAALPESSNVYRDPSAKRSAGLVPSWRHIPKSHSSSILEVDSTASMGGWTKSQPFSGEEISSKSELDELQEEVARRAQEQELRRKREKELEAAKGFNPHPSRFMDLDELQNQGRSDGFERSLQEAESVFEESLHLEQKGDCAAALALCNEAISKLRLALHGASCSTHSRALVDKKLQISIRKARSLQDRMQQQQSPQQPSQPSACLPTQAGTLSQPTSEQPIPLQVLLSQEAQLESGMDTEFGASSFFHSPASCHESHSSLSPESSAPQHSSPSRSALKLLTSVEVDNIEPSAFHRQGLPKAPGWTEKNSHHSWEPLDAPEGKLQGSRCDNSSCSKLPPQEGRGIAQEQLFQEKKDPANPSPVMPGIATSERGDEHSLGCSPSNSSAQPSLPLYRTCHPIMPVASSFVLHCPDPVQKTNQCLQGQSLKTSLTLKVDRGSEETYRPEFPSTKGLVRSLAEQFQRMQGVSMRDSTGFKDRSLSGSLRKNSSPSDSKPPFSQGQEKGHWPWAKQQSSLEGGDRPLSWEESTEHSSLALNSGLPNGETSSGGQPRLAEPDIYQEKLSQVRDVRSKDLGSSTDLGTSLPLDSWVNITRFCDSQLKHGAPRPGMKSSPHDSHTCVTYPERNHILLHPHWNQDTEQETSELESLYQASLQASQAGCSGWGQQDTAWHPLSQTGSADGMGRRLHSAHDPGLSKTSTAEMEHGLHEARTVRTSQATPCRGLSRECGEDEQYSAENLRRISRSLSGTVVSEREEAPVSSHSFDSSNVRKPLETGHRCSSSSSLPVIHDPSVFLLGPQLYLPQPQFLSPDVLMPTMAGEPNRLPGTSRSVQQFLAMCDRGETSQGAKYTGRTLNYQSLPHRSRTDNSWAPWSETNQHIGTRFLTTPGCNPQLTYTATLPERSKGLQVPHTQSWSDLFHSPSHPPIVHPVYPPSSSLHVPLRSAWNSDPVPGSRTPGPRRVDMPPDDDWRQSSYASHSGHRRTVGEGFLFVLSDAPRREQIRARVLQHSQW

SEQ ID NO: 790 - DNA, 896 bp, Homo sapiens
gttgaagaaagaggatctggctgaaagacccgcaactttcacttgttgagaacctttagccagcgccggcgtgcatgtgttttagttttattctttttcccttgcccccaaagccgtggagtacctgctgttgctctcatgcctcttgccaacagtggcatctgctcagtgtagccatcaagaatttgaatgtcaatatctttgccttgaaatgaatggaaaagtatttgtcactcagcggcaatcattcttcaaataaaaggtcactggaaggactgagcgcattcaggagcctggaggaactcatcttggacaacaatcagctgggggacgaccttgtgttgccagggttacccagactgcataccttaaccctcaacaagaaccgaatcactgatttggagaacctgctggatcacttggcagaagtgacaccagctctggagtacctcagtctgctgggcaacgtggcctgtcccaacgagctggtcagcttggaaaaggatgaggaagactacaagagatacagatgctttgttctgtacaagctgcccaacttgaaatttctggatgcccagaaagtaaccagacaagaacgagaggaggcgttggtcagaggagtcttcatgaaggtggtgaagcccaaggcttctagtgaggacgttgccagctccccggagcgccactacacgcccttgccttctgcttccagggaactcaccagtcaccaaggtgtcctggggaagtgtcgctacgtttactatgggaaaaactcagagggcaacaggtttatccgagatgaccagctctgaagccaacttctgtataccttcacccatttcatgaaaataaaatcaaaagggaaatcaaaaataaagaaaacgctaaagaaaaaa

SEQ ID NO: 791 - protein, 198 aa, Homo sapiens
MEKYLSLSGNHSSNKRSLEGLSAFRSLEELILDNNQLGDDLVLPGLPRLHTLTLNKNRITDLENLLDHLAEVTPALEYLSLLGNVACPNELVSLEKDEEDYKRYRCFVLYKLPNLKFLDAQKVTRQEREEALVRGVFMKVVKPKASSEDVASSPERHYTPLPSASRELTSHQGVLGKCRYVYYGKNSEGNRFIRDDQL

SEQ ID NO: 792 - DNA, 105 bp, Homo sapiens
atggcaggaagtaaaactaatgagagtgtcctggggaagtgtcgctacgtttactatgggaaaaactcagagggcaacaggtttatccgagatgaccagctctga

SEQ ID NO: 793 - protein, 34 aa, Homo sapiens
MAGSKTNESVLGKCRYVYYGKNSEGNRFIRDDQL

SEQ ID NO: 794 - DNA, 2556 bp, Homo sapiens
aacttgctctaacttcctcggccgagccgggccgcgccgccgctgccgccgccgcgcgcggattctgcttctcagaagatgcactattatagatactctaacgccaaggtcagctgctggtacaagtacctccttttcagctacaacatcatcttctggttggctggagttgtcttccttggagtcgggctgtgggcatggagcgaaaagggtgtgctgtccgacctcaccaaagtgacccggatgcatggaatcgaccctgtggtgctggtcctgatggtgggcgtggtgatgttcaccctggggttcgccggctgcgtgggggctctgcgggagaatatctgcttgctcaactttttctgtggcaccatcgtgctcatcttcttcctggagctggctgtggccgtgctggccttcctgttccaggactgggtgagggaccggttccgggagttcttcgagagcaacatcaagtcctaccgggacgatatcgatctgcaaaacgtcatcgactcccttcagaaagctaaccagtgctgtggcgcatatggccctgaagactgggacctcaacgtctacttcaattgcagcggtgccagctacagccgagagaagtgcggggtccccttctcctgctgcgtgccagatcctgcgcaaaaagttgtgaacacacagtgtggatatgatgtcaggattcagctgaagagcaagtgggatgagtccatcttcacgaaaggctgcatccaggcgctggaaagctggctcccgcggaacatttacattgtggctggcgtcttcatcgccatctcgctgttgcagatatttggcatcttcctggcaaggacgctgatctcagacatcgaggcagtgaaggccggccgtcacttctgaggagcagagttgagggagccgagctgagccacgctgggaggccagagcctttctctgccatcagccctacgtccagagggagaggagccgacacccccagagccagtgccccatcttaagcatcagcgtgacgtgacctctctgtttctgcttgctggtgctgaagaccaagggtcccccttgttacctgcccaaacttgtgactgcatccctctggagtctacccagagacagagaatgtgtctttatgtgggagtggtgactctgaaagacagagagggctcctgtggctgccaggagggcttgactcagaccccctgcagctcaagcatgtctgcaggacaccctggtcccctctccactggcatccagacatctgctttgggtcatccacatctgtgggtgggccgtgggtagagggacccacaggcgtggaccgggcatctccctccatcaagcaaagcagcatgggggcctgcccgtaacgggaggcggacgtggccccgctgggcctctgagtgccagcgcagtctgctgggacatgcacatatcaggggttgtttgcaggatcctcagccatgttcaagtgaagtaagcctgagccagtgcgtggactggtgccacgggagtgccttgtccactgtccccctgtgtccaccagctattctcctggcgccggaactgcctctggtcttgatagcattaagccctgatggcgccggtggcgcggtgggcatggttcttcactgagagccggctctccttttcttaaagtgtgtaaatagtttatttataggggtaagaatgttctcacaccatttcacttcctcttcctctcctccagcattctcctctgagcagccttagatagtgtccatggctggagccgaccctttgagtccccttgagtgtcttaagaaccagcccacaacagcctctctttctcctccacatactgcagcctccctccatgcatcccacatacaagcactcccccactccccagcgtggcctcactgtcttctggtcttggtgctactgaaattgtcacccagaatttgaatcctgaccctccccactgcaagcccagggagccccagcccaagatggccagcctgaaactgttggccagggctcctcttgtggccatgtacccagggctggctggcctgccatttgcctctccccggagacagccgttcttctgcaaccacaccccgtgcctagccacaaccccaggctgcagctgctcagaagctccaggcattttgtttctggtgaccgcccctaatgggatatcggtgatcactggtccacccttcctgtcagggcttttctggggctgctcttggaaatgaagtcttaagtactgaataactcccctggggatagctggggcatttgtctagctgggctaccttctaacactttgccatagctcagaccacttctcatcgttcagggatggactgcaaccttaatttacttgccggagtgtacattctagtgtggtgtatactggtggctgttgatgacgattttttttttttttttacacaattctctgtagactaggagaagaatgcttgtgtttttcggaagtgtgatgcttctctttgactgccaaactcttttatggaatatatctttatattaaaaaaaaaa

SEQ ID NO: 795 - protein, 270 aa, Homo sapiens
MHYYRYSNAKVSCWYKYLLFSYNIIFWLAGVVFLGVGLWAWSEKGVLSDLTKVTRMHGIDPVVLVLMVGVVMFTLGFAGCVGALRENICLLNFFCGTIVLIFFLELAVAVLAFLFQDWVRDRFREFFESNIKSYRDDIDLQNVIDSLQKANQCCGAYGPEDWDLNVYFNCSGASYSREKCGVPFSCCVPDPAQKVVNTQCGYDVRIQLKSKWDESIFTKGCIQALESWLPRNIYIVAGVFIAISLLQIFGIFLARTLISDIEAVKAGRHF

SEQ ID NO: 796 - DNA, 598 bp, Homo sapiens
gaccccaggagcaggggtcgcgccgaagagcagagtccgcggctggaaaccaggcaggggagccacggagtagtcacacaggttttctgccgcctttcaactggtcttattttgctttcatttttcaccagcccatgtggggtgtttaatgttgcacgcgaacgcagtttcttccgggcccggaaggcccacgcacgcaacaatgttgtgcaagtgactggaaaccacctgagtgtccctccatgggggtgggttgcccagcatggacctctactcctgtcacaatgaagtcgactgtttcgtcgagggaagtggccaccgttgataaaatgaaaagacgccatgcagaatactgtgcacaggaggaaaggtctgcgtgccctaagagagagctgctggcgtgcagagagaagcagagatgccgacgacggggaggaaacacactggcggtggtgaggctccttccagcagccacagccctggttcctctcagtctgtgaccctcccacatccttcccatctatgagagcctgtaaactccttttgcttaaccttgttttagttaaggttttaaacagttgccaccagtgtgccctaa

SEQ ID NO: 797 - protein, 71 aa, Homo sapiens
MKSTVSSREVATVDKMKRRHAEYCAQEERSACPKRELLACREKQRCRRRGGNTLAVVRLLPAATALVPLSL

SEQ ID NO: 798 - DNA, 5572 bp, Homo sapiens
cctcccctcgcccggcgcggtcccgtccgcctctcgctcgcctcccgcctcccctcggtcttccgaggcgcccgggctcccggcgcggcggcggagggggcgggcaggccggcgggcggtgatgtggcgggactctttatgcgctgcggcaggatacgcgctcggcgctgggacgcgactgcgctcagttctctcctctcggaagctgcagccatgatggaagtttgagagttgagccgctgtgaggcgaggccgggctcaggcgagggagatgagagacggcggcggccgcggcccggagcccctctcagcgcctgtgagcagccgcgggggcagcgccctcggggagccggccggcctgcggcggcggcagcggcggcgtttctcgcctcctcttcgtcttttctaaccgtgcagcctcttcctcggcttctcctgaaagggaaggtggaagccgtgggctcgggcgggagccggctgaggcgcggcggcggcggcggcacctcccgctcctggagcgggggggagaagcggcggcggcggcggccgcggcggctgcagctccagggagggggtctgagtcgcctgtcaccatttccagggctgggaacgccggagagttggtctctccccttctactgcctccaacacggcggcggcggcggcggcacatccagggacccgggccggttttaaacctcccgtccgccgccgccgcaccccccgtggcccgggctccggaggccgccggcggaggcagccgttcggaggattattcgtcttctccccattccgctgccgccgctgccaggcctctggctgctgaggagaagcaggcccagtcgctgcaaccatccagcagccgccgcagcagccattacccggctgcggtccagagccaagcggcggcagagcgaggggcatcagctaccgccaagtccagagccatttccatcctgcagaagaagccccgccaccagcagcttctgccatctctctcctcctttttcttcagccacaggctcccagacatgacagccatcatcaaagagatcgttagcagaaacaaaaggagatatcaagaggatggattcgacttagacttgacctatatttatccaaacattattgctatgggatttcctgcagaaagacttgaaggcgtatacaggaacaatattgatgatgtagtaaggtttttggattcaaagcataaaaaccattacaagatatacaatctttgtgctgaaagacattatgacaccgccaaatttaattgcagagttgcacaatatccttttgaagaccataacccaccacagctagaacttatcaaacccttttgtgaagatcttgaccaatggctaagtgaagatgacaatcatgttgcagcaattcactgtaaagctggaaagggacgaactggtgtaatgatatgtgcatatttattacatcggggcaaatttttaaaggcacaagaggccctagatttctatggggaagtaaggaccagagacaaaaagggagtaactattcccagtcagaggcgctatgtgtattattatagctacctgttaaagaatcatctggattatagaccagtggcactgttgtttcacaagatgatgtttgaaactattccaatgttcagtggcggaacttgcaatcctcagtttgtggtctgccagctaaaggtgaagatatattcctccaattcaggacccacacgacgggaagacaagttcatgtactttgagttccctcagccgttacctgtgtgtggtgatatcaaagtagagttcttccacaaacagaacaagatgctaaaaaaggacaaaatgtttcacttttgggtaaatacattcttcataccaggaccagaggaaacctcagaaaaagtagaaaatggaagtctatgtgatcaagaaatcgatagcatttgcagtatagagcgtgcagataatgacaaggaatatctagtacttactttaacaaaaaatgatcttgacaaagcaaataaagacaaagccaaccgatacttttctccaaattttaaggtgaagctgtacttcacaaaaacagtagaggagccgtcaaatccagaggctagcagttcaacttctgtaacaccagatgttagtgacaatgaacctgatcattatagatattctgacaccactgactctgatccagagaatgaaccttttgatgaagatcagcatacacaaattacaaaagtctgaatttttttttatcaagagggataaaacaccatgaaaataaacttgaataaactgaaaatggacctttttttttttaatggcaataggacattgtgtcagattaccagttataggaacaattctcttttcctgaccaatcttgttttaccctatacatccacagggttttgacacttgttgtccagttgaaaaaaggttgtgtagctgtgtcatgtatatacctttttgtgtcaaaaggacatttaaaattcaattaggattaataaagatggcactttcccgttttattccagttttataaaaagtggagacagactgatgtgtatacgtaggaattttttccttttgtgttctgtcaccaactgaagtggctaaagagctttgtgatatactggttcacatcctacccctttgcacttgtggcaacagataagtttgcagttggctaagagaggtttccgaagggttttgctacattctaatgcatgtattcgggttaggggaatggagggaatgctcagaaaggaaataattttatgctggactctggaccatataccatctccagctatttacacacacctttctttagcatgctacagttattaatctggacattcgaggaattggccgctgtcactgcttgttgtttgcgcatttttttttaaagcatattggtgctagaaaaggcagctaaaggaagtgaatctgtattggggtacaggaatgaaccttctgcaacatcttaagatccacaaatgaagggatataaaaataatgtcataggtaagaaacacagcaacaatgacttaaccatataaatgtggaggctatcaacaaagaatgggcttgaaacattataaaaattgacaatgatttattaaatatgttttctcaattgtaacgacttctccatctcctgtgtaatcaaggccagtgctaaaattcagatgctgttagtacctacatcagtcaacaacttacacttattttactagttttcaatcataatacctgctgtggatgcttcatgtgctgcctgcaagcttcttttttctcattaaatataaaatattttgtaatgctgcacagaaattttcaatttgagattctacagtaagcgttttttttctttgaagatttatgatgcacttattcaatagctgtcagccgttccacccttttgaccttacacattctattacaatgaattttgcagttttgcacattttttaaatgtcattaactgttagggaattttacttgaatactgaatacatataatgtttatattaaaaaggacatttgtgttaaaaaggaaattagagttgcagtaaactttcaatgctgcacacaaaaaaaagacatttgatttttcagtagaaattgtcctacatgtgctttattgatttgctattgaaagaatagggtttttttttttttttttttttttttttttaaatgtgcagtgttgaatcatttcttcatagtgctcccccgagttgggactagggcttcaatttcacttcttaaaaaaaatcatcatatatttgatatgcccagactgcatacgattttaagcggagtacaactactattgtaaagctaatgtgaagatattattaaaaaggtttttttttccagaaatttggtgtcttcaaattataccttcaccttgacatttgaatatccagccattttgtttcttaatggtataaaattccattttcaataacttattggtgctgaaattgttcactagctgtggtctgacctagttaatttacaaatacagattgaataggacctactagagcagcatttatagagtttgatggcaaatagattaggcagaacttcatctaaaatattcttagtaaataatgttgacacgttttccataccttgtcagtttcattcaacaatttttaaatttttaacaaagctcttaggatttacacatttatatttaaacattgatatatagagtattgattgattgctcataagttaaattggtaaagttagagacaactattctaacacctcaccattgaaatttatatgccaccttgtctttcataaaagctgaaaattgttacctaaaatgaaaatcaacttcatgttttgaagatagttataaatattgttctttgttacaatttcgggcaccgcatattaaaacgtaactttattgttccaatatgtaacatggagggccaggtcataaataatgacattataatgggcttttgcactgttattatttttcctttggaatgtgaaggtctgaatgagggttttgattttgaatgtttcaatgtttttgagaagccttgcttacattttatggtgtagtcattggaaatggaaaaatggcattatatatattatatatataaatatatattatacatactctccttactttatttcagttaccatccccatagaatttgacaagaattgctatgactgaaaggttttcgagtcctaattaaaactttatttatggcagtattcataattagcctgaaatgcattctgtaggtaatctctgagtttctggaatattttcttagactttttggatgtgcagcagcttacatgtctgaagttacttgaaggcatcacttttaagaaagcttacagttgggccctgtaccatcccaagtcctttgtagctcctcttgaacatgtttgccatacttttaaaagggtagttgaataaatagcatcaccattctttgctgtggcacaggttataaacttaagtggagtttaccggcagcatcaaatgtttcagctttaaaaaataaaagtagggtacaagtttaatgtttagttctagaaattttgtgcaatatgttcataacgatggctgtggttgccacaaagtgcctcgtttacctttaaatactgttaatgtgtcatgcatgcagatggaaggggtggaactgtgcactaaagtgggggctttaactgtagtatttggcagagttgccttctacctgccagttcaaaagttcaacctgttttcatatagaatatatatactaaaaaatttcagtctgttaaacagccttactctgattcagcctcttcagatactcttgtgctgtgcagcagtggctctgtgtgtaaatgctatgcactgaggatacacaaaaataccaatatgatgtgtacaggataatgcctcatcccaatcagatgtccatttgttattgtgtttgttaacaaccctttatctcttagtgttataaactccacttaaaactgattaaagtctcattcttgtcaaaaaaaaaaaaaaaaaaaaaaaaaaa

SEQ ID NO: 799 - protein, 403 aa, Homo sapiens [sequence omitted]

SEQ ID NO: 800 - DNA, 4851 bp, Homo sapiens
ggcggagggagctggagctgtcacagtccccgggtgcgcctgaccgagccaagtggggtgtcatggccgcggggggcagcggctgcacttcctcagcgggcggcggcggccggggagttaatcctcgacgcacgggtcggtgtgtcccgtttccctctgtgcggcggccggcgggaccataagggcttaactcatatatttaacccccctccaaaaaggtttgaaagtattcttgaagggctgtttggacctgcattattaaaagatctcagtttatttaaagactgtgaacctgaaagcatttctgattggacttttgatgaaaactgtttattctgttgcttgagaagagataaagtaaagggacacttagtcggtctggatgaaccagcttcgggagctgggcaagaagctctgcttaaacaagagcaagcaaaaatcattcgattcgagagacaagcagaagaattcctcaatgcagtcttttatagaaaagacagtccctgggtctccgaccccaatattcccctagtggcccgtgagatcatgcagcgaatgatccaacaatttgctgctgaatatacctcaaaaaatagctctactcaggaccccagccagcccaatagcacaaagaaccaaagcctgccgaaagcatctccagtcaccacctctcccacggctgcaactactcagaaccctgtgctcagcaaacttctcatggctgaccaagactcacctctggaccttactgtcagaaagtctcagtcagaacctagcgaacaagacggtgtacttgatctgtccactaagaaaagtccatgtgctggcagcacttccctgagccactctccaggctgctccagtactcaagggaacgggcgacctgggagacccagccagtaccgcccagacggacttcggagtggtgatggggtacctccaagaagcttacaggatggaaccagggaaggttttggacactccacatcactcaaagttccactggctcgatccctgcagattagtgaagaactactgagcagaaaccaattgtccacagctgccagccttgggccatctggattacagaatcatggacaacacttaatattatccagggaagcctcttgggcaaaaccacattacgagttcaacctcagccgtatgaagttcaggggaaatggtgcactcagcaacatcagtgaccttccttttcttgcagaaaactctgcctttccaaaaatggcacttcaagcaaaacaagatggaaaaaaggacgtgagccattcatctcctgtagatttaaagataccacaagttcgaggaatggatctttcttgggagtctcgcactggtgatcagtacagctatagctctttggtaatgggttcacaaacggagagcgcgcttagtaaaaaattaagggctattcttccaaaacaaagtagaaaaagcatgttagatgctgggcccgattcttggggctcagatgctgagcagtctacccctggacagccatatcccacatcggatcaagaaggagaccctggctccaagcagcctcggaagaaaagagggcgttacagacagtacaacagtgagatactggaggaagcaatctcagtggttatgagtggaaaaatgagtgtttccaaagctcagagtatttatgggattccccacagtacactggagtacaaagtaaaggagaggctgggcactttgaaaaaccctccaaagaaaaagatgaaattaatgaggtcggaggggccagatgtttctgtaaagattgaattagatccccagggagaggcagcacaaagtgcaaatgaatcaaaaaacgagtaggaatactgtagagtgccaattactgtacaaactgggtgagcactactgcatcattgttcagctatcattgcttgcacgtaatttcatttactgtgacacttgcttctttgcagattttgcattgacttgtgtgtacagagatgaaatgtgcattctgaatgttgcatattttaaatttttcatgtgcagtatggctcggaatatgtttggccttttgcatgtttctctacaaaagagaattgagttacctcacagagaacagatacatggaagtggactccttgcctgtagagcctgcatgcttttttgtttttttttgttgttgttgttttttcttaagttatatttgtttttactttttaaaaaagaagaggaaacaaagcccccttttagaaactacgtctgtcatactgggagctttatcactgcaaattggaaagccatcttatacaaaattattcacatttttcatctacgattcaactaatcgaaggattaaactaaagaaaaaactaagaagaacaatgaacctttgactttgagaaatttggttattcactgacataattattgggtcatttatagttacattttataattttcttctcactattaaatttatttaaattagcaagctattagtgctcacccagaggggaaggtggtggaaaatgtgcacacactaccttcagaaatgcttcagttaattactttgaacactacctttgctgtaatttcatttgagattttctaagggtagaatttggtctcaccaacaagtgaggatatagccttatctcatggaggacgagctccgtatttactcaggagcagtcagggtacattacataaaacaatggaggatgcctcattttagcaaactaggtttctttgtattcttcagtccttttacagaattgatgtgctaactgaatatcattgcagcaactagactaagatattcaagatctctttattggggatgggagaaatagggaaagaaatgtgtataagtaattatgatattgcaaaagtgatacttagattttacagcctcagtagtctgcccagtgtccacattaatgaaggatccatgtttgtagtgagagaaaaaaaccccaaggtaacccgatatgatttaggatgcatatcagttctaacaattcaatcagaagtcaagctcattggaattccttttttaactgatccaaatactagtagaagggggagggagaggtgttgggttttttttttaagtttttatttaattttgttggttagaatttttttctgtttttggcatcctacataataccccccttcttgactttttctgataattagctgatattcatggttgtttagcacacagttcaggacctttgagatcatgtttgtataagcactccttgaagaatatctaagctttttctgagatgggcttttgaaattataataagggaagtttattttctgcggtttttgcaagaataagcaaagcccatggaatttaatttttcattgtgatcagattaaaattactatttgtgcaaaacaaattccacaccacatgtactgtatattctaatctgctgagaaaggtggtcaggcccttctaaatgcttaaccaaaaacaaacattattggagtttcagtgtaaaataaaattaaaattggagggttggttagattgatttcagatggatactaacagtttgaggggaggtccagatatttccaaggcataaattcttgcctggaaactttggagcaattaattaaattaggttaagttttccctcagcaacctgtgtgttcaaaggttaggcacaccattgctgttactaaaatacatgcactgctcattcttgacatagcttgggtgtgggttcctcttgttttggttattttgtgtagcagtttaatcagtggataactgagcctgtttcctcttagctttctagacttcttaacagaaaaaacagtttgggttcaatagcattttatgattctacaatattttgtcacctagctggaagttgcaataaaaattccttatgaaatatatggttttcatctgtgattgaaggaaatcatagaaagtttgctgaaagcaaagggctaagcttatgaaggaatgcctcctttgttacacactcaagaatttgtcagcacacaattaattgcagccatagtacctttttgcgtaacgtttgggatattcagtagcccaggattgctacaaaaaggtcctttgagaaaattaatttgtgcttgcttttatcccctctcagaaagacatcactaaaggcccattaaaaatctggccctaaaagttcaacttttgtagagtttattgttcagagaggtttaatcctatgtggtagtctatataagtgatgtatgagttgagttatgtaaattttgtcattgtagtgtacatggagtgatcattttactaacataaatattttctatgtgtgtttcagtggatgacaatcgagcagcagaagaatggtgtgcctaccctttaatgctgcagtttaagagaacttgtattgtgtcatttcagattgtaggctgagagttgtaaatagtgaaaatttgagtacttctattatttgttttggttagaaagtgaatttaaaaaacaaaccaaactctaaactttctcagattaaaagtcctgagacctgaagattgtaatattcatgtctgtgaagcttttaaacattacacttgagatcagtcatgacttgatattcaggtaaattttcttttccaagaagcttttgaataagcatatttcctccaaaggtctctctctttctctctctttttttgagtgtagattattttaaagcactaattgcattacattggtaactgcaatataaaatagccattattgttttgtgaagcatggttgaaattagctagtggtcccttttgaatttcatgagcctctcaaaaaagaaaaacttaagaaaaaaaaaaaaaaaa

SEQ ID NO: 801 - protein, 433 aa, Homo sapiens
MQRMIQQFAAEYTSKNSSTQDPSQPNSTKNQSLPKASPVTTSPTAATTQNPVLSKLLMADQDSPLDLTVRKSQSEPSEQDGVLDLSTKKSPCAGSTSLSHSPGCSSTQGNGRPGRPSQYRPDGLRSGDGVPPRSLQDGTREGFGHSTSLKVPLARSLQISEELLSRNQLSTAASLGPSGLQNHGQHLILSREASWAKPHYEFNLSRMKFRGNGALSNISDLPFLAENSAFPKMALQAKQDGKKDVSHSSPVDLKIPQVRGMDLSWESRTGDQYSYSSLVMGSQTESALSKKLRAILPKQSRKSMLDAGPDSWGSDAEQSTPGQPYPTSDQEGDPGSKQPRKKRGRYRQYNSEILEEAISVVMSGKMSVSKAQSIYGIPHSTLEYKVKERLGTLKNPPKKKMKLMRSEGPDVSVKIELDPQGEAAQSANESKNE

SEQ ID NO: 802 - DNA, 3313 bp, Homo sapiens
gcgccgagcgcgggtttccgctcggggcgggcgatagagacagcgcgtcgcgcctttagcttctttcccagactccggcccagctcctgcgatctccacagcagcctctgaggccgcccccagagagcatcaggatggctgaggaaaagggtggaaagcaagtcctggaagaatctgcatttgaagaaatggaaagagattttcagggagttctccatgaactttctggagacaaaagtttggaaaaatttcggattgaatatgagaggcttcatgctgtcatgaaaaagtcttatgacaatgaaaagcgtctgatggccaaatgcagagagctaaatgcagagattgtagtgaattctgcgaaggtcgccactgcccttaagctctctcaggatgatcagaccaccattgcatccctaaagaaggaaattgaaaaggcctggaagatggtggactcagcctatgacaaagagcagaaggccaaggagacgattcttgctctgaaagaggaaatagtgaacctgaccaaactagtggagcaggggtctggactgtcaatggaccagcatagcaacatccgagatttactgaggttcaaagaagaagtgacaaaggagagagaccagctcttatcagaagtggtaaaattacgagaatccctagctcagaccactgaacagcagcaggaaacagagcgatcaaaagaggaggctgaacatgccatcagtcagttccaacaagaaatccagcaacgtcagaacgaagcttcccgggagttccggaagaaggaaaaactagagaaagagctcaagcagattcaggcagacatggacagcaggcagacagaaataaaagccctgcagcagtatgtgcagaagagcaaggaggagcttcagaagctggagcagcagctgaaggagcagaagatattgaatgagagagctgcaaaggaactcgagcaatttcagatgagaaatgctaaacttcagcaagagaatgaacagcacagtttggtctgtgagcagctatcccaggaaaaccaacagaaggcgttggagctcaaagccaaagaggaagaagtccatcaaatgcgccttgacatcgggaagctcaacaaaatcagagaacaaattcataagaaattgcaccacaccgaagatcaaaaggcagaagtcgaacagcacaaagaaaccctaaaaaatcagattgtgggattagagagagaggtagaggcttcaaagaaacaagcagaacttgacagaaaggcaatggacgagcttctaagagaaagggacatactaaataagaacatgcttaaggcggtcaatgcgacccagaagcagacagacttggtaaagctccatgaacaagccaagaggaacctggagggagaaatccagaactacaaggatgaggctcagaagcagagaaagatcatctttcatctggaaaaggagcgtgaccggtacatcaaccaagccagtgaccttacgcaaaaggtccttatgaacatggaagacataaaagttcgtgaaacacagatttttgactacaggaaaaaaatagctgaatcagagattaaattaaaacagcaacagaacctatatgaagctgtgagatcagacagaaatctgtatagcaaaaatctggttgaggctcaggatgaaataacagatatgaagagaaagttaaagattatgatccatcaggtagatgagctgaaagaagacatctctgccaaagagtccgcacttgtgaagctgcacctggaacagcagcgaatagaaaaggaaaaggaaacattgaaggctgagctgcagaagctgagacaacaagccctggagacaaaacactttattgaaaagcaagaagctgaagagagaaaactcctgcgaataattgctgaggctgacggggagaggttgagacagaagaaggaattagaccaggtcatcagtgagagagatatcctggggtctcagcttgttcggcgcaatgatgagttagctttgctctatgagaagatcaagatccaacagtctgtgctgaataaaggggagagccagtacaaccagaggttggaggacatgagaatcctcagacttgagatcaagaagcttcgccgggaaaaggggattcttgccaggagtatggctaatgttgaagaactcagacaggagttttttcacatgcaaagagaattgttgaaggagaggacacgctgccgagccctggaggaggagctggagaatcccctgaatgtgcacagatggaggaagctcgaggccagcgaccccaatgcatatgagctgatacagaaaattcacaccctgcagaagcgtctcatcagcaagactgaagaggtggttgaaaaagagctgctcctccaggaaaaggagaaactctacatggaactaaagcacgtcttggcccgccagcctggacctgaggctgcggaacagctgaagctgtaccgacgcacgctgcatgacaagaagcagcagctgaaagttttgtcttcagaattgaatatgtatgaagtacagagcaaagaatataaatatgaggtagagaaacttaccaatgagctccagaatttaaagaagaaatacctcgctcagaaacgtaaagaacaacttcaaaaaaacaaggacacagcacccatggataacaccttcttaatggtcaaaccaaatggtcctggttttactgggggcggatttcctctcaggtcaaccaaaatgacgttctaacctgaagctgctggctgtttccagttgaacaactcatgaaatctgctctgggacattttgggggaatctcaaagtccttggatcatagaactgagtgctgagaatccaggatggaaagaaatgcagaactatcatagtcacatacatataagagggatggtgttttgtctggttcacgttgatattaacagatcataattctctctgttcagttaggctgacctattgcatgaagcaaatcttttgttgctaccccattgattgaaatgtactagaccttaatttctttattacagacattggtgtacttgaaggttttatatttaaaagtatttttgaaatgcaatgtgtcccctctcaccttattaacaataatctattttaattattcctcattaacaagtcattgcatgagatgagaaagaaggacaaactcttaagaatttaaaaagtgttttgagaatgatttctatatggaatttcttttcaggcccggaatgggaaaatctattccaaagagacacactaataaatacttcattataaaaaataaaaaagaa

SEQ ID NO: 803 - protein, 872 aa, Homo sapiens
MAEEKGGKQVLEESAFEEMERDFQGVLHELSGDKSLEKFRIEYERLHAVMKKSYDNEKRLMAKCRELNAEIVVNSAKVATALKLSQDDQTTIASLKKEIEKAWKMVDSAYDKEQKAKETILALKEEIVNLTKLVEQGSGLSMDQHSNIRDLLRFKEEVTKERDQLLSEVVKLRESLAQTTEQQQETERSKEEAEHAISQFQQEIQQRQNEASREFRKKEKLEKELKQIQADMDSRQTEIKALQQYVQKSKEELQKLEQQLKEQKILNERAAKELEQFQMRNAKLQQENEQHSLVCEQLSQENQQKALELKAKEEEVHQMRLDIGKLNKIREQIHKKLHHTEDQKAEVEQHKETLKNQIVGLEREVEASKKQAELDRKAMDELLRERDILNKNMLKAVNATQKQTDLVKLHEQAKRNLEGEIQNYKDEAQKQRKIIFHLEKERDRYINQASDLTQKVLMNMEDIKVRETQIFDYRKKIAESEIKLKQQQNLYEAVRSDRNLYSKNLVEAQDEITDMKRKLKIMIHQVDELKEDISAKESALVKLHLEQQRIEKEKETLKAELQKLRQQALETKHFIEKQEAEERKLLRIIAEADGERLRQKKELDQVISERDILGSQLVRRNDELALLYEKIKIQQSVLNKGESQYNQRLEDMRILRLEIKKLRREKGILARSMANVEELRQEFFHMQRELLKERTRCRALEEELENPLNVHRWRKLEASDPNAYELIQKIHTLQKRLISKTEEVVEKELLLQEKEKLYMELKHVLARQPGPEAAEQLKLYRRTLHDKKQQLKVLSSELNMYEVQSKEYKYEVEKLTNELQNLKKKYLAQKRKEQLQKNKDTAPMDNTFLMVKPNGPGFTGGGFPLRSTKMTF

SEQ ID NO: 804 - DNA, 7108 bp, Homo sapiens
atgtgggaccagtgtgggaaggtcttgtttatgtgggaggggggaccacagataacaaagaacagccccttgcccccctcattgaaaaccagctgtgcatctagacctctgtcttcccacagtgccgccaagctcctggacaagaacccattctcggtcagtaacccgaaccctctgcttccttcacctgccagtctccagctggctcaactgcaggcccagctcaccctccaccggctgaagctggcacagacagctgtcaccaacaacactgcagccgccacagtcctgaaccaagtcctctccaaagtggccatgtcccagcctctcttcaatcaactgaggcatccgtctgtgatcactggcccccacggccatgctggggttccccaacatgctgcagccatacccagtacccggtttccctctaatgcaattgccttttcaccccccagccagacacgaggccccggaccctccatgaaccttcccaaccagccacccagtgccatggtgatgcatcctttcactggggtaatgcctcagacccctggccagccagcagtcatcttgggcattggcaagactgggcctgctccagctacagcaggattctatgagtatggcaaagccagctctggccagacatatggccctgaaacagatggtcagcctggcttcctgccatcctcggcctcaacctcgggcagtgtgacctatgaagggcactacagccacacagggcaggatggtcaagctgccttttccaaagatttttacggacccaactcccaaggttcacatgtggccagcggatttccagctgagcaggctgggggcctgaaaagtgaggtcgggccactgctgcagggcacaaacagccaatgggagagcccccatggattctcgggccaaagcaagcctgatctcacagcaggtcccatgtggcctccaccccacaaccagccctatgagctgtacgaccccgaggaaccaacctcagacaggacacctccttccttcgggggtcggcttaacaacagcaaacagggttttatcggtgctgggcggagggccaaggaggaccaggcgttgctatctgtgcggcccctgcaggctcatgagctgaacgactttcacggtgtggcccccctccacttgccgcatatctgtagcatctgtgacaagaaggtgtttgatttgaaggactgggagctgcatgtgaaagggaagctgcacgctcagaaatgcctggtcttctctgaaaatgctggcatccggtgtatacttggttcggcagagggaacattgtgtgcttctcccaacagcacagctgtttataaccctgctgggaatgaagattatgcctcaaatcttggaacatcatacgtgcccattccagcaaggtcattcactcagtcaagccccacatttcctttggcttctgtggggacaacttttgcacagcggaaaggggctggccgtgtggtgcacatctgcaatctccctgaaggaagctgcactgagaatgacgtcattaacctggggctgccctttggaaaggtcactaattacatcctcatgaagtcgactaatcaggcctttttagagatggcttacacagaagctgcacaggccatggtccagtattatcaagaaaaatctgctgtgatcaatggtgagaagttgctcattcggatgtccaagagatacaaggaattgcagctcaagaaacccgggaaggccgtggctgccatcatccaggacatccattcccagagggagagggacatgttccgggaagcagacagatatggcccagaaaggccgcggtctcgtagtccggtgagccggtcactctccccgaggtcccacactcccagcttcacctcctgcagctcttcccacagccctccgggcccctcccgggctgactggggcaatggccgggactcctgggagcactctccctatgccaggagggaggaagagcgagacccggctccctggagggacaacggagatgacaagagggacaggatggacccctgggcacatgatcgcaaacaccacccccggcaactggacaaggctgagttggacgagcgaccagaaggagggaggccccaccgggagaagtacccgagatctgggtctcccaacctgccccactctgtgtccagctacaaaagccgtgaagacggctactaccggaaagagcccaaagccaagtgggacaagtatctgaagcagcagcaggatgcccccgggaggtccaggaggaaagacgaggccaggctgcgggaaagcagacacccccatccggatgactcaggcaaggaagatgggctggggccaaaggtcactagggcccctgagggcgccaaggccaagcagaatgagaaaaataaaaccaagagaactgatagagaccaagaaggagctgatgatagaaaagaaaacacaatggcagagaatgaggctggaaaagaggaacaggagggcatggaagaaagccctcaatcagtgggcagacaggagaaagaagcagagttctctgatccggaaaacacaaggacaaagaaggaacaagattgggagagtgaaagtgaggcagagggggagagctggtatcccactaacatggaggagctggtgacagtggacgaggttggggaagaagaagattttatcgtggaaccagacatcccagagctggaagaaattgtgcccattgaccagaaagacaaaatttgcccagaaacatgtctgtgtgtgacaaccaccttagacttagacctggcccaggatttccccaaggaaggagtcaaggccgtagggaatggggctgcagaaatcagcctcaagtcacccagagaactgccctctgcttccacaagctgtcccagtgacatggacgtggaaatgcctggcctaaatctggatgctgagcggaagccagctgaaagtgagacaggcctctccctggaggattcagattgctacgagaaggaggcaaagggagtggagagctcagatgttcatccagcccctacagtccagcaaatgtcttcccctaagccagcagaggagagggcccggcagccaagcccatttgtggatgattgcaagaccagggggacccccgaagatggggcttgtgaaggcagccccctggaggagaaagccagcccccccatcgaaactgacctccaaaaccaagcttgccaagaagtgttgaccccggaaaactccaggtacgtggaaatgaaatctctggaggtgaggtcaccagagtacactgaagtggaactgaaacagcccctttctttgccctcttgggaaccagaggatgtgttcagtgaacttagcattcctctaggggtggagttcgtggttcccaggactggcttttattgcaagctgtgtgggctgttctacacgagcgaggagacagcaaagatgagccactgccgcagcgctgtccactacaggaacttacagaaatatttgtcccagctggccgaggagggcctcaaggagaccgagggggcagatagcccgaggccagaggacagcggaatcgtgccacgcttcgaaaggaaaaagctctgatgcttctgcttctgctgctactgctgctgctgcaaggttggaaaggagagcttgctgaagtggggccttcctgattctggggacaggactaaagcctgagaggaaggaaaaccaagcagggcacattgcttgggcttgttcccagagactcagtgaaatgcccctgatatgtctccaggagcaagtcacccaggtgtgtccagcccactgagggtcaccaactctctccctgctgactcttgtttctctcaatctttcaattcgtttttctctcttttcctcttgttctttctctccctccctccttatgtgccaaggatcgtttccttttcacaaaacccaacttctcagggattttcacagtgtttaaattcttggtaggatataacaggtcaggcctagctgagtcaggcaaggaaaaggtttaatggaaactcctgggtcaggcgaacccctgcagtgagtctacagcagtatctctgcctggtgtcccatgtatcccctgcatgaggagctgagtcaggtctgcagtcctggtgaggggacatcacggacaatctgttggcagagctgggagggtcttcattaacctcttcctccaactgggccacccttttgaaaagcccctgtttttaataactgtttcatcctctcagttattctagaaatctgccagacttatgccttaaagtaaaattaaatgaattttagagaagatgaaaagagcccttcattttggaagctctgataagtttcctccaaacttattcccctcctcttgatttcaggagatgtcagggtttttctattctggacaatgaatttggtacagagtcactgtaattaaatataaaaacagaagcatcttcctccagctaaagcagcagttggcgcgggcttaggttgaatgctggcctctctgcaaagcacagctttggctcgagaggcacagctccaggctgtggaaaacagagttgtcttgggggttaaatgagcttatttaagtcaaggaaacatcatctgtccttgattcagccttggtgcctgcactctggggtacaaccacctcacagtaggatggtttttaaatggccccccagttgggggagaagctaaggaaagagaaggctgcagatccaaagagtggcattgaagtttgctgggtgtctgtaggtggaccctttccagctgggcagatagttgagggctccctgggtttgactgtatgtgcagactttgataccaaaatgttatgaaaagtcgtgattcccgctgctctttctggtactggagggtgggtaccttcaggctgtggggtctctagcctgatattccattgaaagggtgtgggataaaggtgctgggggaaatgaggctctgccacagccatagagaggccctcgggcagttaagaagggagcctggagctgttttcatgagcagagatactctcctgaaagcacccttcatagcttagcccaggaaaaataaaacaaggaagacaggtcactctcccctaggcagttcctgttgtttctgttcctgaccttgggcaggcagactgagaagggactgtgtagggttttgttttgttttttttcattttcctttttatggcatgtgagagcatactgtacattctgtcctctgtactaatggaggaagggcagagagattagttcaaggctaacattttatatcaggtaactgaggcacacaaagggaacaaatgaagaacataaaatgatcagtgtaaacctgaaagcacgcagtcattggcaagggacaggctcatgggagctggtgagagagagcagttaaggcaagcaccaggggaaagcagaccaacttgaacagatgtgatgcggagaggttggaagaagcaagaaacctgaactcatcatcaggctattaaataaaatttataggaggctgttggtttggactgagctcctgcaataggcccaacagaccaaaacaaaagggagtcactcatgttgaagttctgtcttccaggaaatcaggagagagagagagagaaagaatagccaaatccccaaacaggccagttttaaccagcatgatgaagtgtccttggttttaacctttataaggaaagcagctttgagatgaccagtctggtttttgttctttgtgtctgctttcctcagcccttttctgtctataaagccaacctcctccgctcagctcatgggaacactcattctattttatagaatgacatgttgcccaattctagaatcaaaaataaaggccaactaagatcttcaaagtaaatttgttgtaattttatcttttgagaagaccatatgggggctgctgaaaagttggtatctcaaataaagtctgaagatcacggctcagcccagattgttcccctggccaactccacaggtttgaacctggcattctggacaccagctatgcctcctccatttctcagaaaacctttgatcttgtgtgtctttcttcctactgaagggaattgtgggggcagttctttggccttcttgctgaactttgctggaaatagcccacaatttttatcagaggttagaactgtacattatcagagagactggacactttatcccctagcaaagtgggagaagattttaccagctcattccactccaccctggccttcccccaccccccatccccagcagcatttccatggaaatccagatggtcgtgtagtgttatggctctcttgtgatagactggccttcatattggagagctagggagagcccctgggagggagagagataaggcgctatctgccttcaatcagaaccttcggtttaaaatcatctaagagtctatacttgtgtgtacatacgtatttatttttatttatttttatacaattccattggcatggtccttcaccgaccctatgatttgcactttttatttctatgtgtgccacacacaatgcagtattaatggcaaccaggtaaatattgatttattttttaaagcttttcttcagtgttttgtcaaccatttcaaagtgtctcccaaaaaaggatgctgaagagcaattgctcccttaagcaacagattcatatttaccctgggttaatacaacaaaaggcctgtataattgtcttttcattgttaacacccaaaatagcatctatctagacagtatccccaaagaatttggaaaatctgatggtgtgagcagcagccgttagtatcagggtttcccattcttggacagtccgaggctgtgacctgttagataattagattatacttgaactggaccagagtttgttttttgaatttatgagaaaaaccaaaacactaagttaagtttgaacttgtaaagtattgaaatttgttgagtgtcctataaattgtcactacttttcctgatctgtataactgactgcaaagtgtttgtttttacaaaagagaaaagaaaagatttttaataaagagaatttgaaagctgtga

SEQ ID NO: 805 - protein, 1204 aa, Homo sapiens
MWDQCGKVLFMWEGGPQITKNSPLPPSLKTSCASRPLSSHSAAKLLDKNPFSVSNPNPLLPSPASLQLAQLQAQLTLHRLKLAQTAVTNNTAAATVLNQVLSKVAMSQPLFNQLRHPSVITGPHGHAGVPQHAAAIPSTRFPSNAIAFSPPSQTRGPGPSMNLPNQPPSAMVMHPFTGVMPQTPGQPAVILGIGKTGPAPATAGFYEYGKASSGQTYGPETDGQPGFLPSSASTSGSVTYEGHYSHTGQDGQAAFSKDFYGPNSQGSHVASGFPAEQAGGLKSEVGPLLQGTNSQWESPHGFSGQSKPDLTAGPMWPPPHNQPYELYDPEEPTSDRTPPSFGGRLNNSKQGFIGAGRRAKEDQALLSVRPLQAHELNDFHGVAPLHLPHICSICDKKVFDLKDWELHVKGKLHAQKCLVFSENAGIRCILGSAEGTLCASPNSTAVYNPAGNEDYASNLGTSYVPIPARSFTQSSPTFPLASVGTTFAQRKGAGRVVHICNLPEGSCTENDVINLGLPFGKVTNYILMKSTNQAFLEMAYTEAAQAMVQYYQEKSAVINGEKLLIRMSKRYKELQLKKPGKAVAAIIQDIHSQRERDMFREADRYGPERPRSRSPVSRSLSPRSHTPSFTSCSSSHSPPGPSRADWGNGRDSWEHSPYARREEERDPAPWRDNGDDKRDRMDPWAHDRKHHPRQLDKAELDERPEGGRPHREKYPRSGSPNLPHSVSSYKSREDGYYRKEPKAKWDKYLKQQQDAPGRSRRKDEARLRESRHPHPDDSGKEDGLGPKVTRAPEGAKAKQNEKNKTKRTDRDQEGADDRKENTMAENEAGKEEQEGMEESPQSVGRQEKEAEFSDPENTRTKKEQDWESESEAEGESWYPTNMEELVTVDEVGEEEDFIVEPDIPELEEIVPIDQKDKICPETCLCVTTTLDLDLAQDFPKEGVKAVGNGAAEISLKSPRELPSASTSCPSDMDVEMPGLNLDAERKPAESETGLSLEDSDCYEKEAKGVESSDVHPAPTVQQMSSPKPAEERARQPSPFVDDCKTRGTPEDGACEGSPLEEKASPPIETDLQNQACQEVLTPENSRYVEMKSLEVRSPEYTEVELKQPLSLPSWEPEDVFSELSIPLGVEFVVPRTGFYCKLCGLFYTSEETAKMSHCRSAVHYRNLQKYLSQLAEEGLKETEGADSPRPEDSGIVPRFERKKL

SEQ ID NO: 806 - DNA, 3591 bp, Homo sapiens
cgaccacccggcctcggccaataagcgccgccctctcgcccccgtgttactgggtagaagaaaacaaaaacaaacagagcgagaagggccagagactctccgaggcggcggcagagacagaagagcggggtcggggccggctgaccaggaacctgggcgagcagcggcgggggcccgagggattctgaaggaagatttccattaggtaatttgtttaatcagtgcaagcgaaattaagggaaaatggatgtagaaaatgagcagatactgaatgtaaaccctgcagatcctgataacttaagtgactctctcttttccggtgatgaagaaaatgctgggactgaggaaataaagaatgaaataaatggaaattggatttcagcatcctccattaacgaagctagaattaatgccaaggcaaaaaggcgactaaggaaaaactcatcccgggactctggcagaggcgattcggtcagcgacagtgggagtgacgcccttagaagtggattaactgtgccaaccagtccaaagggaaggttgctggataggcgatccagatctgggaaaggaaggggactaccaaagaaaggtggtgcaggaggcaaaggtgtctggggtacacctggacaggtgtatgatgtggaggaggtggatgtgaaagatcctaactatgatgatgaccaggagaactgtgtttatgaaactgtagttttgcctttggatgaaagggcatttgagaagactttaacaccaatcatacaggaatattttgagcatggagatactaatgaagttgcggaaatgttaagagatttaaatcttggtgaaatgaaaagtggagtaccagtgttggcagtatccttagcattggaggggaaggctagtcatagagagatgacatctaagcttctttctgacctttgtgggacagtaatgagcacaactgatgtggaaaaatcatttgataaattgttgaaagatctacctgaattagcactggatactcctagagcaccacagttggtgggccagtttattgctagagctgttggagatggaattttatgtaatacctatattgatagttacaaaggaactgtagattgtgtgcaggctagagctgctctggataaggctaccgtgcttctgagtatgtctaaaggtggaaagcgtaaagatagtgtgtggggctctggaggtgggcagcaatctgtcaatcaccttgttaaagagattgatatgctgctgaaagaatatttactctctggagacatatctgaagctgaacattgccttaaggaactggaagtacctcattttcaccatgagcttgtatatgaagctattataatggttttagagtcaactggagaaagtacatttaagatgattttggatttattaaagtccctttggaagtcttctaccattactgtagaccaaatgaaaagaggttatgagagaatttacaatgaaattccggacattaatctggatgtcccacattcatactctgtgctggagcggtttgtagaagaatgttttcaggctggaataatttccaaacaactcagagatctttgtccttcaaggggcagaaagcgttttgtaagcgaaggagatggaggtcgtcttaaaccagagagctactgaatataagaactcttgcagtcttagatgttataaaaatatatatctgaattgtaagagttgttagcacaagttttttttttttttttttttaagcacttgttttgggtacaaggcatttctgacattttataaacctacatttaaggggaatttttaaaggaaatgttttttcttttttttttgtttttcgagggggcaaggagggacagaaaagtaacctcttcttaagtggaatattctaataagctaccttttgtaagtgccatgtttattatctaatcattccaagttttgcattgatgtctgactgccactcctttctttcaaggacagtgttttttgtagtaaaatcactggtttatacaaagctttatttagggggtaaagttaagctgctaaaaccccatgttggctgctgctgttgagatactgtgctttgggagtaaaaaaagaaagttatttctttgtcttaaagaatttttaaaaaattagtcatgagacttattcatctttccagggaacatactgattggtcttaaaagactagacagttaagtaaaaggtggctggaacatctatttttctacaaaactggaaaaatgaacctggttctagaagaatgtacaccaaaataaaacatgtgaagcagtattgattctttattgggagtacatttttttaggtctcttaaactttaatttcacacagtaaattttgaatctcataaggaagcatatttgaacctagtcaatttaatcttagtgttcccttgaaaactttttttccctacaaaattttaagtgaaaaatacaatagtaaattaagattacactggggaaaaaaatgcaggtatcactttactccattgttatctgacctagagcttaattaagttttagaaatatgtaataccttccatcattccatcatccttaaattctgttaccaaataatggctaatgttacaaaaagttatactccagagacccaaagcttgacatttacctaatgtatgagaaaatattaccaattaacaataaagaatgatcatatttttaacctcttttacatagcctaataactcagcaaggcctcaacgtctgtgctaatttaaactgccaaatattgactgcagcaaacaagaattatattcagaatttatgagggtactgttaggagtatactgcttacaggtttagatatagtctgttagaattaaaaccaagtttagtgttcatatttacctcatgggctttatcaagcccatattacctcagcttatatatagttaccatttttaggtttttaattgtttgacacttggatgataaatgcagtcattttattctcaagtgcttaaaattaatgtaattaaaagcttagctgactacagaataggtgagggtttcttaaaaatgagatttaagggctgggcacggtggctcatgcctgtaatcccagcactttgggaggccgaggtgggcggatcacttgaggttgggagttcatgaccagcttgaccaacatgaagaaaccctgtctctattaaaaatacaaaagtagccaggcatggtggcgcatgcgtgtaatcccagctacttgggaggctgaggcaggagaattgcttgaacctgggaggcagaggttgcagtgagtcgagatggtgccattgctctcgtttgggcaacaagagtgaaactcttgtctcaaaaaaaaaaaaaaatgaggtttaagacagttttgtcattactggtgggatctggtcacacaagatagcattaaacgtgacatggcacataaaattggttaaaaaattttgttttttaattacgtaatgtaaaagcccaacaaacactttatgcaagattggaatgtatcttcaaattcagatttaataaacatgtaaagatcctctgtaaaaaaaaaaaaaaaaaaaaa

SEQ ID NO: 807 - protein, 469 aa, Homo sapiens
MDVENEQILNVNPADPDNLSDSLFSGDEENAGTEEIKNEINGNWISASSINEARINAKAKRRLRKNSSRDSGRGDSVSDSGSDALRSGLTVPTSPKGRLLDRRSRSGKGRGLPKKGGAGGKGVWGTPGQVYDVEEVDVKDPNYDDDQENCVYETVVLPLDERAFEKTLTPIIQEYFEHGDTNEVAEMLRDLNLGEMKSGVPVLAVSLALEGKASHREMTSKLLSDLCGTVMSTTDVEKSFDKLLKDLPELALDTPRAPQLVGQFIARAVGDGILCNTYIDSYKGTVDCVQARAALDKATVLLSMSKGGKRKDSVWGSGGGQQSVNHLVKEIDMLLKEYLLSGDISEAEHCLKELEVPHFHHELVYEAIIMVLESTGESTFKMILDLLKSLWKSSTITVDQMKRGYERIYNEIPDINLDVPHSYSVLERFVEECFQAGIISKQLRDLCPSRGRKRFVSEGDGGRLKPESY

SEQ ID NO: 808 - DNA, 3675 bp, Homo sapiens
cgaccacccggcctcggccaataagcgccgccctctcgcccccgtgttactgggtagaagaaaacaaaaacaaacagagcgagaagggccagagactctccgaggcggcggcagagacagaagagcggggtcggggccggctgaccaggaacctgggcgagcagcggcgggggcccgagggattctgaaggaagatttccattaggtaatttgtttaatcagtgcaagcgaaattaagggaaaatggatgtagaaaatgagcagatactgaatgtaaaccctgcagggtattttccctaattctccatggtgcttcaatagcatgttattatcataaaaatgaacagttttgtggaatagatgaccaaatatcctgataacttaagtgactctctcttttccggtgatgaagaaaatgctgggactgaggaaataaagaatgaaataaatggaaattggatttcagcatcctccattaacgaagctagaattaatgccaaggcaaaaaggcgactaaggaaaaactcatcccgggactctggcagaggcgattcggtcagcgacagtgggagtgacgcccttagaagtggattaactgtgccaaccagtccaaagggaaggttgctggataggcgatccagatctgggaaaggaaggggactaccaaagaaaggtggtgcaggaggcaaaggtgtctggggtacacctggacaggtgtatgatgtggaggaggtggatgtgaaagatcctaactatgatgatgaccaggagaactgtgtttatgaaactgtagttttgcctttggatgaaagggcatttgagaagactttaacaccaatcatacaggaatattttgagcatggagatactaatgaagttgcggaaatgttaagagatttaaatcttggtgaaatgaaaagtggagtaccagtgttggcagtatccttagcattggaggggaaggctagtcatagagagatgacatctaagcttctttctgacctttgtgggacagtaatgagcacaactgatgtggaaaaatcatttgataaattgttgaaagatctacctgaattagcactggatactcctagagcaccacagttggtgggccagtttattgctagagctgttggagatggaattttatgtaatacctatattgatagttacaaaggaactgtagattgtgtgcaggctagagctgctctggataaggctaccgtgcttctgagtatgtctaaaggtggaaagcgtaaagatagtgtgtggggctctggaggtgggcagcaatctgtcaatcaccttgttaaagagattgatatgctgctgaaagaatatttactctctggagacatatctgaagctgaacattgccttaaggaactggaagtacctcattttcaccatgagcttgtatatgaagctattataatggttttagagtcaactggagaaagtacatttaagatgattttggatttattaaagtccctttggaagtcttctaccattactgtagaccaaatgaaaagaggttatgagagaatttacaatgaaattccggacattaatctggatgtcccacattcatactctgtgctggagcggtttgtagaagaatgttttcaggctggaataatttccaaacaactcagagatctttgtccttcaaggggcagaaagcgttttgtaagcgaaggagatggaggtcgtcttaaaccagagagctactgaatataagaactcttgcagtcttagatgttataaaaatatatatctgaattgtaagagttgttagcacaagttttttttttttttttttttaagcacttgttttgggtacaaggcatttctgacattttataaacctacatttaaggggaatttttaaaggaaatgttttttcttttttttttgtttttcgagggggcaaggagggacagaaaagtaacctcttcttaagtggaatattctaataagctaccttttgtaagtgccatgtttattatctaatcattccaagttttgcattgatgtctgactgccactcctttctttcaaggacagtgttttttgtagtaaaatcactggtttatacaaagctttatttagggggtaaagttaagctgctaaaaccccatgttggctgctgctgttgagatactgtgctttgggagtaaaaaaagaaagttatttctttgtcttaaagaatttttaaaaaattagtcatgagacttattcatctttccagggaacatactgattggtcttaaaagactagacagttaagtaaaaggtggctggaacatctatttttctacaaaactggaaaaatgaacctggttctagaagaatgtacaccaaaataaaacatgtgaagcagtattgattctttattgggagtacatttttttaggtctcttaaactttaatttcacacagtaaattttgaatctcataaggaagcatatttgaacctagtcaatttaatcttagtgttcccttgaaaactttttttccctacaaaattttaagtgaaaaatacaatagtaaattaagattacactggggaaaaaaatgcaggtatcactttactccattgttatctgacctagagcttaattaagttttagaaatatgtaataccttccatcattccatcatccttaaattctgttaccaaataatggctaatgttacaaaaagttatactccagagacccaaagcttgacatttacctaatgtatgagaaaatattaccaattaacaataaagaatgatcatatttttaacctcttttacatagcctaataactcagcaaggcctcaacgtctgtgctaatttaaactgccaaatattgactgcagcaaacaagaattatattcagaatttatgagggtactgttaggagtatactgcttacaggtttagatatagtctgttagaattaaaaccaagtttagtgttcatatttacctcatgggctttatcaagcccatattacctcagcttatatatagttaccatttttaggtttttaattgtttgacacttggatgataaatgcagtcattttattctcaagtgcttaaaattaatgtaattaaaagcttagctgactacagaataggtgagggtttcttaaaaatgagatttaagggctgggcacggtggctcatgcctgtaatcccagcactttgggaggccgaggtgggcggatcacttgaggttgggagttcatgaccagcttgaccaacatgaagaaaccctgtctctattaaaaatacaaaagtagccaggcatggtggcgcatgcgtgtaatcccagctacttgggaggctgaggcaggagaattgcttgaacctgggaggcagaggttgcagtgagtcgagatggtgccattgctctcgtttgggcaacaagagtgaaactcttgtctcaaaaaaaaaaaaaaatgaggtttaagacagttttgtcattactggtgggatctggtcacacaagatagcattaaacgtgacatggcacataaaattggttaaaaaattttgttttttaattacgtaatgtaaaagcccaacaaacactttatgcaagattggaatgtatcttcaaattcagatttaataaacatgtaaagatcctctgtaaaaaaaaaaaaaaaaaaaaa

SEQ ID NO: 809 - protein, 458 aa, Homo sapiens
MTKYPDNLSDSLFSGDEENAGTEEIKNEINGNWISASSINEARINAKAKRRLRKNSSRDSGRGDSVSDSGSDALRSGLTVPTSPKGRLLDRRSRSGKGRGLPKKGGAGGKGVWGTPGQVYDVEEVDVKDPNYDDDQENCVYETVVLPLDERAFEKTLTPIIQEYFEHGDTNEVAEMLRDLNLGEMKSGVPVLAVSLALEGKASHREMTSKLLSDLCGTVMSTTDVEKSFDKLLKDLPELALDTPRAPQLVGQFIARAVGDGILCNTYIDSYKGTVDCVQARAALDKATVLLSMSKGGKRKDSVWGSGGGQQSVNHLVKEIDMLLKEYLLSGDISEAEHCLKELEVPHFHHELVYEAIIMVLESTGESTFKMILDLLKSLWKSSTITVDQMKRGYERIYNEIPDINLDVPHSYSVLERFVEECFQAGIISKQLRDLCPSRGRKRFVSEGDGGRLKPESY

SEQ ID NO: 810 - DNA, 587 bp, Homo sapiens
ctttcccaaggggcagccgaagatggcagaggtgcaggtcctggtgcttgatggtcgaggccatctcctgggccgcctggcgaccatcgtggctaaacaggtactgctgggccggaaggtggtggtcgtacgctgcaaaggcatcaacatttctggcaatttctacagaaacaagttgaagtacttggctttcctccgcaagcggatgaacaccaaccctttccgacgcccctaccacttccgggcccccagccccatcttctggctgactgtgcgaagtatgctgccccacaagaccaagcgaggccaggccgctctggaccgcctcaaggttgtgcgtctgaagcctacaagaaagtttgcctatctggggcacctggctcacgaggttggctggaagtaccacgcagtgacagccaccctggaggagaagaggaaagagaaagccaaaatccactaccggaagaagaaagagctcataagcctacggaaacaggccaagaggaacatggagaagaaaactgacaaatacacagaggtcctcaagacccacggactcctggtctgagcccaataaagactgttaa

SEQ ID NO: 811 - protein, 181 aa, Homo sapiens
MAEVQVLVLDGRGHLLGRLATIVAKQVLLGRKVVVVRCKGINISGNFYRNKLKYLAFLRKRMNTNPFRRPYHFRAPSPIFWLTVRSMLPHKTKRGQAALDRLKVVRLKPTRKFAYLGHLAHEVGWKYHAVTATLEEKRKEKAKIHYRKKKELISLRKQAKRNMEKKTDKYTEVLKTHGLLV

SEQ ID NO: 812 - DNA, 3823 bp, Homo sapiens
ctattttaccagttggaatgaatgatcagaaatgggcatagtgcttttagatccaacatgtaacagatggatgttactccatgctgattacttcttcaagccagtacttttttgattgtgtaggatctttgtctcttcatctttgaattcaattactggaaaataaaaggagttcatgtagtttttgtccaggcttgagtcaccatgagtagtagtttaggaaaagaaaaagactctaaagaaaaagatcccaaagtaccatcagccaaggaaagagaaaaggaggcaaaagcctctggaggttttgggaaagagagcaaagaaaaagaacctaagaccaaagggaaagatgccaaagatggaaagaaggactccagtgctgcccaaccaggggtggcattttcagttgacaatacgatcaaacggccaaacccagcacctgggactagaaaaaaatccagcaatgcagaggtgattaaagagctcaacaaatgccgggaagagaattcaatgcgtttggacttatccaagagatctatacacatattgccatcatcaatcaaagagttgactcaattaacagaactttatttatacagtaacaaattgcagtccctcccagcagaggtgggatgtttagtaaatctcatgacactggctctaagtgaaaattcacttaccagtttgcctgactctcttgataacttgaagaagctgcggatgcttgatttacggcataataaactgagagaaattccttcagtggtgtataggctggattctctcaccactctttaccttcgctttaatcgtataactactgtggaaaaggacatcaaaaacttgtcaaaactcagcatgcttagcattcgagagaacaaaattaaacaactacctgctgaaattggtgaattatgtaacctcattacgctggatgtagctcacaatcaacttgaacaccttccaaaggagattggaaactgtacacagataaccaaccttgacttgcagcacaatgaactgctagacctcccagatactataggaaacctgtccagtttaagtcgtcttggtctgagatataacagactgtcagcaatacccagatcattagcaaaatgcagtgcacttgaagaattaaatttagagaacaataacatttctactttaccagagagtcttttatcaagtcttgtgaaactgaatagtttgaccttagctagaaattgcttccagttgtatccagtgggtggtccatctcagttttctaccatctattccctcaacatggaacacaatcgaatcaacaaaattccatttggaattttctccagagcaaaagtattaagtaagctgaatatgaaggacaatcagttaacatcacttcccttggattttggaacttggaccagtatggtagaattgaatttagccactaatcagctcacaaagatccctgaggatgtgtctggtctcgtttctcttgaggttcttatcttatcaaacaatcttctaaagaagcttccccatggtcttggaaaccttaggaagttaagagagttggatctagaagagaacaaattggaatccttgccaaatgaaattgcatatcttaaggatttacagaaattagtcttgacaaacaaccagttgaccactcttcccagaggcattggtcaccttactaatctcacacatctgggccttggagagaacctacttactcaccttcctgaagaaattggtacactggagaacctagaagaactgtatttgaatgacaaccccaacctgcatagccttccctttgagctggcactctgcagcaagctttcaatcatgagtattgagaactgtccactcagtcaccttccacctcagattgttgctggggggccttctttcatcattcagttcttaaagatgcagggtccatatcgtgccatggtctgatataaatctgctggtcccacacactgttcaaaaatagactgccattaatgtttcttatctatatctgtatctatttatgtagatattggtatatggcagatttataaaaattgcattatgtgtttctgctaatagaggaatcatagccatttagaattttttttaaattctgtacaaaaggcttatataagttttctttgctgaatttgatggatgtttttctgttgtgtaatctgatatgccagtttgcttaaaacatttgccaacacattatgaagttattaaatttaagggacagaggtagtatagttagatatactttctcttaggaaaaataatgggcaaaaatttttgttgcaacttttcatatatattttccccttaccaattgttttatccttatagtattgtaggccctgaaagtagaatttttctttaacttattttgagatttgagatttaaattttatgtattgtttacagtcagagtaaatcactggatttcttttgtttgttttgatttgctctgttttattcagtcaaatctagagtttgaatcctctgctaaagaatttgcatccactggtgtaaacagtgaaaggtatttgcttgttgaaaaaaaaaactggcaaagtgaaaagatacagtcaaaaatctagaatttctttaattttgcttctctgacgagttgtgaagcaaaatacctgaagtgagtctttgggtaggggaagggtattgagaccttttctagtatgaatattttttaagtttgggggaagagaaacttgcagtgaaaaggagttttttcattcctgaaagttgcagatccacaaaactaacaggataattgggcaaataaattacatataaacacacacaatctatatatgtatatacaatgctatatagatatgtatttattatatcataaactacagtaggtaactttaaggatttcttcctatccttgtacaatgacatgaatgtctttctttgaaaactgcaatgtatgtatgtttcaaggttatttaacagtgtactatggttttatatcttgacttgccttgtacatctttcaattctggaatatctgtgtctaagcacaatatcttcacactgtgctgtattgctgctgaactaaatgcacttttccccacatatggggcactggcttcaaacaattcagttcagtatcattacttttaatctcatctttcctttcttggtagttgttaatacagttatggaaaagaggcacattgcatagaagccattggggagttcagtggaagttctgtaagatgtgcatgtactatttgatgcgttttctttgcttcactgcttttaatacttagcagtattgttggtctaagtcaatttgattattgaggagtctcagagcaaggtgcgttctagatgtcatcctaaaaaacacttcatatataattaatcactattttgtataattacatattgctgcttgtgtgttttttttttttttccatttagttgggcgttgtgttttacacaaaaccatttttgaattaaggctatgatattaagatagaaatttggactgttgttctgcttttcctggcactcaaattcatgactagttttgaggtcaaacctatgttcgtaatgagagattttataaggatcaactaagaaatggaaggcaggtgaagatataaaaccctagaatgcttaaatgtgctgtaaaactattgtagatgtcactggattttaccaagtaatatcctttcttttttttttccccccatctgctgtggcttttcagttaaaattttgtttataaaaggaatttgtttattacagctctacctaaaaaaaaaaaaaaaaaaaaaaa

SEQ ID NO: 813 - protein, 582 aa, Homo sapiens
MSSSLGKEKDSKEKDPKVPSAKEREKEAKASGGFGKESKEKEPKTKGKDAKDGKKDSSAAQPGVAFSVDNTIKRPNPAPGTRKKSSNAEVIKELNKCREENSMRLDLSKRSIHILPSSIKELTQLTELYLYSNKLQSLPAEVGCLVNLMTLALSENSLTSLPDSLDNLKKLRMLDLRHNKLREIPSVVYRLDSLTTLYLRFNRITTVEKDIKNLSKLSMLSIRENKIKQLPAEIGELCNLITLDVAHNQLEHLPKEIGNCTQITNLDLQHNELLDLPDTIGNLSSLSRLGLRYNRLSAIPRSLAKCSALEELNLENNNISTLPESLLSSLVKLNSLTLARNCFQLYPVGGPSQFSTIYSLNMEHNRINKIPFGIFSRAKVLSKLNMKDNQLTSLPLDFGTWTSMVELNLATNQLTKIPEDVSGLVSLEVLILSNNLLKKLPHGLGNLRKLRELDLEENKLESLPNEIAYLKDLQKLVLTNNQLTTLPRGIGHLTNLTHLGLGENLLTHLPEEIGTLENLEELYLNDNPNLHSLPFELALCSKLSIMSIENCPLSHLPPQIVAGGPSFIIQFLKMQGPYRAMV

SEQ ID NO: 814 - DNA, 3653 bp, Homo sapiens
gcgctcggcgcccaccaggcggacgcccaggagaacccctgcctccgtcgcggctcctggagagctgatcgttcacctgccccggcccgcctgaggacgggggtgccttcatgcggcccccacactcctcaccccgccgccgccgccgtccccgagctccgcacagtgcgccccagccccagcagggcgcacaactttggaagtctcgcggcgctccgagaggcggcagagtccgcgccccagccccgggccgggccgggccagaaccgcagcgtctgggggaagccagagagtcggtaatcgcttcggggatgtaaggcgacagacataggacccccgagctcgcatcagcacccttcggctgcctcccggggtgggggcgggccccgcacacggtaagacctcttgctttcgctcaggctcaagattcaagatacagatattgatatgtatatatatatttaatttcctgtcatccttccaagttatcaggccaccgatgatttttgttctcccttcttgaagaataaatctctctttacccatcggctctccctactctctcccgccgcttagaaataaaacttggctgtattaggagctcggagcaagaaggcgcccaccgagagcgtctgaagcgcgagccaggcgcagttcgcgggacccgggccatgggccgctagcggtcctccagttcgggcccggcctccctgcggccccctccctatgtgagccgcagccaggcgagcggggcgccggaggaagaggaggacccacgggcgccgggccggaaggcagctggcagcaggcccaggccagcgggcgcccgcgttcatgttccgccaggagcagccgttggccgagggcagctttgcgcccatgggctccctgcagccggacgcgggcaacgcgagctggaacgggaccgaggcgccggggggcggcgcccgggccaccccttactccctgcaggtgacgctgacgctggtgtgcctggccggcctgctcatgctgctcaccgtgttcggcaacgtgctcgtcatcatcgccgtgttcacgagccgcgcgctcaaggcgccccaaaacctcttcctggtgtctctggcctcggccgacatcctggtggccacgctcgtcatccctttctcgctggccaacgaggtcatgggctactggtacttcggcaaggcttggtgcgagatctacctggcgctcgacgtgctcttctgcacgtcgtccatcgtgcacctgtgcgccatcagcctggaccgctactggtccatcacacaggccatcgagtacaacctgaagcgcacgccgcgccgcatcaaggccatcatcatcaccgtgtgggtcatctcggccgtcatctccttcccgccgctcatctccatcgagaagaagggcggcggcggcggcccgcagccggccgagccgcgctgcgagatcaacgaccagaagtggtacgtcatctcgtcgtgcatcggctccttcttcgctccctgcctcatcatgatcctggtctacgtgcgcatctaccagatcgccaagcgtcgcacccgcgtgccacccagccgccggggtccggacgccgtcgccgcgccgccggggggcaccgagcgcaggcccaacggtctgggccccgagcgcagcgcgggcccggggggcgcagaggccgaaccgctgcccacccagctcaacggcgcccctggcgagcccgcgccggccgggccgcgcgacaccgacgcgctggacctggaggagagctcgtcttccgaccacgccgagcggcctccagggccccgcagacccgagcgcggtccccggggcaaaggcaaggcccgagcgagccaggtgaagccgggcgacagcctgccgcggcgcgggccgggggcgacggggatcgggacgccggctgcagggccgggggaggagcgcgtcggggctgccaaggcgtcgcgctggcgcgggcggcagaaccgcgagaagcgcttcacgttcgtgctggccgtggtcatcggagtgttcgtggtgtgctggttccccttcttcttcacctacacgctcacggccgtcgggtgctccgtgccacgcacgctcttcaaattcttcttctggttcggctactgcaacagctcgttgaacccggtcatctacaccatcttcaaccacgatttccgccgcgccttcaagaagatcctctgtcggggggacaggaagcggatcgtgtgaggtttccgctggcgcccgcgtagactcacgctgactgcaggcagcggggggcatcgaggggtgcttagccccagggcactcagaaacccgggcgctgcctgctctgcgtttcctcgtctggggtggctctgcagcctcctgcgggcgggcgtctgctgctcctacaagggaagcttcttgctgccaggcccacacatccccagttgttggtttggccactcttgacctggagccatcttcctagtgggccacccctaatcactattgcttcctaaaggtattttcaccctcttcgcctggtacagccctcacagctcttcagagcaagcactggactacaagggcatggctcacaaaaggttaatggatgggggttacctagccctggctaattccccttccattcccaactctctctctctttttgaagaaaaatgctaagggcagccctgcctgccctccccatcccccgctgtaaatatacactatttttgatagcacacatggggcccccatatctcttggccttggttttgatgttgaaatcctggccttgggagagatgccttccaggcagacacagctgtctggttcaggccaagcccctttgcaatgcaagccctttctggtgttatgaagtccctctatgtcgtcgttttcaccagcaactggtgactgtcccttcgacacggacctgctttgagatttcctgacagggaaaagatttctgtccatttttttcctgtgcctaacagcataattgccttttcctatgtaaatattatgatggtggatcaagacataagtaaatgagcctttctgcctcacatcagccctgtgtataaagccattattctctgatgcactgtttgccccagtaactcactttaaaacctctctttccagtgttccctctctccctccagggccactgcttgaagaagaatatgtatgtttctatcttgtatgtctgtgtgcccctcctgccccgaaagtgctgactatggggaaatcttttagctgctgtttttagactccaaggagtggaaattatgtggaagaagcaaacctgatacaatttgcccaaggtaaacagtttgaaaagacaaatgggcctgccaaactgtacagtttcttccccaagagctgttaggtatcaaaatgttgtcctttcccccctccgtgcttttctggttgagatcatgtcattgatgaactgccaaagtcaggggaggagggcagagactttgtgtttacatctgcatttctacatgttttagacagagacaatttaaggcctgcactcttatttcactaaagaaaaactaatgtcagcacatgttgctaatgacagtggatttttttttaaataaaaaagtttacagatcaaatgtgaaataaatatgaatggagtggtcaaa

SEQ ID NO: 815 - protein, 450 aa, Homo sapiens
MGSLQPDAGNASWNGTEAPGGGARATPYSLQVTLTLVCLAGLLMLLTVFGNVLVIIAVFTSRALKAPQNLFLVSLASADILVATLVIPFSLANEVMGYWYFGKAWCEIYLALDVLFCTSSIVHLCAISLDRYWSITQAIEYNLKRTPRRIKAIIITVWVISAVISFPPLISIEKKGGGGGPQPAEPRCEINDQKWYVISSCIGSFFAPCLIMILVYVRIYQIAKRRTRVPPSRRGPDAVAAPPGGTERRPNGLGPERSAGPGGAEAEPLPTQLNGAPGEPAPAGPRDTDALDLEESSSSDHAERPPGPRRPERGPRGKGKARASQVKPGDSLPRRGPGATGIGTPAAGPGEERVGAAKASRWRGRQNREKRFTFVLAVVIGVFVVCWFPFFFTYTLTAVGCSVPRTLFKFFFWFGYCNSSLNPVIYTIFNHDFRRAFKKILCRGDRKRIV

SEQ ID NO: 816 - DNA, 1628 bp, Homo sapiens
cgggcgaggaaggggcatttgcaccggggctgggcgggcgcacccagagccaggcgggcaggaacccctgcgcagccatccggtgcctgcatgtccctggcgcggaagggacgcctcaccagcctcggcgccccctccccctagatttcctccccgcccctccccactgcctgcctgctgcaccaccttccacccagatcacccagatcgtctctaaagggagttcttggtttccttcgatttcttatgaacccaggatgggcagcaaagaagatgcgggcaaggggtgtccggcggccggtggcgtctccagcttcaccatccagtccatcctgggcgggggcccctcggaggcaccgcgggagcccgtcggctggccagccaggaagcgcagcctgtccgtgtcctcggaggaggaggagccggacgacggctggaaggcgcccgcctgcttctgcccagaccagcacggccctaaggagcagggccccaagcaccatccccccatcccttttccttgcctgggtacccccaagggcagcggaggctcgggcccgggcggcttggagcgcacgcctttcctctctccttcgcactcggactttaaagaagagaaagagaggctcctgcccgcgggctcgccctcgccggggtccgagcggccgcgggacggcggcgctgagcggcaggccggcgcggccaagaagaagacgcgcaccgtcttttcgcgcagccaggtgtaccagctcgagtccaccttcgacatgaagcgctacctgagcagctcggagcgcgcctgcctcgcctccagcctgcagctcacggagacccaggtaaagacttggttccagaaccgccgcaacaagtggaagcggcagctctcggctgagctggaggcggccaacatggcgcacgcgtcggcgcagactctggtgagcatgccgctggtgttccgggacagttcgctgctgcgcgtgccggtgccgcgctcgctcgcctttcccgcgccgctctactacccgggaagcaacctctcggccttacctctctacaacctatacaacaagctcgactactgaccggcccgccgccccgcgccgcccccagctgcccgcagagccgggcgcgtactgtactgtaagcagggctccggagcaaggcggcgtgtttccagaaatatgaagaaatacaccatgtgtattcattagctcttatttatggtctctgccctactttttgttttgattgtttcgggtatttattggcattccctaagtcagagagcctgcttcctacctagaccgaaccagtacgctttgaaaaccattcggagtgagatgttctcgggtggtggtgggaaagggagttttggccagacaggctgtggttggtagggaaaaaaatcaggaaaacacctacaaaaccaggtacactcctcccccatatatacacctgtatatatgtacatgcatacacgctcggccaagccaggccctcagaggctttggacaattactaaattgcttcttttcgtttccctcatcccgaggatggtagggacgaaaaggggagagttcagatctgtaaatatttttaaaaagaaaaaaaaataaaacattttaaacatc

SEQ ID NO: 817 - protein, 273 aa, Homo sapiens
MGSKEDAGKGCPAAGGVSSFTIQSILGGGPSEAPREPVGWPARKRSLSVSSEEEEPDDGWKAPACFCPDQHGPKEQGPKHHPPIPFPCLGTPKGSGGSGPGGLERTPFLSPSHSDFKEEKERLLPAGSPSPGSERPRDGGAERQAGAAKKKTRTVFSRSQVYQLESTFDMKRYLSSSERACLASSLQLTETQVKTWFQNRRNKWKRQLSAELEAANMAHASAQTLVSMPLVFRDSSLLRVPVPRSLAFPAPLYYPGSNLSALPLYNLYNKLDY

SEQ ID NO: 818 - DNA, 1432 bp, Homo sapiens
ggcaggtctacactggagcttcctctccgcctccttcgcctagcctgcgagtgttctgagggaagcaaggaggcggcggcggccgcagcgagtggcgagtagtggaaacgttgcttctgaggggagcccaagatgaccggttctaacgagttcaagctgaaccagccacccgaggatggcatctcctccgtgaagttcagccccaacacctcccagttcctgcttgtctcctcctgggacacgtccgtgcgtctctacgatgtgccggccaactccatgcggctcaagtaccagcacaccggcgccgtcctggactgcgccttctacgatccaacgcatgcctggagtggaggactagatcatcaattgaaaatgcatgatttgaacactgatcaagaaaatcttgttgggacccatgatgcccctatcagatgtgttgaatactgtccagaagtgaatgtgatggtcactggaagttgggatcagacagttaaactgtgggatcccagaactccttgtaatgctgggaccttctctcagcctgaaaaggtatataccctctcagtgtctggagaccggctgattgtgggaacagcaggccgcagagtgttggtgtgggacttacggaacatgggttacgtgcagcagcgcagggagtccagcctgaaataccagactcgctgcatacgagcgtttccaaacaagcagggttatgtattaagctctattgaaggccgagtggcagttgagtatttggacccaagccctgaggtacagaagaagaagtatgccttcaaatgtcacagactaaaagaaaataatattgagcagatttacccagtcaatgccatttcttttcacaatatccacaatacatttgccacaggtggttctgatggctttgtaaatatttgggatccatttaacaaaaagcgactgtgccaattccatcggtaccccacgagcatcgcatcacttgccttcagtaatgatgggactacgcttgcaatagcgtcatcatatatgtatgaaatggatgacacagaacatcctgaagatggtatcttcattcgccaagtgacagatgcagaaacaaaacccaagtccacctaatcatcctgtgaaagtggtttctctatggaaagctttgtttgcttcctacaaatacatgcttattccttaagggatgtgttagagttactgtggatttctctgttttctgtcttacaagaaacttgtctatgtaccttaatactttgtttaggatgaggagtctttgtgtccctgtacagtagtctgacgtatttccccttctgtcccctagtaagcccagttgctgtatctgaacagtttgagctctttttgtaatatactctaaacctgttatttctgtgctaataaacgagatgcagaacccttgaaaaaaaaaaaa

SEQ ID NO: 819 - protein, 326 aa, Homo sapiens
MTGSNEFKLNQPPEDGISSVKFSPNTSQFLLVSSWDTSVRLYDVPANSMRLKYQHTGAVLDCAFYDPTHAWSGGLDHQLKMHDLNTDQENLVGTHDAPIRCVEYCPEVNVMVTGSWDQTVKLWDPRTPCNAGTFSQPEKVYTLSVSGDRLIVGTAGRRVLVWDLRNMGYVQQRRESSLKYQTRCIRAFPNKQGYVLSSIEGRVAVEYLDPSPEVQKKKYAFKCHRLKENNIEQIYPVNAISFHNIHNTFATGGSDGFVNIWDPFNKKRLCQFHRYPTSIASLAFSNDGTTLAIASSYMYEMDDTEHPEDGIFIRQVTDAETKPKST

SEQ ID NO: 820 - DNA, 2659 bp, Homo sapiens
ggcaggtctacactggagcttcctctccgcctccttcgcctagcctgcgagtgttctgagggaagcaaggaggcggcggcggccgcagcgagtggcgagtagtggaaacgttgcttctgaggggagcccaagatgaccggttctaacgagttcaagctgaaccagccacccgaggatggcatctcctccgtgaagttcagccccaacacctcccagttcctgcttgtctcctcctgggacacgtccgtgcgtctctacgatgtgccggccaactccatgcggctcaagtaccagcacaccggcgccgtcctggactgcgccttctacgatccaacgcatgcctggagtggaggactagatcatcaattgaaaatgcatgatttgaacactgatcaagaaaatcttgttgggacccatgatgcccctatcagatgtgttgaatactgtccagaagtgaatgtgatggtcactggaagttgggatcagacagttaaactgtgggatcccagaactccttgtaatgctgggaccttctctcagcctgaaaaggtatataccctctcagtgtctggagaccggctgattgtgggaacagcaggccgcagagtgttggtgtgggacttacggaacatgggttacgtgcagcagcgcagggagtccagcctgaaataccagactcgctgcatacgagcgtttccaaacaagcagggttatgtattaagctctattgaaggccgagtggcagttgagtatttggacccaagccctgaggtacagaagaagaagtatgccttcaaatgtcacagactaaaagaaaataatattgagcagatttacccagtcaatgccatttcttttcacaatatccacaatacatttgccacaggtggttctgatggctttgtaaatatttgggatccatttaacaaaaagcgactgtgccaattccatcggtaccccacgagcatcgcatcacttgccttcagtaatgatgggactacgcttgcaatagcgtcatcatatatgtatgaaatggatgacacagaacatcctgaagatggtatcttcattcgccaagtgacagatgcagaaacaaaacccaagtcaccatgtacttgacaagatttcatttacttaagtgccatgttgatgataataaaacaattcgtactccccaatggtggatttattactattaaagaaaccagggaaaatattaattttaatattataacaacctgaaaataatggaaaagaggtttttgaatttttttttttaaataaacaccttcttaagtgcatgagatggtttgatggtttgctgcattaaaggtatttgggcaaacaaaattggagggcaagtgactgcagttttgagaatcagttttgaccttgatgattttttgtttccactgtggaaataaatgtttgtaaataagtgtaataaaaatccctttgcattctttctggaccttaaatggtagaggaaaaggctcgtgagccatttgtttcttttgctggttatagttgctaattctaaagctgcttcagactgcttcatgaggaggttaatctacaattaaacaatatttcctcttggccgtccattattttctgaagcagatggttcatcatttcctgggctgttaaacaaagcgaggttaaggttagactcttgggaatcagctagttttcaatcttattagggtgcagaaggaaaactaataagaaaacctcctaatatcattttgtgactgtaaacaattatttattagcaaacaattgatcccagaagggcaaattgtttgagtcagtaatgagctgagaaaagacagagcatatctgtgtatttggaaaaataattgtaacgtaattgcagtgcatttagacaggcatctatttggacctgtttctatctctaaatgaatttttggaaacattaatgaggtttacatatttctctgacatttatatagttcttatgtccatttcagttgaccagccgctggtgattaaagttaaaaagaaaaaaattatagtgagaatgagattcatttcaatgtaatgcactaaagcagaacacgaacttagcttggcctattctaggtagttccaaatagtatttttgttgtcaaactttaaaatttatattaatttgcaaatgtatgtctctgagtaggacttggacctttcctgagatttattttatccgtgatgtattttttttaattcttttgatacagagaagggtctttttttttttaagtatttcagtgaaaacttggtgtaagtctgaacccatcttttgaaatgtattttcttcattgcaggtccacctaatcatcctgtgaaagtggtttctctatggaaagctttgtttgcttcctacaaatacatgcttattccttaagggatgtgttagagttactgtggatttctctgttttctgtcttacaagaaacttgtctatgtaccttaatactttgtttaggatgaggagtctttgtgtccctgtacagtagtctgacgtatttccccttctgtcccctagtaagcccagttgctgtatctgaacagtttgagctctttttgtaatatactctaaacctgttatttctgtgctaataaacgagatgcagaacccttgaaaaaaaaaaaa

SEQ ID NO: 821 - protein, 328 aa, Homo sapiens
MTGSNEFKLNQPPEDGISSVKFSPNTSQFLLVSSWDTSVRLYDVPANSMRLKYQHTGAVLDCAFYDPTHAWSGGLDHQLKMHDLNTDQENLVGTHDAPIRCVEYCPEVNVMVTGSWDQTVKLWDPRTPCNAGTFSQPEKVYTLSVSGDRLIVGTAGRRVLVWDLRNMGYVQQRRESSLKYQTRCIRAFPNKQGYVLSSIEGRVAVEYLDPSPEVQKKKYAFKCHRLKENNIEQIYPVNAISFHNIHNTFATGGSDGFVNIWDPFNKKRLCQFHRYPTSIASLAFSNDGTTLAIASSYMYEMDDTEHPEDGIFIRQVTDAETKPKSPCT

SEQ ID NO: 822 - DNA, 6751 bp, Homo sapiens
gaatggaaaatggcggcctagacgcggagtttcctgcccgacccgcggcggctccggcggcgccatgacgcgctgggtgcccaccaagcgcgaggagaagtacggcgtggctttttataactatgatgccagaggagcggatgaactttctttacagatcggagacactgtgcacatcttagaaacatatgaagggtggtaccgaggttacacgttacgaaaaaagtctaagaagggtatatttcctgcttcatatattcatcttaaagaagcgatagttgaaggaaaagggcaacatgaaacagtcatcccgggtgacctccccctcatccaggaagtcaccacgacactccgagagtggtccaccatctggaggcagctctacgtgcaagataacagggagatgtttcgaagtgtgcggcacatgatctatgaccttattgaatggcgatcacaaattctttctggaactctgcctcaggatgaactcaaagaactgaagaagaaggtcacagccaaaattgattatggaaacagaattctagatttggacctggtggttagagatgaagatgggaatattttggatccagaattaactagcacgattagtctcttcagagctcatgaaatagcttctaaacaagtggaggaaaggttacaagaggaaaaatctcaaaagcagaacatagatattaacagacaagccaagtttgctgcaaccccttctctggccttgtttgtgaacctcaaaaatgtggtttgtaaaataggagaagatgctgaagtcctcatgtctctatatgaccctgtggagtccaaattcatcagtgagaactacctggttcgctggtccagttcaggattacctaaagacatagacagattacataatttgcgagccgtgtttactgacctcggaagcaaagacctgaaaagggagaaaatcagttttgtctgtcagattgttcgcgtgggtcgcatggagctgagggacaacaacaccaggaaactgacctcggggttgcggcgaccttttggagtggctgtgatggatgtaacagatataataaatggaaaagtagatgatgaagataagcagcatttcattccctttcagccggtggcaggggagaatgacttccttcagactgttataaacaaagtcatcgctgccaaagaagtcaaccacaaggggcagggtttgtgggtaacattgaaattacttcctggagatatccatcagatccgaaaagagtttccgcatttagtggacaggaccacagctgtggctcgaaaaacagggtttccggagataatcatgcctggtgatgttcgaaatgatatctatgtaacattagttcaaggagattttgataaaggaagcaaaacaacagcgaagaacgtggaggtcacggtgtctgtgtacgatgaggatgggaaacgattagagcatgtgattttcccgggtgctggtgatgaagcgatttcagagtacaaatctgtgatttactaccaagtaaagcagccacgctggtttgagactgttaaggtggccattcccatcgaggacgttaaccgcagtcaccttcggtttaccttccgccacaggtcatcacaggactctaaggataaatctgagaaaatatttgcactagcatttgtcaagctgatgagatacgatggtaccaccctgcgagacggagagcacgatcttatcgtctataaggccgaagcaaagaagctggaagatgctgccacgtacttgagtctgccctccacgaaggcagagttggaagaaaagggccactcggccaccggcaagagcatgcagagccttgggagctgcaccattagcaaggactccttccagatctccacgctcgtgtgctccaccaaactgactcagaacgtggaccttctggggctcttgaaatggcgctccaacaccagcctgctgcagcagaacttgaggcagctgatgaaagtcgatggtggtgaagtagtgaagtttcttcaggacacgttggatgccctcttcaacatcatgatggagaactcagagagtgagacttttgacacgttagtctttgatgctctggtatttatcattggactgattgctgatagaaaatttcagcattttaatcctgttttggaaacttacattaagaaacactttagtgcaacgttagcctacacgaagttgacaaaagtgttgaagaactacgtggacggtgctgagaagccgggagtaaatgagcagctgtacaaagccatgaaagcgctagaatccatcttcaagttcatcgtgcgctccaggatcctgttcaatcaactgtatgaaaacaagggagaggctgacttcgtggaatctttgctgcagctcttcaggtccatcaatgacatgatgagcagcatgtcagaccagaccgtccgggtgaagggggcagcactgaaatacttaccaacgatcgtcaacgatgtgaaattggtgtttgatcccaaagagctcagcaaaatgtttactgaattcatcctcaatgttcccatgggcttgctgaccatccagaaactctactgcttgatcgaaatcgtccacagtgacctcttcacacagcatgactgcagagagatcctgcttcccatgatgaccgatcagctcaagtaccatctggagagacaggaggacctggaggcctgctgtcagctgctcagccacatcctggaggtgctgtacaggaaggacgtggggccaacccagaggcacgtccagattatcatggagaaacttctccggaccgtgaaccgaaccgtcatttccatgggacgagattctgaactcattggaaacttcgtggcttgcatgacagctattttacgacaaatggaagattaccattatgcccacttgatcaagacttttgggaaaatgaggactgatgtggtagatttcctaatggaaacattcatcatgtttaagaacctcattggaaagaacgtttaccccttcgactgggtgatcatgaacatggtgcaaaataaagtcttcctgcgagcaattaatcagtatgcagatatgctgaacaaaaaatttctggatcaagccaactttgagctacagctgtggaacaactactttcacctggctgttgctttccttactcaagagtccctgcaactggagaatttttcaagtgccaagagagccaaaatccttaacaagtacggagatatgaggagacagattggctttgaaatcagagacatgtggtacaaccttggtcaacacaagataaagttcattccagaaatggtgggcccaatattagaaatgacattaattcccgagacggagctgcgcaaagccaccatccccatcttctttgatatgatgcagtgtgaattccattcgacccgaagcttccaaatgtttgaaaatgagatcatcaccaagctggatcatgaagtcgaaggaggcagaggagacgaacagtacaaagtgttatttgataaaatccttctggaacactgcaggaagcacaaatacctcgccaaaacaggagaaacttttgtaaaactcgttgtgcgcttaatggaaaggcttttggattatagaaccatcatgcacgacgagaacaaagaaaaccgcatgagctgcaccgtcaatgtgctgaatttctacaaagaaattgaaagagaagaaatgtatataaggtatttgtacaagctctgtgacctgcacaaggagtgtgataactacaccgaagcggcttacaccttgcttctccatgcaaagcttcttaagtggtcggaggatgtgtgtgtggcccacctcacccagcgggacgggtaccaggccaccacgcagggacagctgaaggagcagctctaccaggaaatcatccactacttcgacaaaggcaagatgtgggaggaggccattgccttgggcaaggagctagccgagcagtatgagaacgaaatgtttgattatgagcaactcagcgaattgctgaaaaaacaggctcagttttatgaaaacatcgtcaaagtgatcaggcccaagcctgactattttgctgttggctactacggacaagggttccccacattcctgcggggaaaagttttcatttaccgagggaaagagtatgagcgccgggaagattttgaggctcggctcttaactcagtttccaaacgccgagaaaatgaagacaacatctccaccaggcgacgatattaaaaactctcctggccagtatattcagtgcttcacagtgaagcccaaactcgatctgcctcctaagtttcacaggccagtgtcagagcagattgtaagtttttacagggtgaacgaggtccagcgatttgaatattctcggccaatccggaagggagagaaaaacccagacaatgaatttgcgaatatgtggatcgagagaaccatatatacaactgcatataaattacctggaattttaaggtggtttgaggtcaagtctgttttcatggtggaaatcagccccctggagaatgccattgagaccatgcagctgacgaacgacaagatcaacagcatggtgcagcagcacctggatgaccccagcctgcccatcaacccgctctccatgctcctgaacggcatcgtggacccagctgtcatggggggcttcgcaaactacgaaaaggccttctttacagaccggtacctgcaggagcaccctgaggcccatgaaaagatcgagaagctcaaggacctgattgcttggcagattccttttctggccgaagggatcagaatccatggagacaaagtcacggaggcactgaggccgttccacgagaggatggaggcctgtttcaaacagctgaaggaaaaggtggagaaagagtacggcgtccgaatcatgccctcaagtctggatgatagaagaggcagccgcccccggtccatggtgcggtccttcacgatgccttcctcatcccgccctctgtctgtggcctctgtctcttccctctcatcggacagcaccccttccagaccaggctccgacgggtttgccctggagcctctcctgccaaagaaaatgcactccaggtcccaggacaagctggacaaggatgacctggagaaggagaagaaggacaagaagaaggaaaaaaggaacagcaaacatcaagagatatttgagaaagaatttaaacccaccgacatttccctgcagcagtctgaggctgtgatcctttcggaaacgataagtcccctgcggccccagagaccgaagagccaggtgatgaacgtcattggaagcgaaaggcgcttctcggtgtccccctcgtcaccgtcctcccagcaaacaccccctccagttacaccaagggccaagctcagcttcagcatgcagtcgagcttggagctgaacggcatgacgggggcggacgtggccgatgtcccaccccctctgcctctcaaaggcagcgtggcagattacgggaatttgatggaaaaccaggacttgctgggctcgccaacacctccacctccccctccacaccagaggcatctgccacctccactgcccagcaaaactccgcctcctccccctccaaagacaactcgcaagcagacatcggtggactccgggatcgtgcagtgacgtcgcaagcctctctggaaagagtgtgctgcccctccccatctccatgccctctccttctgtgtcccctgagtctgctgtttacctcattgggcctgtgatgttaacatttcgtgcgactgctttttcttcaaaggagttcagttctcaccatggagtgagtggcctttagcgtcatggagcaaggtgggtctgggaggtagatatgggtccgggatgtgctatcgtagttatcagagttgggggcctctgagtgtgtctggctctgagagagtctgagtcttgcccaaacattctttctttttgtgccaaatgacttgcatttgcaaagagctcaattgctctgagctcagccaagtaggagaggctaggccatcactcttaggaagctgtgtagtgatgatgtataagaatcctcctcactgtcatgggatgttgtatccagcccctccttgttccagccggtggtgtgacttcgttggttgaggtgtgtctccaacctacatcagaccatgaagttcaacccctccagggaagctcctgatttcccctgcataattgaaaataggatatttctcagctattgaacagttactaatttatggggtggaaacagcattaagaatactgaatcaaatggaaaaacaaatgaatacaggaagataagtgttcgttcttttctgaaaaagagtatgtgtaccacaagagctggttttaattgggtgaattgtttttgtcctcattctgtacagaaatttgtatatatgatggttcttagaacttgttttaatttttgtggtccttccgtttattataataggcgtccaccaatgattatccatatgtgttcttaatttttaactgctggaagtgttaaaacacacacacacacacacacacattttttttttgagaactccaaagtcctgaaaattttggtggacaatgatttttaaaaaactaactttgtataacctaatatttgtattctctcatctatatttttttattcactataatcatgatactcttctaatagacttaaaagttaatcattgacaacgaaaaataaaatgttattttaaaaga

SEQ ID NO: 823 - protein, 1865 aa, Homo sapiens
MTRWVPTKREEKYGVAFYNYDARGADELSLQIGDTVHILETYEGWYRGYTLRKKSKKGIFPASYIHLKEAIVEGKGQHETVIPGDLPLIQEVTTTLREWSTIWRQLYVQDNREMFRSVRHMIYDLIEWRSQILSGTLPQDELKELKKKVTAKIDYGNRILDLDLVVRDEDGNILDPELTSTISLFRAHEIASKQVEERLQEEKSQKQNIDINRQAKFAATPSLALFVNLKNVVCKIGEDAEVLMSLYDPVESKFISENYLVRWSSSGLPKDIDRLHNLRAVFTDLGSKDLKREKISFVCQIVRVGRMELRDNNTRKLTSGLRRPFGVAVMDVTDIINGKVDDEDKQHFIPFQPVAGENDFLQTVINKVIAAKEVNHKGQGLWVTLKLLPGDIHQIRKEFPHLVDRTTAVARKTGFPEIIMPGDVRNDIYVTLVQGDFDKGSKTTAKNVEVTVSVYDEDGKRLEHVIFPGAGDEAISEYKSVIYYQVKQPRWFETVKVAIPIEDVNRSHLRFTFRHRSSQDSKDKSEKIFALAFVKLMRYDGTTLRDGEHDLIVYKAEAKKLEDAATYLSLPSTKAELEEKGHSATGKSMQSLGSCTISKDSFQISTLVCSTKLTQNVDLLGLLKWRSNTSLLQQNLRQLMKVDGGEVVKFLQDTLDALFNIMMENSESETFDTLVFDALVFIIGLIADRKFQHFNPVLETYIKKHFSATLAYTKLTKVLKNYVDGAEKPGVNEQLYKAMKALESIFKFIVRSRILFNQLYENKGEADFVESLLQLFRSINDMMSSMSDQTVRVKGAALKYLPTIVNDVKLVFDPKELSKMFTEFILNVPMGLLTIQKLYCLIEIVHSDLFTQHDCREILLPMMTDQLKYHLERQEDLEACCQLLSHILEVLYRKDVGPTQRHVQIIMEKLLRTVNRTVISMGRDSELIGNFVACMTAILRQMEDYHYAHLIKTFGKMRTDVVDFLMETFIMFKNLIGKNVYPFDWVIMNMVQNKVFLRAINQYADMLNKKFLDQANFELQLWNNYFHLAVAFLTQESLQLENFSSAKRAKILNKYGDMRRQIGFEIRDMWYNLGQHKIKFIPEMVGPILEMTLIPETELRKATIPIFFDMMQCEFHSTRSFQMFENEIITKLDHEVEGGRGDEQYKVLFDKILLEHCRKHKYLAKTGETFVKLVVRLMERLLDYRTIMHDENKENRMSCTVNVLNFYKEIEREEMYIRYLYKLCDLHKECDNYTEAAYTLLLHAKLLKWSEDVCVAHLTQRDGYQATTQGQLKEQLYQEIIHYFDKGKMWEEAIALGKELAEQYENEMFDYEQLSELLKKQAQFYENIVKVIRPKPDYFAVGYYGQGFPTFLRGKVFIYRGKEYERREDFEARLLTQFPNAEKMKTTSPPGDDIKNSPGQYIQCFTVKPKLDLPPKFHRPVSEQIVSFYRVNEVQRFEYSRPIRKGEKNPDNEFANMWIERTIYTTAYKLPGILRWFEVKSVFMVEISPLENAIETMQLTNDKINSMVQQHLDDPSLPINPLSMLLNGIVDPAVMGGFANYEKAFFTDRYLQEHPEAHEKIEKLKDLIAWQIPFLAEGIRIHGDKVTEALRPFHERMEACFKQLKEKVEKEYGVRIMPSSLDDRRGSRPRSMVRSFTMPSSSRPLSVASVSSLSSDSTPSRPGSDGFALEPLLPKKMHSRSQDKLDKDDLEKEKKDKKKEKRNSKHQEIFEKEFKPTDISLQQSEAVILSETISPLRPQRPKSQVMNVIGSERRFSVSPSSPSSQQTPPPVTPRAKLSFSMQSSLELNGMTGADVADVPPPLPLKGSVADYGNLMENQDLLGSPTPPPPPPHQRHLPPPLPSKTPPPPPPKTTRKQTSVDSGIVQ

SEQ ID NO: 824 - DNA, 1011 bp, Homo sapiens
aaaccacccaccttcaccatgtctgacgaggaagttgaacaggtggaggagcagtacgaagaagaagaggaagcccaggaggaagaggaagttcaagaagacaccgcagaggaggacgcggaagaggagaaaccgagacccaaactcactgctcctaagatcccagaaggggagaaagtggacttcgatgacatccagaagaagcgtcagaacaaagacctaatggagctccaggccctcatcgacagccactttgaagcccggaagaaggaggaggaggagctggtcgctctcaaagagagaatcgagaagcgccgtgcagagagagcggagcagcagaggattcgtgcagagaaggagagggagcgccagaacagactggcggaggaaaaggccagaagggaggaggaggatgccaagaggagggcagaggacgacctgaagaagaagaaagctctgtcttccatgggagccaactacagcagctacctggccaaggctgaccagaagagaggcaagaagcagacagcccgggaaatgaagaagaagattctggctgagagacgcaagccgctcaacatcgatcaccttggtgaagacaaactgagggacaaggccaaggagctctgggagaccctgcaccagctggagattgacaagttcgagtttggggagaagctgaaacgccagaaatatgacatcaccacgctcaggagccgcattgaccaggcccagaagcacagcaagaaggctgggaccccagccaagggcaaagtcggcgggcgctggaagtagagaggccagaaaggcccctcgaggcagagaccctccgccctcttgcacaccagggccgctcgtgggactccacatcctccagcccccacaatcctgtcaggggctccctgacagtcctgggggtggagaggccatcccggggcgtcccccgcgtctgtgtccttgctgccttcatcccctggggcctgtgaataaagctgcagaacccccttcaaa

SEQ ID NO: 825 - protein, 258 aa, Homo sapiens
MSDEEVEQVEEQYEEEEEAQEEEEVQEDTAEEDAEEEKPRPKLTAPKIPEGEKVDFDDIQKKRQNKDLMELQALIDSHFEARKKEEEELVALKERIEKRRAERAEQQRIRAEKERERQNRLAEEKARREEEDAKRRAEDDLKKKKALSSMGANYSSYLAKADQKRGKKQTAREMKKKILAERRKPLNIDHLGEDKLRDKAKELWETLHQLEIDKFEFGEKLKRQKYDITTLRSRIDQAQKHSKKAGTPAKGKVGGRWK

SEQ ID NO: 826 - DNA, 701 bp, Homo sapiens
gggcgggcgcgctgctccttccgcctcgcggaccccggaagcgcgcgtggccgccatggcgcggaatgtggtgtaccccctgtaccggctgggtggcccacaacttcgggtgttccgaaccaacttcttcattcagctggtgcggcccggtgtggcccagcccgaggacaccgtgcagttccggatccccatggaaatgacaagggtggacctcaggaattacctcgagggcatctataacgtgcccgtggctgctgtgcggacacgggtgcagcatggctctaacaagagaagagatcacagaaacgtgaggatcaagaagccggactacaaggtcgcctacgtgcagctggcccatggacagaccttcacgttcccagatctgtttcccgagaaagacgagagccctgaaggcagcactgccgacgacctctacagcatgctcgaggaggagaggcagcagaggcagagcagcgacccgcggcggggcggcgtccccagctggttcgggctgtgacggggtggccagcagggacgcgccccaggtgggcagctgtggcagagcagcgacccgcggcggggcggcatccccagctggttcgggccgtgacggggcggccagcagggacgcgccccaggtgggcagctgtggcagagcagtcccgacacctaaataaaagtcttgctgcaggagaaagaaa

SEQ ID NO: 827 - protein, 153 aa, Homo sapiens
MARNVVYPLYRLGGPQLRVFRTNFFIQLVRPGVAQPEDTVQFRIPMEMTRVDLRNYLEGIYNVPVAAVRTRVQHGSNKRRDHRNVRIKKPDYKVAYVQLAHGQTFTFPDLFPEKDESPEGSTADDLYSMLEEERQQRQSSDPRRGGVPSWFGL

SEQ ID NO: 828 - DNA, 2322 bp, Homo sapiens
gggagggggtgggatgggtggggggtaacgggggaaactggggaagtggggaaccgaggggcaaccaggggaagatggggtgctggaggagagcttgtgggagccaaggagcaccttggacatctggagtctggcaggagtgatgacgggtggaggggctagctcgaggcagggctggtggggcctgaggccagtgaggagtgtggagtaggcgcccaggcatcgtgcagacagggcgacatcagctggggacgatgggcctgagctagggctggaaagaagggggagccaggcattcatcccggtcacttttggttacaggacgtggcagctggttggacgaggggagctggtgggcagggtttgatcccagggcctgggcaacggaggtgtagctggcagcagcgggcaggtgaggaccccatctgccgggcaggtgagtcccttccctccccaggcctcgcttccccagccttctgaaagaaggaggtttaggggatcgagggctggcggggagaagcagacaccctcccagcagaggggcaggatgggggcaggagagttagcaaaggtgacatcttctcggggggagccgagactgcgcaaggctggggggttatgggcccgttccaggcagaaagagcaagagggcagggagggagcacaggggtggccagcgtagggtccagcacgtggggtggtaccccaggcctgggtcagacagggacatggcaggggacacaggacagaggggtccccagctgccacctcacccaccgcaattcatttagtagcaggcacaggggcagctccggcacggctttctcaggcctatgccggagcctcgagggctggagagcgggaagacaggcagtgctcggggagttgcagcaggacgtcaccaggagggcgaagcggccacgggaggggggccccgggacattgcgcagcaaggaggctgcaggggctcggcctgcgggcgccggtcccacgaggcactgcggcccagggtctggtgcggagagggcccacagtggacttggtgacgctgtatgccctcaccgctcagcccctggggctggcttggcagacagtacagcatccaggggagtcaagggcatggggcgagaccagactaggcgaggcgggcggggcggagtgaatgagctctcaggagggaggatggtgcaggcaggggtgaggagcgcagcgggcggcgagcgggaggcactggcctccagagcccgtggccaaggcgggcctcgcgggcggcgacggagccgggatcggtgcctcagcgttcgggctggagacgaggccaggtctccagctggggtggacgtgcccaccagctgccgaaggccaagacgccaggtccggtggacgtgacaagcaggacatgacatggtccggtgtgacggcgaggacagaggaggcgcgtccggccttcctgaacaccttaggctggtggggctgcggcaagaagcgggtctgtttctttacttcctccacggagtcggcacactatggctgccctctgggctcccagaacccacaacatgaaagaaatggtgctacccagctcaagcctgggcctttgaatccggacacaaaaccctctagcttggaaatgaatatgctgcactttacaaccactgcactacctgactcaggaatcggctctggaaggtgaagctagaggaaccagacctcatcagcccaacatcaaagacaccatcggaacagcagcgcccgcagcacccaccccgcaccggcgactccatcttcatggccaccccctgcggcggacggttgaccaccagccaccacatcatcccagagctgagctcctccagcgggatgacgccgtccccaccacctccctcttcttctttttcatccttctgtctctttgtttctgagctttcctgtctttccttttttctgagagattcaaagcctccacgactctgtttcccccgtcccttctgaatttaatttgcactaagtcatttgcactggttggagttgtggagacggccttgagtctcagtacgagtgtgcgtgagtgtgagccaccttggcaagtgcctgtgcagggcccggccgccctccatctgggccgggtgactgggcgccggctgtgtgcccgaggcctcaccctgccctcgcctagtctggaagctccgaccgacatcacggagcagccttcaagcattccattacgccccatctcgctctgtgcccctccccaccagggcttcagcaggagccctggactcatcatcaataaacactgttacagcaaaaaaaaaaaaaaaa

SEQ ID NO: 829 - DNA, 5165 bp, Homo sapiens
cgcctgtccccctcccgaggcccgggctcgcgacggcagagggctccgtcggcccaaaccgagctgggcgcccgcggtccgggtgcagcctccactccgccccccagtcaccgcctcccccggcccctcgacgtggcgcccttccctccgcttctctgtgctccccgcgcccctcttggcgtctggccccggcccccgctctttctcccgcaaccttcccttcgctccctcccgtcccccccagctcctagcctccgactccctccccccctcacgcccgccctctcgccttcgccgaaccaaagtggattaattacacgctttctgtttctctccgtgctgttctctcccgctgtgcgcctgcccgcctctcgctgtcctctctccccctcgccctctcttcggcccccccctttcacgttcactctgtctctcccactatctctgcccccctctatccttgatacaacagctgacctcatttcccgataccttttcccccccgaaaagtacaacatctggcccgccccagcccgaagacagcccgtcctccctggacaatcagacgaattctccccccccccccaaaaaaaagccatccccccgctctgccccgtcgcacattcggcccccgcgactcggccagagcggcgctggcagaggagtgtccggcaggagggccaacgcccgctgttcggtttgcgacacgcagcagggaggtgggcggcagcgtcgccggcttccagacaccaatgggaatcccaatggggaagtcgatgctggtgcttctcaccttcttggccttcgcctcgtgctgcattgctgcttaccgccccagtgagaccctgtgcggcggggagctggtggacaccctccagttcgtctgtggggaccgcggcttctacttcagcaggcccgcaagccgtgtgagccgtcgcagccgtggcatcgttgaggagtgctgtttccgcagctgtgacctggccctcctggagacgtactgtgctacccccgccaagtccgagagggacgtgtcgacccctccgaccgtgcttccggacaacttccccagataccccgtgggcaagttcttccaatatgacacctggaagcagtccacccagcgcctgcgcaggggcctgcctgccctcctgcgtgcccgccggggtcacgtgctcgccaaggagctcgaggcgttcagggaggccaaacgtcaccgtcccctgattgctctacccacccaagaccccgcccacgggggcgcccccccagagatggccagcaatcggaagtgagcaaaactgccgcaagtctgcagcccggcgccaccatcctgcagcctcctcctgaccacggacgtttccatcaggttccatcccgaaaatctctcggttccacgtccccctggggcttctcctgacccagtccccgtgccccgcctccccgaaacaggctactctcctcggccccctccatcgggctgaggaagcacagcagcatcttcaaacatgtacaaaatcgattggctttaaacacccttcacataccctccccccaaattatccccaattatccccacacataaaaaatcaaaacattaaactaacccccttcccccccccccacaacaaccctcttaaaactaattggctttttagaaacaccccacaaaagctcagaaattggctttaaaaaaaacaaccaccaaaaaaaatcaattggctaaaaaaaaaaagtattaaaaacgaattggctgagaaacaattggcaaaataaaggaatttggcactccccacccccctctttctcttctcccttggactttgagtcaaattggcctggacttgagtccctgaaccagcaaagagaaaagaaggaccccagaaatcacaggtgggcacgtcgctgctaccgccatctcccttctcacgggaattttcagggtaaactggccatccgaaaatagcaacaacccagactggctcctcactcccttttccatcactaaaaatcacagagcagtcagagggacccagtaagaccaaaggaggggaggacagagcatgaaaaccaaaatccatgcaaatgaaatgtaattggcacgaccctcacccccaaatcttacatctcaattcccatcctaaaaagcactcatactttatgcatccccgcagctacacacacacaacacacagcacacgcatgaacacagcacacacacgagcacagcacacacacaaacgcacagcacacacagcacacagatgagcacacagcacacacacaaacgcacagcacacacacgcacacacatgcacacacagcacacaaacgcacggcacacacacgcacacacatgcacacacagcacacacacaaacgcacagcacacacaaacgcacagcacacacgcacacacagcacacacacgagcacacagcacacaaacgcacagcacacgcacacacatgcacacacagcacacacactagcacacagcacacacacaaagacacagcacacacatgcacacacagcacacacacgcgaacacagcacacacgaacacagcacacacagcacacacacaaacacagcacacacatgcacacagcacacgcacacacagcacacacatgaacacagcacacagcacacacatgcacacacagcacacacgcatgcacagcacacatgaacacagcacacacacaaacacacagcacacacatgcacacacagcacacacactcatgcgcagcacatacatgaacacagctcacagcacacaaacacgcagcacacacgttgcacacgcaagcacccacctgcacacacacatgcgcacacacacgcacacccccacaaaattggatgaaaacaataagcatatctaagcaactacgatatctgtatggatcaggccaaagtcccgctaagattctccaatgttttcatggtctgagccccgctcctgttcccatctccactgcccctcggccctgtctgtgccctgcctctcagaggagggggctcagatggtgcggcctgagtgtgcggccggcggcatttgggatacacccgtagggtgggcggggtgtgtcccaggcctaattccatctttccaccatgacagagatgcccttgtgaggctggcctccttggcgcctgtccccacggcccccgcagcgtgagccacgatgctccccataccccacccattcccgatacaccttacttactgtgtgttggcccagccagagtgaggaaggagtttggccacattggagatggcggtagctgagcagacatgcccccacgagtagcctgactccctggtgtgctcctggaaggaagatcttggggacccccccaccggagcacacctagggatcatctttgcccgtctcctggggaccccccaagaaatgtggagtcctcgggggccgtgcactgatgcggggagtgtgggaagtctggcggttggaggggtgggtggggggcagtgggggctgggcggggggagttctggggtaggaagtggtcccgggagattttggatggaaaagtcaggaggattgacagcagacttgcagaattacatagagaaattaggaacccccaaatttcatgtcaattgatctattccccctctttgtttcttggggcatttttccttttttttttttttttgttttttttttacccctccttagctttatgcgctcagaaaccaaattaaaccccccccccatgtaacaggggggcagtgacaaaagcaagaacgcacgaagccagcctggagaccaccacgtcctgccccccgccatttatcgccctgattggattttgtttttcatctgtccctgttgcttgggttgagttgagggtggagcctcctggggggcactggccactgagcccccttggagaagtcagaggggagtggagaaggccactgtccggcctggcttctggggacagtggctggtccccagaagtcctgagggcggaggggggggttgggcagggtctcctcaggtgtcaggagggtgctcggaggccacaggagggggctcctggctggcctgaggctggccggaggggaaggggctagcaggtgtgtaaacagagggttccatcaggctggggcagggtggccgccttccgcacacttgaggaaccctcccctctccctcggtgacatcttgcccgcccctcagcaccctgccttgtctccaggaggtccgaagctctgtgggacctcttgggggcaaggtggggtgaggccggggagtagggaggtcaggcgggtctgagcccacagagcaggagagctgccaggtctgcccatcgaccaggttgcttgggccccggagcccacgggtctggtgatgccatagcagccaccaccgcggcgcctagggctgcggcagggactcggcctctgggaggtttacctcgcccccacttgtgcccccagctcagcccccctgcacgcagcccgactagcagtctagaggcctgaggcttctgggtcctggtgacggggctggcatgaccccgggggtcgtccatgccagtccgcctcagtcgcagagggtccctcggcaagcgccctgtgagtgggccattcggaacattggacagaagcccaaagagccaaattgtcacaattgtggaacccacattggcctgagatccaaaacgcttcgaggcaccccaaattacctgcccattcgtcaggacacccacccacccagtgttatattctgcctcgccggagtgggtgttcccgggggcacttgccgaccagccccttgcgtccccaggtttgcagctctcccctgggccactaaccatcctggcccgggctgcctgtctgacctccgtgcctagtcgtggctctccatcttgtctcctccccgtgtccccaatgtcttcagtggggggccccctcttgggtcccctcctctgccatcacctgaagacccccacgccaaacactgaatgtcacctgtgcctgccgcctcggtccaccttgcggcccgtgtttgactcaactcaactcctttaacgctaatatttccggcaaaatcccatgcttgggttttgtctttaaccttgtaacgcttgcaatcccaataaagcattaaaagtcatga

SEQ ID NO: 830 - protein, 180 aa, Homo sapiens
MGIPMGKSMLVLLTFLAFASCCIAAYRPSETLCGGELVDTLQFVCGDRGFYFSRPASRVSRRSRGIVEECCFRSCDLALLETYCATPAKSERDVSTPPTVLPDNFPRYPVGKFFQYDTWKQSTQRLRRGLPALLRARRGHVLAKELEAFREAKRHRPLIALPTQDPAHGGAPPEMASNRK

SEQ ID NO: 831 - DNA, 5139 bp, Homo sapiens
ccgctaatgtaccatgccctggtgctggaaagtgcctgagccagctgccccagcggcctcggcactaccaagttggcacaaagctccccaaattcggaggggctcagggaaacgagtggaggggatgaggaggtgaggggtaaacccatcatttcagttggcatttgagcaggtgccatgctcagcggagatgaggctctcccatctgtaggggccgtattaacatgcacactctaaaagtgcccttcgtttctccagcctcagctttgtccctctcctcctccacgtcaacctggccagagggtctggacgccacagccagggcaccccctgctttggtggtgactgctaatattggccaggccggcggatcatcgtccaggcagtttcggcagagagccttgggcaccagtgactccccggtcctctttatccactgtccaggagctgcggggactgcgcagggactagagtacaggggccgaagagtcaccaccgagcttgtgtgggaggaggtggattccagcccccagccccagggctctgaatcgctgccagctcagccccctgcccagcctgccccacagcctgagccccagcaggccagagagcccagtcctgaggtgagctgctgtggcctgtggcccaggcgaccccagcgctcccagaactgaggctggcagccagccccagcctcagccccaactgcgaggcagagagacaccaatgggaatcccaatggggaagtcgatgctggtgcttctcaccttcttggccttcgcctcgtgctgcattgctgcttaccgccccagtgagaccctgtgcggcggggagctggtggacaccctccagttcgtctgtggggaccgcggcttctacttcagcaggcccgcaagccgtgtgagccgtcgcagccgtggcatcgttgaggagtgctgtttccgcagctgtgacctggccctcctggagacgtactgtgctacccccgccaagtccgagagggacgtgtcgacccctccgaccgtgcttccggacaacttccccagataccccgtgggcaagttcttccaatatgacacctggaagcagtccacccagcgcctgcgcaggggcctgcctgccctcctgcgtgcccgccggggtcacgtgctcgccaaggagctcgaggcgttcagggaggccaaacgtcaccgtcccctgattgctctacccacccaagaccccgcccacgggggcgcccccccagagatggccagcaatcggaagtgagcaaaactgccgcaagtctgcagcccggcgccaccatcctgcagcctcctcctgaccacggacgtttccatcaggttccatcccgaaaatctctcggttccacgtccccctggggcttctcctgacccagtccccgtgccccgcctccccgaaacaggctactctcctcggccccctccatcgggctgaggaagcacagcagcatcttcaaacatgtacaaaatcgattggctttaaacacccttcacataccctccccccaaattatccccaattatccccacacataaaaaatcaaaacattaaactaacccccttcccccccccccacaacaaccctcttaaaactaattggctttttagaaacaccccacaaaagctcagaaattggctttaaaaaaaacaaccaccaaaaaaaatcaattggctaaaaaaaaaaagtattaaaaacgaattggctgagaaacaattggcaaaataaaggaatttggcactccccacccccctctttctcttctcccttggactttgagtcaaattggcctggacttgagtccctgaaccagcaaagagaaaagaaggaccccagaaatcacaggtgggcacgtcgctgctaccgccatctcccttctcacgggaattttcagggtaaactggccatccgaaaatagcaacaacccagactggctcctcactcccttttccatcactaaaaatcacagagcagtcagagggacccagtaagaccaaaggaggggaggacagagcatgaaaaccaaaatccatgcaaatgaaatgtaattggcacgaccctcacccccaaatcttacatctcaattcccatcctaaaaagcactcatactttatgcatccccgcagctacacacacacaacacacagcacacgcatgaacacagcacacacacgagcacagcacacacacaaacgcacagcacacacagcacacagatgagcacacagcacacacacaaacgcacagcacacacacgcacacacatgcacacacagcacacaaacgcacggcacacacacgcacacacatgcacacacagcacacacacaaacgcacagcacacacaaacgcacagcacacacgcacacacagcacacacacgagcacacagcacacaaacgcacagcacacgcacacacatgcacacacagcacacacactagcacacagcacacacacaaagacacagcacacacatgcacacacagcacacacacgcgaacacagcacacacgaacacagcacacacagcacacacacaaacacagcacacacatgcacacagcacacgcacacacagcacacacatgaacacagcacacagcacacacatgcacacacagcacacacgcatgcacagcacacatgaacacagcacacacacaaacacacagcacacacatgcacacacagcacacacactcatgcgcagcacatacatgaacacagctcacagcacacaaacacgcagcacacacgttgcacacgcaagcacccacctgcacacacacatgcgcacacacacgcacacccccacaaaattggatgaaaacaataagcatatctaagcaactacgatatctgtatggatcaggccaaagtcccgctaagattctccaatgttttcatggtctgagccccgctcctgttcccatctccactgcccctcggccctgtctgtgccctgcctctcagaggagggggctcagatggtgcggcctgagtgtgcggccggcggcatttgggatacacccgtagggtgggcggggtgtgtcccaggcctaattccatctttccaccatgacagagatgcccttgtgaggctggcctccttggcgcctgtccccacggcccccgcagcgtgagccacgatgctccccataccccacccattcccgatacaccttacttactgtgtgttggcccagccagagtgaggaaggagtttggccacattggagatggcggtagctgagcagacatgcccccacgagtagcctgactccctggtgtgctcctggaaggaagatcttggggacccccccaccggagcacacctagggatcatctttgcccgtctcctggggaccccccaagaaatgtggagtcctcgggggccgtgcactgatgcggggagtgtgggaagtctggcggttggaggggtgggtggggggcagtgggggctgggcggggggagttctggggtaggaagtggtcccgggagattttggatggaaaagtcaggaggattgacagcagacttgcagaattacatagagaaattaggaacccccaaatttcatgtcaattgatctattccccctctttgtttcttggggcatttttccttttttttttttttttgttttttttttacccctccttagctttatgcgctcagaaaccaaattaaaccccccccccatgtaacaggggggcagtgacaaaagcaagaacgcacgaagccagcctggagaccaccacgtcctgccccccgccatttatcgccctgattggattttgtttttcatctgtccctgttgcttgggttgagttgagggtggagcctcctggggggcactggccactgagcccccttggagaagtcagaggggagtggagaaggccactgtccggcctggcttctggggacagtggctggtccccagaagtcctgagggcggaggggggggttgggcagggtctcctcaggtgtcaggagggtgctcggaggccacaggagggggctcctggctggcctgaggctggccggaggggaaggggctagcaggtgtgtaaacagagggttccatcaggctggggcagggtggccgccttccgcacacttgaggaaccctcccctctccctcggtgacatcttgcccgcccctcagcaccctgccttgtctccaggaggtccgaagctctgtgggacctcttgggggcaaggtggggtgaggccggggagtagggaggtcaggcgggtctgagcccacagagcaggagagctgccaggtctgcccatcgaccaggttgcttgggccccggagcccacgggtctggtgatgccatagcagccaccaccgcggcgcctagggctgcggcagggactcggcctctgggaggtttacctcgcccccacttgtgcccccagctcagcccccctgcacgcagcccgactagcagtctagaggcctgaggcttctgggtcctggtgacggggctggcatgaccccgggggtcgtccatgccagtccgcctcagtcgcagagggtccctcggcaagcgccctgtgagtgggccattcggaacattggacagaagcccaaagagccaaattgtcacaattgtggaacccacattggcctgagatccaaaacgcttcgaggcaccccaaattacctgcccattcgtcaggacacccacccacccagtgttatattctgcctcgccggagtgggtgttcccgggggcacttgccgaccagccccttgcgtccccaggtttgcagctctcccctgggccactaaccatcctggcccgggctgcctgtctgacctccgtgcctagtcgtggctctccatcttgtctcctccccgtgtccccaatgtcttcagtggggggccccctcttgggtcccctcctctgccatcacctgaagacccccacgccaaacactgaatgtcacctgtgcctgccgcctcggtccaccttgcggcccgtgtttgactcaactcaactcctttaacgctaatatttccggcaaaatcccatgcttgggttttgtctttaaccttgtaacgcttgcaatcccaataaagcattaaaagtcatga

SEQ ID NO: 832 - protein, 180 aa, Homo sapiens; identical to SEQ ID NO: 830

SEQ ID NO: 833 - DNA, 2071 bp, Homo sapiens
cggagtcctaggcccgcgggctagaggcactttaccgcccggcgggagcgcctctcctccgcgtccctcgccccagccccctgcccgccccactttgggaccctccagccgctttccccacaaatgagatctttgcaatgagcaaacgaaagtggcgcggatttcggggcgcccagcaggagcgagcgcagccgccagccgcaagtccgcagccgtgtcccgcgccccacgccggcctccccggcggcagccggagacgagcgccagcaccggcgggacagcagcagatgcgggccgagagccggtcaggggcgcagaggcggaggggatcggcgcggcggggagctcaccgcgaagctggaggctgcgtccgcgggcgcaccaggagctcaggcagcgagcgatcgaacgctctgtggcaggcggtggacgctgctgaagctctggctctgagctcaccgctccgccgtccgtgggaccaagcccagcattttacaaacccagctcctttctccaagggtcctcagagcgcccctccgtcaccccctgcagggcgccgcagacgaggcgctgaccttgcgctcactcccctcgctggggaaggacacactcgctggcgtcagcccggccggcctgggaagtaggactaaggacccgaactgcaaccctccacaccagacagcacagaccaccccaaggctgctcaatctgcccaaagccaaaagagctcccctgccaggacctcggtgccgtggagactgcggggaacctgctctgcccacacctgctctggcccctagacggaagcacctggagccaaccacggaactccagatcccagctgtgtgactgaatccacgccagcctctctgagccaaagctgcttgcagaagggggagatcccagttcgaagactcccgcgcagagcctgtggccctctctgccaggcctcagggtgcctgagacactcacctctctgcctcgcagttggggctgaggctggggctggctgccagcctcagttctgggagcgctggggtcgcctgggccacaggccacagcagctcacctcaggactgggctctctggcctgctggggctcaggctgtggggcaggctgggcagggggctgagctggcagcgattcagagccctggggctgggggctggaatccacctcctcccacacaagctcggtggtgactcttcggcccctggggaaaaacaaaaagatattgctgagatgacctcttttaaaagcaaagcccccctccccatacaccccaagcctgagccctgtcccatccccctccccgggttccttcaggtcaccttgtcaggatctgggcagcggcttccccctctagcccctcccctgcctagagctccctctttcaaagtataagggagggaagaagtggtgagaagtttgcctagaaagggcttcccggtgctgatggagaggccgagacccttctgttggacaggctgccctgttcctgggtgaggatgggcttctgcctggcactgggggtggagggtgcacacgaatggcccgccttgaggggtcatggcacggaatatgaaagcctcctccacctccaaacacccccaccttggaaggagataaggagggggccccagcaaaagccactggacacacagctctgcttgacgaggccagtgagggacggcgtggctgtgcttcctggggaaatgaaccccctccccacagacaccaccctgggtggatcgaggagtctgggtccagggtgcaacagagaaaaacttcatgcatgaatgagcattcccagggaaactgccttggccccagggcgcctctctgtgccagggaggctgggagagcagcaagggggaccaggtgcgccatcaggaggagagaagctaaacctaggggggacatggagggcggttgttgcctctcccggcatttctcctcagtctcctgtccaatttcttgctggtggtcaggaggcatagggaggcaggagggaaggaagctttacctgtaaaatggtgtatatatgtataaataaaatctctgcgccag

SEQ ID NO: 834 - protein, 168 aa, Homo sapiens
MSKRKWRGFRGAQQERAQPPAASPQPCPAPHAGLPGGSRRRAPAPAGQQQMRAESRSGAQRRRGSARRGAHREAGGCVRGRTRSSGSERSNALWQAVDAAEALALSSPLRRPWDQAQHFTNPAPFSKGPQSAPPSPPAGRRRRGADLALTPLAGEGHTRWRQPGRPGK

SEQ ID NO: 835 - DNA, 469 bp, Homo sapiens
agccctccaggacaggctgcatcagaagaggccatcaagcagatcactgtccttctgccatggccctgtggatgcgcctcctgcccctgctggcgctgctggccctctggggacctgacccagccgcagcctttgtgaaccaacacctgtgcggctcacacctggtggaagctctctacctagtgtgcggggaacgaggcttcttctacacacccaagacccgccgggaggcagaggacctgcaggtggggcaggtggagctgggcgggggccctggtgcaggcagcctgcagcccttggccctggaggggtccctgcagaagcgtggcattgtggaacaatgctgtaccagcatctgctccctctaccagctggagaactactgcaactagacgcagcccgcaggcagccccacacccgccgcctcctgcaccgagagagatggaataaagcccttgaaccagcaaaa

SEQ ID NO: 836 - protein, 110 aa, Homo sapiens
MALWMRLLPLLALLALWGPDPAAAFVNQHLCGSHLVEALYLVCGERGFFYTPKTRREAEDLQVGQVELGGGPGAGSLQPLALEGSLQKRGIVEQCCTSICSLYQLENYCN

SEQ ID NO: 837 - DNA, 1817 bp, Homo sapiens
cggacctccacactgagccatgcccacccccgacgccaccacgccacaggccaagggcttccgcagggccgtgtctgagctggacgccaagcaggcagaggccatcatgtccccgcggttcattgggcgcaggcagagcctcatcgaggacgcccgcaaggagcgggaggcggcggtggcagcagcggccgctgcagtcccctcggagcccggggaccccctggaggctgtggcctttgaggagaaggaggggaaggccgtgctaaacctgctcttctccccgagggccaccaagccctcggcgctgtcccgagctgtgaaggtgtttgagacgtttgaagccaaaatccaccatctagagacccggcccgcccagaggccgcgagctgggggcccccacctggagtacttcgtgcgcctcgaggtgcgccgaggggacctggccgccctgctcagtggtgtgcgccaggtgtcagaggacgtgcgcagccccgcggggcccaaggtcccctggttcccaagaaaagtgtcagagctggacaagtgtcatcacctggtcaccaagttcgaccctgacctggacttggaccacccgggcttctcggaccaggtgtaccgccagcgcaggaagctgattgctgagatcgccttccagtacaggcacggcgacccgattccccgtgtggagtacaccgccgaggagattgccacctggaaggaggtctacaccacgctgaagggcctctacgccacgcacgcctgcggggagcacctggaggcctttgctttgctggagcgcttcagcggctaccgggaagacaatatcccccagctggaggacgtctcccgcttcctgaaggagcgcacgggcttccagctgcggcctgtggccggcctgctgtccgcccgggacttcctggccagcctggccttccgcgtgttccagtgcacccagtatatccgccacgcgtcctcgcccatgcactcccctgagccggactgctgccacgagctgctggggcacgtgcccatgctggccgaccgcaccttcgcgcagttctcgcaggacattggcctggcgtccctgggggcctcggatgaggaaattgagaagctgtccacgctgtactggttcacggtggagttcgggctgtgtaagcagaacggggaggtgaaggcctatggtgccgggctgctgtcctcctacggggagctcctgcactgcctgtctgaggagcctgagattcgggccttcgaccctgaggctgcggccgtgcagccctaccaagaccagacgtaccagtcagtctacttcgtgtctgagagcttcagtgacgccaaggacaagctcaggagctatgcctcacgcatccagcgccccttctccgtgaagttcgacccgtacacgctggccatcgacgtgctggacagcccccaggccgtgcggcgctccctggagggtgtccaggatgagctggacacccttgcccatgcgctgagtgccattggctaggtgcacggcgtccctgagggcccttcccaacctcccctggtcctgcactgtcccggagctcaggccctggtgaggggctgggtcccgggtgccccccatgccctccctgctgccaggctcccactgcccctgcacctgcttctcagcgcaacagctgtgtgtgcccgtggtgaggttgtgctgcctgtggtgaggtcctgtcctggctcccagggtcctgggggctgctgcactgccctccgcccttccctgacactgtctgctgccccaatcaccgtcacaataaaagaaactgtggtctcta

SEQ ID NO: 838 - protein, 497 aa, Homo sapiens
MPTPDATTPQAKGFRRAVSELDAKQAEAIMSPRFIGRRQSLIEDARKEREAAVAAAAAAVPSEPGDPLEAVAFEEKEGKAVLNLLFSPRATKPSALSRAVKVFETFEAKIHHLETRPAQRPRAGGPHLEYFVRLEVRRGDLAALLSGVRQVSEDVRSPAGPKVPWFPRKVSELDKCHHLVTKFDPDLDLDHPGFSDQVYRQRRKLIAEIAFQYRHGDPIPRVEYTAEEIATWKEVYTTLKGLYATHACGEHLEAFALLERFSGYREDNIPQLEDVSRFLKERTGFQLRPVAGLLSARDFLASLAFRVFQCTQYIRHASSPMHSPEPDCCHELLGHVPMLADRTFAQFSQDIGLASLGASDEEIEKLSTLYWFTVEFGLCKQNGEVKAYGAGLLSSYGELLHCLSEEPEIRAFDPEAAAVQPYQDQTYQSVYFVSESFSDAKDKLRSYASRIQRPFSVKFDPYTLAIDVLDSPQAVRRSLEGVQDELDTLAHALSAIG

SEQ ID NO: 839 - DNA, 1910 bp, Homo sapiens
cggacctccacactgagccatgcccacccccgacgccaccacgccacaggccaagggcttccgcagggccgtgtctgagctggacgccaagcaggcagaggccatcatggtaagagggcagggcgccccggggcccagcctcacaggctctccgtggcctggaactgcagccccagctgcatcctacacccccaccccaaggtccccgcggttcattgggcgcaggcagagcctcatcgaggacgcccgcaaggagcgggaggcggcggtggcagcagcggccgctgcagtcccctcggagcccggggaccccctggaggctgtggcctttgaggagaaggaggggaaggccgtgctaaacctgctcttctccccgagggccaccaagccctcggcgctgtcccgagctgtgaaggtgtttgagacgtttgaagccaaaatccaccatctagagacccggcccgcccagaggccgcgagctgggggcccccacctggagtacttcgtgcgcctcgaggtgcgccgaggggacctggccgccctgctcagtggtgtgcgccaggtgtcagaggacgtgcgcagccccgcggggcccaaggtcccctggttcccaagaaaagtgtcagagctggacaagtgtcatcacctggtcaccaagttcgaccctgacctggacttggaccacccgggcttctcggaccaggtgtaccgccagcgcaggaagctgattgctgagatcgccttccagtacaggcacggcgacccgattccccgtgtggagtacaccgccgaggagattgccacctggaaggaggtctacaccacgctgaagggcctctacgccacgcacgcctgcggggagcacctggaggcctttgctttgctggagcgcttcagcggctaccgggaagacaatatcccccagctggaggacgtctcccgcttcctgaaggagcgcacgggcttccagctgcggcctgtggccggcctgctgtccgcccgggacttcctggccagcctggccttccgcgtgttccagtgcacccagtatatccgccacgcgtcctcgcccatgcactcccctgagccggactgctgccacgagctgctggggcacgtgcccatgctggccgaccgcaccttcgcgcagttctcgcaggacattggcctggcgtccctgggggcctcggatgaggaaattgagaagctgtccacgctgtactggttcacggtggagttcgggctgtgtaagcagaacggggaggtgaaggcctatggtgccgggctgctgtcctcctacggggagctcctgcactgcctgtctgaggagcctgagattcgggccttcgaccctgaggctgcggccgtgcagccctaccaagaccagacgtaccagtcagtctacttcgtgtctgagagcttcagtgacgccaaggacaagctcaggagctatgcctcacgcatccagcgccccttctccgtgaagttcgacccgtacacgctggccatcgacgtgctggacagcccccaggccgtgcggcgctccctggagggtgtccaggatgagctggacacccttgcccatgcgctgagtgccattggctaggtgcacggcgtccctgagggcccttcccaacctcccctggtcctgcactgtcccggagctcaggccctggtgaggggctgggtcccgggtgccccccatgccctccctgctgccaggctcccactgcccctgcacctgcttctcagcgcaacagctgtgtgtgcccgtggtgaggttgtgctgcctgtggtgaggtcctgtcctggctcccagggtcctgggggctgctgcactgccctccgcccttccctgacactgtctgctgccccaatcaccgtcacaataaaagaaactgtggtctcta

SEQ ID NO: 840 - protein, 528 aa, Homo sapiens
MPTPDATTPQAKGFRRAVSELDAKQAEAIMVRGQGAPGPSLTGSPWPGTAAPAASYTPTPRSPRFIGRRQSLIEDARKEREAAVAAAAAAVPSEPGDPLEAVAFEEKEGKAVLNLLFSPRATKPSALSRAVKVFETFEAKIHHLETRPAQRPRAGGPHLEYFVRLEVRRGDLAALLSGVRQVSEDVRSPAGPKVPWFPRKVSELDKCHHLVTKFDPDLDLDHPGFSDQVYRQRRKLIAEIAFQYRHGDPIPRVEYTAEEIATWKEVYTTLKGLYATHACGEHLEAFALLERFSGYREDNIPQLEDVSRFLKERTGFQLRPVAGLLSARDFLASLAFRVFQCTQYIRHASSPMHSPEPDCCHELLGHVPMLADRTFAQFSQDIGLASLGASDEEIEKLSTLYWFTVEFGLCKQNGEVKAYGAGLLSSYGELLHCLSEEPEIRAFDPEAAAVQPYQDQTYQSVYFVSESFSDAKDKLRSYASRIQRPFSVKFDPYTLAIDVLDSPQAVRRSLEGVQDELDTLAHALSAIG

SEQ ID NO: 841 - DNA, 1898 bp, Homo sapiens
cggacctccacactgagccatgcccacccccgacgccaccacgccacaggccaagggcttccgcagggccgtgtctgagctggacgccaagcaggcagaggccatcatgggcgccccggggcccagcctcacaggctctccgtggcctggaactgcagccccagctgcatcctacacccccaccccaaggtccccgcggttcattgggcgcaggcagagcctcatcgaggacgcccgcaaggagcgggaggcggcggtggcagcagcggccgctgcagtcccctcggagcccggggaccccctggaggctgtggcctttgaggagaaggaggggaaggccgtgctaaacctgctcttctccccgagggccaccaagccctcggcgctgtcccgagctgtgaaggtgtttgagacgtttgaagccaaaatccaccatctagagacccggcccgcccagaggccgcgagctgggggcccccacctggagtacttcgtgcgcctcgaggtgcgccgaggggacctggccgccctgctcagtggtgtgcgccaggtgtcagaggacgtgcgcagccccgcggggcccaaggtcccctggttcccaagaaaagtgtcagagctggacaagtgtcatcacctggtcaccaagttcgaccctgacctggacttggaccacccgggcttctcggaccaggtgtaccgccagcgcaggaagctgattgctgagatcgccttccagtacaggcacggcgacccgattccccgtgtggagtacaccgccgaggagattgccacctggaaggaggtctacaccacgctgaagggcctctacgccacgcacgcctgcggggagcacctggaggcctttgctttgctggagcgcttcagcggctaccgggaagacaatatcccccagctggaggacgtctcccgcttcctgaaggagcgcacgggcttccagctgcggcctgtggccggcctgctgtccgcccgggacttcctggccagcctggccttccgcgtgttccagtgcacccagtatatccgccacgcgtcctcgcccatgcactcccctgagccggactgctgccacgagctgctggggcacgtgcccatgctggccgaccgcaccttcgcgcagttctcgcaggacattggcctggcgtccctgggggcctcggatgaggaaattgagaagctgtccacgctgtactggttcacggtggagttcgggctgtgtaagcagaacggggaggtgaaggcctatggtgccgggctgctgtcctcctacggggagctcctgcactgcctgtctgaggagcctgagattcgggccttcgaccctgaggctgcggccgtgcagccctaccaagaccagacgtaccagtcagtctacttcgtgtctgagagcttcagtgacgccaaggacaagctcaggagctatgcctcacgcatccagcgccccttctccgtgaagttcgacccgtacacgctggccatcgacgtgctggacagcccccaggccgtgcggcgctccctggagggtgtccaggatgagctggacacccttgcccatgcgctgagtgccattggctaggtgcacggcgtccctgagggcccttcccaacctcccctggtcctgcactgtcccggagctcaggccctggtgaggggctgggtcccgggtgccccccatgccctccctgctgccaggctcccactgcccctgcacctgcttctcagcgcaacagctgtgtgtgcccgtggtgaggttgtgctgcctgtggtgaggtcctgtcctggctcccagggtcctgggggctgctgcactgccctccgcccttccctgacactgtctgctgccccaatcaccgtcacaataaaagaaactgtggtctcta

SEQ ID NO: 842 - protein, 524 aa, Homo sapiens
MPTPDATTPQAKGFRRAVSELDAKQAEAIMGAPGPSLTGSPWPGTAAPAASYTPTPRSPRFIGRRQSLIEDARKEREAAVAAAAAAVPSEPGDPLEAVAFEEKEGKAVLNLLFSPRATKPSALSRAVKVFETFEAKIHHLETRPAQRPRAGGPHLEYFVRLEVRRGDLAALLSGVRQVSEDVRSPAGPKVPWFPRKVSELDKCHHLVTKFDPDLDLDHPGFSDQVYRQRRKLIAEIAFQYRHGDPIPRVEYTAEEIATWKEVYTTLKGLYATHACGEHLEAFALLERFSGYREDNIPQLEDVSRFLKERTGFQLRPVAGLLSARDFLASLAFRVFQCTQYIRHASSPMHSPEPDCCHELLGHVPMLADRTFAQFSQDIGLASLGASDEEIEKLSTLYWFTVEFGLCKQNGEVKAYGAGLLSSYGELLHCLSEEPEIRAFDPEAAAVQPYQDQTYQSVYFVSESFSDAKDKLRSYASRIQRPFSVKFDPYTLAIDVLDSPQAVRRSLEGVQDELDTLAHALSAIG

SEQ ID NO: 843 - DNA, 2347 bp, Homo sapiens
gggaggtttggagccctgcataaagagaaggacgggaccacagctgactgctgtgtccccacagatctgggcctcctgctgccaccatggccaaaggtggagaagccctgccacagggcagcccagcaccagtccaggatccccacctcatcaaggtgacagtgaagacgcccaaagacaaggaggatttctcagttacagacacatgcactatccagcagctgaaggaagagatatctcagcgctttaaggcccaccccgatcagcttgttctaatctttgctggcaaaatcctcaaggatcctgactcactggcacagtgtggagtgcgagatggcctcactgtccacctggtcatcaagaggcagcaccgtgccatgggcaatgagtgcccagctgcctctgtccctacccagggcccaagtcctggatcactccctcagccaagctccatttacccagcagatgggccccctgcctttagcttaggtctcctcacaggcctcagtaggctgggcttggcctatcgtggcttccctgaccagccaagctccctgatgcggcagcatgtgtctgtgcctgagtttgtgactcagctcattgatgaccccttcatcccgggtctgctgtccaacacaggcctagtacgccagctggttcttgacaacccccatatgcagcagctgatccagcacaaccctgagattgggcatattcttaacaacccggaaattatgcggcagacactggagtttttacgtaaccctgccatgatgcaggagatgatacgtagccaggaccgggtgctcagtaacttggagagcattcctggtggctacaatgtgctttgcactatgtacacagatattatggacccaatgcttaacgcagtccaggagcagtttggcggcaatccctttgccactgccactactgataatgccaccaccaccaccagccaaccttcaaggatggagaattgtgaccctctccccaacccctggacttccacacatggaggctcaggtagcaggcaaggaaggcaggatggggatcaggatgcacctgacattagaaataggtttccaaactttctgggtattataaggctctatgactatctccagcaattacacgagaacccccagtccctaggaacttatctacaggggactgcatctgccctcagccaaagccaggaaccaccaccatcagtaaacagagttcccccatcgtcaccctcatctcaggagcctgggtcaggccagcctctccccgaggagtcagtagcaatcaagggaaggtcctcctgcccagctttcctgagataccccacagagaacagtactggacaaggtggagaccaagatggtgcagggaaaagctctactggacatagcacaaacttgcctgatcttgtctcggggctgggagattctgccaacagggttccatttgctcccttatctttttcccccacggcagccattcctggaatccctgagcctccctggctgccatccccggcttatccaagatctctgaggccagatggcatgaatccagctccacagttacaggatgagatacaaccacagctgccactgctgatgcaccttcaggcagccatggcaaacccccgtgccctgcaagccctgcggcagattgagcagggtctacaggtcctagctactgaagcacctcgcctcctactctggttcatgccttgcctagcagggacgggtagtgtggcaggaggtatagagtctagagaagatccccttatgtctgaggatcctctcccaaatccacctcctgaggtgttcccagcactggactctgcagagctgggcttcctttcccctccctttctccatatgctgcaagatttagttagtacaaatccccagcagctgcagcctgaggctcactttcaggtgcagctggagcaactgcggtccatgggctttctgaatcgtgaagccaatcttcaggccctcattgctacggggggcgacgtggatgctgctgtggagaagctgagacagtcgtaggagccttattcattcaaaccatacgttttcctctgtgcctttttcccatatcctagttccctagctctcccatttttgaatacagctgcattataaaccaaatttactatgaagtcctttgctgtggaggcaatgttgttccagagtcaacgaggaagactaatggccaaaacatagtggaggtgctgtgtgtgagtcaaccacttgtaccactataccactggggggccccagtctaagctctgcttatgcctatcttgagatgcaattacacccaatttccaatgtgaaaa

SEQ ID NO: 844 - protein, 655 aa, Homo sapiens
MAKGGEALPQGSPAPVQDPHLIKVTVKTPKDKEDFSVTDTCTIQQLKEEISQRFKAHPDQLVLIFAGKILKDPDSLAQCGVRDGLTVHLVIKRQHRAMGNECPAASVPTQGPSPGSLPQPSSIYPADGPPAFSLGLLTGLSRLGLAYRGFPDQPSSLMRQHVSVPEFVTQLIDDPFIPGLLSNTGLVRQLVLDNPHMQQLIQHNPEIGHILNNPEIMRQTLEFLRNPAMMQEMIRSQDRVLSNLESIPGGYNVLCTMYTDIMDPMLNAVQEQFGGNPFATATTDNATTTTSQPSRMENCDPLPNPWTSTHGGSGSRQGRQDGDQDAPDIRNRFPNFLGIIRLYDYLQQLHENPQSLGTYLQGTASALSQSQEPPPSVNRVPPSSPSSQEPGSGQPLPEESVAIKGRSSCPAFLRYPTENSTGQGGDQDGAGKSSTGHSTNLPDLVSGLGDSANRVPFAPLSFSPTAAIPGIPEPPWLPSPAYPRSLRPDGMNPAPQLQDEIQPQLPLLMHLQAAMANPRALQALRQIEQGLQVLATEAPRLLLWFMPCLAGTGSVAGGIESREDPLMSEDPLPNPPPEVFPALDSAELGFLSPPFLHMLQDLVSTNPQQLQPEAHFQVQLEQLRSMGFLNREANLQALIATGGDVDAAVEKLRQS

SEQ ID NO: 845 - DNA, 2350 bp, Homo sapiens
agccctaggagaagtcatcaccactttgtccaccatgggtgaattatgaatcagtagctatgccaggcctcagctgggccacatctggagaactggggtgagggcacaacatcacaaaatatctggccccagtctggtcactcatcccttttagggcaacaaggaaactatcctgtggcctgagagcacaatacctgagacaaaggccagcagaaacatttgtctgccctcaccctttctgccccagcttccacctgctccccatctgcccacccactaaagcccatgtggcatgccatctctcgaacatccaggatgtcccagagtggatgtccatcaggtctgctggcagacaaaaatatctcttcaagtgccactcgagtgatagtgaagactgcaggcaaccagaaagactttatggtagctgatgacatctcggtaaggcagttcaaggagatgctattggctcacttccaatgccagatggaccaactagtgctggtcttcatgggttgccttctcaaagaccatgacacactgagccagaggggcatcatggatggccacaccatctacttggtcatcaagtccaagcagggctccagatctctagcccattccttccgggacctgccaacgaatgatccctgccaccgggacagaaacaccaaaggaaacagcagcagagtgcaccaaccaactggtatgaatcaagctccagtggaactggcccactttgtggggtctgatgcacccaaagtgcatacccaaaacttggaagtgagccacccagagtgcaaagcacagatgctggagaatcctagcatccagcggcttctgtccaacatggagttcatgtggcagttcatttcagaacatctagacacgcaacaattgatgcagcagaacccagaagtttcccgccttcttcttgataattctgagatcctattgcagactctggagctggccaggaaccttgctatgatccaagagataatgcagatccaacaaccttcacaaaaccttgagtatccactgaacccacagccatatctgggcttagagacaatgccaggtgggaataatgccctgggtcagaactatgctgatatcaatgatcaaatgctgaacagcatgcaagatccttttggaggaaaccctttcacagctctcctggcaggacaagtgctagaacaagtccagtcttcacccccacctccaccaccatcacaggaacaacaagaccagctcacacagcatcctgcaacccgagtcatctataatagctctggtggtttctcttcaaacacctcagccaatgacacccttaacaaggtcaaccacacttccaaagccaacactgctatgatttccaccaagggccagagccatatctgtgccactcggcagccagcttggataccagccttacctagcatagagcttacccagcagcttcaagaagaatacaaggatgccactgtttctctaagtagctccagacagacattaaagggtgatctccagctgtcagatgagcagagcagctcccagatcacaggaggcatgatgcagttgcttatgaacaacccctacctggcagctcagattatgttgttcacaagtatgccccagctgagtgaacagtggaggcagcagctgcccacattcctgcagcagacacagatttctgatctgcttagtgcttaggcaaccctaaagcattccaagcaatattgcagattgagcaggccctccagctgctggccacagaggctcctgttcttctgccttgggttgcaccctacctatggggcctgggttggcttcctgcccccagctgcagctatcctgacacagtgccctgttcctggaatgtttcagatacagctgagcccaagggacctgagtgctgccacaagcctggaacagtcctgcagaggctacaatccccggatggggacccttcccaccctctgcaagctcctgagatttgttttagcaaacagatggattctctccaggccatgggatttgggaaccaccatgccaatctacaggcactcattgctactgaaggggacaccaatgctgctatccgcaagctcaagagatcccagagattctaaccaccatgcctacttgtttgcttgctacctgcctgctgacccacctgaccatctcatttgccttttgcacctttcctgatgcttccagccaggagaagtcctggaataagagttatcaaccaatgtgtcttgtactgaataatagatcattggtcgtggctgaaacatctgtcaataaaatggctacactcacttgctgcgaaaaaaaaaaaaaaaaa

SEQ ID NO: 846 - protein, 475 aa, Homo sapiens
MWHAISRTSRMSQSGCPSGLLADKNISSSATRVIVKTAGNQKDFMVADDISVRQFKEMLLAHFQCQMDQLVLVFMGCLLKDHDTLSQRGIMDGHTIYLVIKSKQGSRSLAHSFRDLPTNDPCHRDRNTKGNSSRVHQPTGMNQAPVELAHFVGSDAPKVHTQNLEVSHPECKAQMLENPSIQRLLSNMEFMWQFISEHLDTQQLMQQNPEVSRLLLDNSEILLQTLELARNLAMIQEIMQIQQPSQNLEYPLNPQPYLGLETMPGGNNALGQNYADINDQMLNSMQDPFGGNPFTALLAGQVLEQVQSSPPPPPPSQEQQDQLTQHPATRVIYNSSGGFSSNTSANDTLNKVNHTSKANTAMISTKGQSHICATRQPAWIPALPSIELTQQLQEEYKDATVSLSSSRQTLKGDLQLSDEQSSSQITGGMMQLLMNNPYLAAQIMLFTSMPQLSEQWRQQLPTFLQQTQISDLLSA

SEQ ID NO: 847 - DNA, 1473 bp, Homo sapiens
atgcttcattatgtttactgtgcctgtggccatggtttgcagctggtgagaagtgtgtcaagctctgtggatgaaggaggcacatgccattgtatggttcacctacccaacaaccccatccccctggagcagctggaacagctacaaagtacagctcaggagctcatttgcaagtatgagcagaagctgtctagagtgaaaaattgtgcacgcgccattgaagataaagacaatgaggttctggaaatgagtcacatgctgaagtcctggaatcccagtgcccttgcttctccctatgagaacccaggcttcaacctgctgtgcctggagctggagggagcacaggagttggtgactcaacttaaagccatgggaggtgttagtgtggctggggacctcctccaccaacttcagagccaggtgactaacgccagtctcacactcaaacttttggctgactctgaccagtgcagctttggtgctctccagcaggaggtggatgtccttgagagtcaactaagtgaatgtgagagagaaaaggagaaagaataggcctttggacaccctggaccacccctccccccggtgacttcttgtgcccatggaggcctccaggaagttagcaaatcccttgtggtgcagctcactcggagaggcttctcatataaggcaggtccctggggccgagactcagcacccaatccagcctcttccctttactgggttgctcctctacgtacagatggcaggtactttgactactatcggctgtgcaaatcctataatgacctcgcactgctgaaaaactatgaagagaggaagatgggctatggtgatggcagtggaaacgttgtgtacaagaactttatgtactttaactactgtggcacaagtgacatggccaaaatggacctttcctccaacacactggtgctgtggcgtctgctgcctggtgccacctataacaaccgcttttcctatgctggtgtgccctggaaggacttagattttgctggtgatgagaaggggctgtgggttctctatgccactgaggagagcaagggcaacctggttgtgagtcgtctcaacgctagcaccctagaagtggagaaaacctggcgtaccagccagtacaagccagccctgtcaggggccttcatggcctgtggggtgctctatgccttacattcactgaacacccaccaagaggagatcttctatgcttttgacaccaccaccgggcaggagcgccgcctcagcatcctgttggacaagatgctggaaaagctgcagggcatcaactactgcccctcagaccacaagccgtatgtcttcagtgatggttacctgataaattatgacctcaccttcctgacaatgaagaccaggctaccaagaccacccaccaggaggccctctggggctcatgctccaccaaaacctgtcaaacctaacgaggcttccagaccctga

SEQ ID NO: 848 - DNA, 963 bp, Homo sapiens
atgccatctgcctctgccatgatcattttcaacctgagcagttacaatccaggacccttcattctggtagggatcccaggcctggagcaattccatgtgtggattggaattcccttctgtatcatctacattgtagctgttgtgggaaactgcatccttctctacctcattgtggtggagcatagtcttcatgaacccatgttcttctttctctccatgctggccatgactgacctcatcttgtccacagctggtgtgcctaaagcactcagtatcttttggctaggggctcgcgaaatcacattcccaggatgccttacacaaatgttcttccttcactataactttgtcctggattcagccattctgatggccatggcatttgatcactatgtagctatctgttctcccttgagatataccaccatcttgactcccaagaccatcatcaagagtgctatgggcatctcctttcgaagcttctgcatcatcctgccagatgtattcttgctgacatgcctgcctttctgcaggacacgcatcataccccacacatactgtgagcatataggtgttgcccagctcgcctgtgctgatatctccatcaacttctggtatggcttttgtgttcccatcatgacggtcatctcagatgtgattctcattgctgtttcctacgcacacatcctctgtgctgtctttggccttccctcccaagatgcctgccagaaagccctcggcacttgtggttctcatgtctgtgtcatcctcatgttttatacacctgcctttttctccatcctcgcccatcgctttggacacaatgtctctcgcaccttccacatcatgtttgccaatctctacattgttatcccacctgcactcaaccccatggtttacggagtgaagaccaagcagatcagagataaggttatacttttgttttctaagggtacaggatga

SEQ ID NO: 849 - protein, 320 aa, Homo sapiens
MPSASAMIIFNLSSYNPGPFILVGIPGLEQFHVWIGIPFCIIYIVAVVGNCILLYLIVVEHSLHEPMFFFLSMLAMTDLILSTAGVPKALSIFWLGAREITFPGCLTQMFFLHYNFVLDSAILMAMAFDHYVAICSPLRYTTILTPKTIIKSAMGISFRSFCIILPDVFLLTCLPFCRTRIIPHTYCEHIGVAQLACADISINFWYGFCVPIMTVISDVILIAVSYAHILCAVFGLPSQDACQKALGTCGSHVCVILMFYTPAFFSILAHRFGHNVSRTFHIMFANLYIVIPPALNPMVYGVKTKQIRDKVILLFSKGTG

SEQ ID NO: 850 - DNA, 1259 bp, Homo sapiens
atgtctaagtcagagtctcctaaagagcctgaacagctgaggaaactgttcattggagggttgagctttgaaacaaccgatgagaggctgaggaaggagccattttgagcaatgggaacactcatggattgtgtggtaatgagagacccaaacaccaagtgctccaggggctttgggtttgtcacatatgccactgtggaggaggtggatgcagccatgaatgcaaggccacacacggtggatggaagagtcgtggaaccaaagagagctgtctcaagagaagattctcaaagacccacttaactgtgaaaaagttatttgttggtggcattaaagaagacactgaagaacatcacctaagagattattttgaccagtatggaaaaattgaagtgattgactgaggcattggcaagaaaaggggctttgcctttgtaacctttgacaaccatgactctgtggataagattgtcattcagaaataccacactgtgaatggccacaactgtgaagttaggaaagccctgtgaaagcaagagatggctagtgcttcagccagccaaagaggtcaaagtggttctggaaactttgatggtggtatggaggtggtttcggtgggaatgacaactttggtcatggaggaaacttcagtggttgtggtggctttggtggcaaccatggtgctggtggatatggtggcagtggggatggctataacggatttggtaataatgaaagcaattttggaggtggtggaagctacagtgattttggcaattacaacaatcagtcttcaaatttcagacccatgaagggaggaaactttggaggcagaagccctggcccctatggtggtggaggccaatattttgccaaacctcgaaactaaagtggctatggtggttctagtagtagcagtagctatggcagtggcagaagattttaattaggaaacaaagcttatcaggagaagagagcaagagaagtgacagggaagctacaggttacaatagatttgtgaactcagccaagcacagtggtggcagggcctagctgctacaaagaagacatgttttagacaaatactcatgtttatgggcaaaaaactcgaggactgtatttgtgactaattgtataacaggttattttagtttctgttctgcggaaagtgtaaagcattccaacaaagggttatagtgtagatttttaactttttttgcacctatgctgttgaattctaaatgtaatagtctgattgt

SEQ ID NO: 851 - DNA, 1008 bp, Homo sapiens
atggcacaggtgagggcgctgcataaaatcatggcccttttttctgctaacagcataggtgctatgaacaactctgacactcgcatagcaggctgcttcctcactggcatccctgggctggagcaactacatatctggctgtccatccccttctgcatcatgtacatcactgccctggaaggcaatggcatcctaatttgtgtcatcctctcccaggcaatcctgcatgagcccatgtacatattcttatctatgctggccagtgctgatgtcttgctctctaccaccaccatgcctaaggccctggccaatttgtggctaggttatagcctcatttcctttgatggctgcctcactcagatgttcttcattcacttcctcttcattcactctgctgtcctgctggccatggcctttgaccgctatgtggccatctgctcccccctgcgatatgtcacaatcctcacaagcaaggtcattgggaagatcgtcactgccgccctgagccacagcttcatcattatgtttccatccatctttctccttgagcacctgcactattgccagatcaatatcattgcacacacattttgtgagcacatgggcattgcccatctgtcctgttctgatatctccatcaatgtctggtatgggttggcagctgctcttctctccacaggcctagacatcatgcttattactgtttcctacatccacatcctccaagcagtcttccgcctcctttctcaagatgcccgctccaaggccctgagtacctgtggatcccatatctgtgtcatcctactcttctatgtccctgcgcttttttctgtctttgcctacaggtttggtgggagaagcgtcccatgctatgtccatattctcctggccagcctctacgttgtcattcctcctatgctcaatcccgttatttatggagtgaggactaagccaatactggaaggggctaagcagatgttttcaaatcttgccaaaggatctaaataa

SEQ ID NO: 852 - protein, 335 aa, Homo sapiens
MAQVRALHKIMALFSANSIGAMNNSDTRIAGCFLTGIPGLEQLHIWLSIPFCIMYITALEGNGILICVILSQAILHEPMYIFLSMLASADVLLSTTTMPKALANLWLGYSLISFDGCLTQMFFIHFLFIHSAVLLAMAFDRYVAICSPLRYVTILTSKVIGKIVTAALSHSFIIMFPSIFLLEHLHYCQINIIAHTFCEHMGIAHLSCSDISINVWYGLAAALLSTGLDIMLITVSYIHILQAVFRLLSQDARSKALSTCGSHICVILLFYVPALFSVFAYRFGGRSVPCYVHILLASLYVVIPPMLNPVIYGVRTKPILEGAKQMFSNLAKGSK

SEQ ID NO: 853 - DNA, 3409 bp, Homo sapiens
gccttccgcaaactcctgacctgtgggtccatccgttcaacggccaaaggctggcggaggagggatcccctgcctttctcggaacggaacggagcagagtcgtgcgtggttgagtttagataaaagccgagtgagcgcgctctgttccttaagattagtttaaggtgccttggattgctctgaagagctttgaccacctgatattgcttacatctggaacttcttggcttctcattccccagatgtgcgggtcagagaggattctacaggcaggaaacatcttagaaatcagggttgggcaggcaggagccaggagagtagctacaatgacttcaccagtactggtggacatacgagaagaggtgacctgccctatctgcctggagctcctaacagaacccctgagcatagactgtggccacagcttctgccaagcctgcatcacaccaaatggcagggaatcagtgattggtcaagaaggggaaagaagctgccctgtgtgccagaccagctaccagccagggaacctgcggcctaatcggcatctggccaacatagtgaggcggctcagagaggtagtgttgggccctgggaagcagctgaaagcagttctttgtgcagaccatggagaaaaactgcagctcttctgtcaggaggatgggaaggtcatttgctggctttgtgagcggtctcaggagcaccgtggtcaccacacgttcctcgtggaggaggttgcccaggagtaccaggagaagtttcaggagtctctaaagaagctgaagaacgaggagcaggaagctgagaagctaacagcttttatcagagagaagaagacatcctggaagaatcagatggagcctgagagatgcaggatccagacagagtttaatcagctgcgaaatatcctagacagagtggagcaacgggagctgaaaaagctggaacaggaagagaagaaggggctacgaattatagaagaggctgagaatgatctggtccaccagacccagtcgctgcgagagctcatctcggatctggagcgtcgatgtcaggggtcaacaatggagctgctgcaggatgtgagtgatgtcacagaaaggagtgagttctggaccctgaggaagccagaagctctccctacaaagctgagaagtatgttccgagccccagatctgaaaaggatgctgcgagtgtgtagagagctgacagatgtccaaagctactgggttgacgtgaccctgaatccacacacagctaatttaaatcttgtcctggctaaaaaccggagacaagtgaggtttgtgggagctaaagtatctggaccttcctgtctggaaaagcattatgactgtagtgtcctgggctcccagcacttctcctctggtaagcattactgggaggtagatgtggccaagaagactgcctggatcctgggggtatgcagcaattcactgggacctacattctctttcaaccattttgctcaaaatcacagtgcttactccaggtatcagcctcagagtggatactgggtgattgggttacagcataaccatgaatatagggcctatgaggattcttccccttccctgcttctctccatgacagtgccccctcgccgtgttggggttttcttagattatgaggctggtactgtctccttttataatgtcacaaaccatggcttccccatctacactttctctaaatattactttcccactactctttgtccatattttaatccttgcaactgtgtaattcctatgaccctgcgtcgtccaagctcttgaatattcttctgttcccacccacttctgataagtaccctgaggcttatcagcatgtgattctcccttctgatcttctgtttttctgtgttctcaattcttttgttgttttttggtttttgaatcttttttgagatggaatctcgctctgtcgcccaggctggagtgcactggcgcaatctcggctcactgcaacctctgcctcctgggttcaagcgaacctcctgcctcagcatcccaagtagctgggattacaggcacccaccaccatgcccaactaatttttgtatttttatagagatagggtttcaccgtgttggccaggctgatctcgaactcctgaccgcaagtgatccacccgcctcggtctcccaaagtgctgggattacagatgtgagccgccgcgcccagacagttctttcgttttaaacagttactcagtactaggatgcacccagtggtgagagtaagcatctttgactgatgacaggtcttgaggtggatagggggcgctttcagtattttgccattaagcatagtatttgatgcaggttttttttgattgatgcaggggatcaaatttaggaagttctgatctgttaatttactacaagtttttgtataaaatgaaaactcgtattctacctatgtcttttctgtaaattattgagacaattgtgtatcatttttgttctgttaatgtggcttagtacattgatttacttcaatttgttaccacaacttgctgaaatacaccattattatttgttgtatgcaatactggatttattttgataacgtattgtttagattttgttctcatctatgttaatgaaagaaattggcctgtatttttacattcttgtaatatctttgccaggttctataaaatgcaataataagcaaataaattactttgtttttgtataagtatgtataggattgagctctaaaaccaaaccattataatgataatttgggtagcttcaaactcaaattgaagagagtcttcactacaatcttcactacaacctttggccttcctctctacatttaagagtagcaatagaacaataaaaaaaaatacgtctttcaaattaattgcagtaaaaacaaaagagtagtggggagagaaaaacaatccaatacatatttttctctcagaatagaaagaaaacacaaagagaaaatatgaacaatataaagcacttaaaggaagaggatgatttcttccagcttttccacactctctttatgcgcaggaacaaacagctgttgagtgagctgctatgactttggtagagaggtgcaatatgttttttgaaccagctataaaagaaattaagaggtacatgtgagggtagaaacaaatatcaaggatgagaatggcactggctgtcccatatggtatccaggagccaccaatgtctgttgagtacttcatacatgcctagtctgaattgagatgtgctcaatgtataaaatatataccagatttcaaatacctacttcaaaaaataatgtaaaatatctcactaataacttttcctttgtgtattgcaatgataatatgttggctctattggattaaataaagtatgttattcattttacctgtt

SEQ ID NO: 854 - protein, 516 aa, Homo sapiens
MCGSERILQAGNILEIRVGQAGARRVATMTSPVLVDIREEVTCPICLELLTEPLSIDCGHSFCQACITPNGRESVIGQEGERSCPVCQTSYQPGNLRPNRHLANIVRRLREVVLGPGKQLKAVLCADHGEKLQLFCQEDGKVICWLCERSQEHRGHHTFLVEEVAQEYQEKFQESLKKLKNEEQEAEKLTAFIREKKTSWKNQMEPERCRIQTEFNQLRNILDRVEQRELKKLEQEEKKGLRIIEEAENDLVHQTQSLRELISDLERRCQGSTMELLQDVSDVTERSEFWTLRKPEALPTKLRSMFRAPDLKRMLRVCRELTDVQSYWVDVTLNPHTANLNLVLAKNRRQVRFVGAKVSGPSCLEKHYDCSVLGSQHFSSGKHYWEVDVAKKTAWILGVCSNSLGPTFSFNHFAQNHSAYSRYQPQSGYWVIGLQHNHEYRAYEDSSPSLLLSMTVPPRRVGVFLDYEAGTVSFYNVTNHGFPIYTFSKYYFPTTLCPYFNPCNCVIPMTLRRPSS

SEQ ID NO: 855 - DNA, 3215 bp, Homo sapiens
ttcggcctgggtggaggacgcggctgcttcaagtccttggctctgatccaggccacagattccaggattctacaggcaggaaacatcttagaaatcagggttgggcaggcaggagccaggagagtagctacaatgacttcaccagtactggtggacatacgagaagaggtgacctgccctatctgcctggagctcctaacagaacccctgagcatagactgtggccacagcttctgccaagcctgcatcacaccaaatggcagggaatcagtgattggtcaagaaggggaaagaagctgccctgtgtgccagaccagctaccagccagggaacctgcggcctaatcggcatctggccaacatagtgaggcggctcagagaggtagtgttgggccctgggaagcagctgaaagcagttctttgtgcagaccatggagaaaaactgcagctcttctgtcaggaggatgggaaggtcatttgctggctttgtgagcggtctcaggagcaccgtggtcaccacacgttcctcgtggaggaggttgcccaggagtaccaggagaagtttcaggagtctctaaagaagctgaagaacgaggagcaggaagctgagaagctaacagcttttatcagagagaagaagacatcctggaagaatcagatggagcctgagagatgcaggatccagacagagtttaatcagctgcgaaatatcctagacagagtggagcaacgggagctgaaaaagctggaacaggaagagaagaaggggctacgaattatagaagaggctgagaatgatctggtccaccagacccagtcgctgcgagagctcatctcggatctggagcgtcgatgtcaggggtcaacaatggagctgctgcaggatgtgagtgatgtcacagaaaggagtgagttctggaccctgaggaagccagaagctctccctacaaagctgagaagtatgttccgagccccagatctgaaaaggatgctgcgagtgtgtagagagctgacagatgtccaaagctactgggttgacgtgaccctgaatccacacacagctaatttaaatcttgtcctggctaaaaaccggagacaagtgaggtttgtgggagctaaagtatctggaccttcctgtctggaaaagcattatgactgtagtgtcctgggctcccagcacttctcctctggtaagcattactgggaggtagatgtggccaagaagactgcctggatcctgggggtatgcagcaattcactgggacctacattctctttcaaccattttgctcaaaatcacagtgcttactccaggtatcagcctcagagtggatactgggtgattgggttacagcataaccatgaatatagggcctatgaggattcttccccttccctgcttctctccatgacagtgccccctcgccgtgttggggttttcttagattatgaggctggtactgtctccttttataatgtcacaaaccatggcttccccatctacactttctctaaatattactttcccactactctttgtccatattttaatccttgcaactgtgtaattcctatgaccctgcgtcgtccaagctcttgaatattcttctgttcccacccacttctgataagtaccctgaggcttatcagcatgtgattctcccttctgatcttctgtttttctgtgttctcaattcttttgttgttttttggtttttgaatcttttttgagatggaatctcgctctgtcgcccaggctggagtgcactggcgcaatctcggctcactgcaacctctgcctcctgggttcaagcgaacctcctgcctcagcatcccaagtagctgggattacaggcacccaccaccatgcccaactaatttttgtatttttatagagatagggtttcaccgtgttggccaggctgatctcgaactcctgaccgcaagtgatccacccgcctcggtctcccaaagtgctgggattacagatgtgagccgccgcgcccagacagttctttcgttttaaacagttactcagtactaggatgcacccagtggtgagagtaagcatctttgactgatgacaggtcttgaggtggatagggggcgctttcagtattttgccattaagcatagtatttgatgcaggttttttttgattgatgcaggggatcaaatttaggaagttctgatctgttaatttactacaagtttttgtataaaatgaaaactcgtattctacctatgtcttttctgtaaattattgagacaattgtgtatcatttttgttctgttaatgtggcttagtacattgatttacttcaatttgttaccacaacttgctgaaatacaccattattatttgttgtatgcaatactggatttattttgataacgtattgtttagattttgttctcatctatgttaatgaaagaaattggcctgtatttttacattcttgtaatatctttgccaggttctataaaatgcaataataagcaaataaattactttgtttttgtataagtatgtataggattgagctctaaaaccaaaccattataatgataatttgggtagcttcaaactcaaattgaagagagtcttcactacaatcttcactacaacctttggccttcctctctacatttaagagtagcaatagaacaataaaaaaaaatacgtctttcaaattaattgcagtaaaaacaaaagagtagtggggagagaaaaacaatccaatacatatttttctctcagaatagaaagaaaacacaaagagaaaatatgaacaatataaagcacttaaaggaagaggatgatttcttccagcttttccacactctctttatgcgcaggaacaaacagctgttgagtgagctgctatgactttggtagagaggtgcaatatgttttttgaaccagctataaaagaaattaagaggtacatgtgagggtagaaacaaatatcaaggatgagaatggcactggctgtcccatatggtatccaggagccaccaatgtctgttgagtacttcatacatgcctagtctgaattgagatgtgctcaatgtataaaatatataccagatttcaaatacctacttcaaaaaataatgtaaaatatctcactaataacttttcctttgtgtattgcaatgataatatgttggctctattggattaaataaagtatgttattcattttacctgtt

SEQ ID NO: 856 - protein, 488 aa, Homo sapiens
MTSPVLVDIREEVTCPICLELLTEPLSIDCGHSFCQACITPNGRESVIGQEGERSCPVCQTSYQPGNLRPNRHLANIVRRLREVVLGPGKQLKAVLCADHGEKLQLFCQEDGKVICWLCERSQEHRGHHTFLVEEVAQEYQEKFQESLKKLKNEEQEAEKLTAFIREKKTSWKNQMEPERCRIQTEFNQLRNILDRVEQRELKKLEQEEKKGLRIIEEAENDLVHQTQSLRELISDLERRCQGSTMELLQDVSDVTERSEFWTLRKPEALPTKLRSMFRAPDLKRMLRVCRELTDVQSYWVDVTLNPHTANLNLVLAKNRRQVRFVGAKVSGPSCLEKHYDCSVLGSQHFSSGKHYWEVDVAKKTAWILGVCSNSLGPTFSFNHFAQNHSAYSRYQPQSGYWVIGLQHNHEYRAYEDSSPSLLLSMTVPPRRVGVFLDYEAGTVSFYNVTNHGFPIYTFSKYYFPTTLCPYFNPCNCVIPMTLRRPSS

SEQ ID NO: 857 - DNA, 3490 bp, Homo sapiens
gccttccgcaaactcctgacctgtgggtccatccgttcaacggccaaaggctggcggaggagggatcccctgcctttctcggaacggaacggagcagagtcgtgcgtggttgagtttagataaaagccgagtgagcgcgctctgttccttaagattagtttaaggtgccttggattgctctgaagagctttgaccacctgatattgcttacatctggaacttcttggcttctcattccccagatgtgcgggtcagagaggattctacaggcaggaaacatcttagaaatcagggttgggcaggcaggagccaggagagtagctacaatgacttcaccagtactggtggacatacgagaagaggtgacctgccctatctgcctggagctcctaacagaacccctgagcatagactgtggccacagcttctgccaagcctgcatcacaccaaatggcagggaatcagtgattggtcaagaaggggaaagaagctgccctgtgtgccagaccagctaccagccagggaacctgcggcctaatcggcatctggccaacatagtgaggcggctcagagaggtagtgttgggccctgggaagcagctgaaagcagttctttgtgcagaccatggagaaaaactgcagctcttctgtcaggaggatgggaaggtcatttgctggctttgtgagcggtctcaggagcaccgtggtcaccacacgttcctcgtggaggaggttgcccaggagtaccaggagaagtttcaggagtctctaaagaagctgaagaacgaggagcaggaagctgagaagctaacagcttttatcagagagaagaagacatcctggaagaatcagatggagcctgagagatgcaggatccagacagagtttaatcagctgcgaaatatcctagacagagtggagcaacgggagctgaaaaagctggaacaggaagagaagaaggggctacgaattatagaagaggctgagaatgatctggtccaccagacccagtcgctgcgagagctcatctcggatctggagcgtcgatgtcaggggtcaacaatggagctgctgcaggatgtgagtgatgtcacagaaaggagtgagttctggaccctgaggaagccagaagctctccctacaaagctgagaagtatgttccgagccccagatctgaaaaggatgctgcgagtgtgtagagagctgacagatgtccaaagctactgggccatccaggggtctttaaccagaagagagaggagagcctcaggagttaggaccagaagaagccagggaagcagtgcaatggcttcaaaaatcttgcttaacgtacaagaggaggtgacctgtcccatctgcctggagctgttgacagaacccttgagtctagactgtggccacagcctctgccgagcctgcatcactgtgagcaacaaggaggcagtgaccagcatgggaggaaaaagcagctgtcctgtgtgtggtatcagttactcatttgaacatctacaggctaatcagcatctggccaacatagtggagagactcaaggaggtcaagttgagcccagacaatgggaagaagagagatctctgtgatcatcatggagagaaactcctactcttctgtaaggaggataggaaagtcatttgctggctttgtgagcggtctcaggagcaccgtggtcaccacacagtcctcacggaggaagtattcaaggaatgtcaggagaaactccaggcagtcctcaagaggctgaagaaggaagaggaggaagctgagaagctggaagctgacatcagagaagagaaaacttcctggaagtatcaggtacaaactgagagacaaaggatacaaacagaatttgatcagcttagaagcatcctaaataatgaggagcagagagagctgcaaagattggaagaagaagaaaagaagacgctggataagtttgcagaggctgaggatgagctagttcagcagaagcagttggtgagagagctcatctcagatgtggagtgtcggagtcagtggtcaacaatggagctgctgcaggacatgagtggaatcatgaaatggagtgagatctggaggctgaaaaagccaaaaatggtttccaagaaactgaagactgtattccatgctccagatctgagtaggatgctgcaaatgtttagagaactgacagctgtccggtgctactgggtggatgtcacactgaattcagtcaacctaaatttgaatcttgtcctttcagaagatcagagacaagtgatatctgtgccaatttggccttttcagtgttataattatggtgtcttgggatcccaatatttctcctctgggaaacattactgggaagtggacgtgtccaagaaaactgcctggatcctgggggtatactgtagaacatattcccgccatatgaagtatgttgttagaagatgtgcaaatcgtcaaaatctttacaccaaatacagacctctatttggctactgggttatagggttacagaataaatgtaagtatggtgtctttgaagagtctttgtcctctgatcccgaggttttgactctctccatggctgtgcctccctgccgtgttggggttttcctcgactatgaagcaggcattgtctcatttttcaatgtcacaagccatggctccctcatttacaagttctctaaatgttgcttttctcagcctgtttatccatatttcaatccttggaactgtccagctcccatgactctatgcccaccaagctcttgaattttctcatttcttcacctacaaccctttgtctcgacttatctcctgcaactgactcatctgcaacattcacaccattgcttccttgtggtttcccttctttagaacttttactcatccttgagatgtatggtgtatttggcttgagttatgagagatgcttatttattcatttactctttttcatattttcagagaaagttacctaatccctcctaaagacacagcagtatgggtataacatccttgccttcccatttatccatgtttcactttatcactgatgtgaagaggcccaaagcctgttagccaccatccatgctacctaggtagtccataggaaccacccccatgaccaccaccaacatcaactaaaggttcttggagggtatgtcagtgtgttgctcaggataccccaggtacatcaaggaatcaaggagaggaaaatatgagcaatatgtgtattcagagtgaagattttatgtccagagtatttgagctcaaaccttgcctgttgttttctaatcatgatgaatactttctcagtttctttttcctgaaatataaattgggatttaagactgtacctaactattaagatcactgtgtaaaactaagtgtctctaaatgtaatgcatcgatttagtgtctggaacataataaatatttgctctcatgattgctaaaaaaaaaaaaaaaaaaaaaaaaaaaaaaaaaaa

SEQ ID NO: 858 - protein, 842 aa, Homo sapiens
MCGSERILQAGNILEIRVGQAGARRVATMTSPVLVDIREEVTCPICLELLTEPLSIDCGHSFCQACITPNGRESVIGQEGERSCPVCQTSYQPGNLRPNRHLANIVRRLREVVLGPGKQLKAVLCADHGEKLQLFCQEDGKVICWLCERSQEHRGHHTFLVEEVAQEYQEKFQESLKKLKNEEQEAEKLTAFIREKKTSWKNQMEPERCRIQTEFNQLRNILDRVEQRELKKLEQEEKKGLRIIEEAENDLVHQTQSLRELISDLERRCQGSTMELLQDVSDVTERSEFWTLRKPEALPTKLRSMFRAPDLKRMLRVCRELTDVQSYWAIQGSLTRRERRASGVRTRRSQGSSAMASKILLNVQEEVTCPICLELLTEPLSLDCGHSLCRACITVSNKEAVTSMGGKSSCPVCGISYSFEHLQANQHLANIVERLKEVKLSPDNGKKRDLCDHHGEKLLLFCKEDRKVICWLCERSQEHRGHHTVLTEEVFKECQEKLQAVLKRLKKEEEEAEKLEADIREEKTSWKYQVQTERQRIQTEFDQLRSILNNEEQRELQRLEEEEKKTLDKFAEAEDELVQQKQLVRELISDVECRSQWSTMELLQDMSGIMKWSEIWRLKKPKMVSKKLKTVFHAPDLSRMLQMFRELTAVRCYWVDVTLNSVNLNLNLVLSEDQRQVISVPIWPFQCYNYGVLGSQYFSSGKHYWEVDVSKKTAWILGVYCRTYSRHMKYVVRRCANRQNLYTKYRPLFGYWVIGLQNKCKYGVFEESLSSDPEVLTLSMAVPPCRVGVFLDYEAGIVSFFNVTSHGSLIYKFSKCCFSQPVYPYFNPWNCPAPMTLCPPSS

SEQ ID NO: 859 - DNA, 2326 bp, Homo sapiens
cccgcctcagcctcccaaagtgctgggattacaggtgtgagccactgcgcccgtcctgactcatgcaacttctgcttcagccatccaggggtctttaaccagaagagagaggagagcctcaggagttaggaccagaagaagccagggaagcagtgcaatggcttcaaaaatcttgcttaacgtacaagaggaggtgacctgtcccatctgcctggagctgttgacagaacccttgagtctagactgtggccacagcctctgccgagcctgcatcactgtgagcaacaaggaggcagtgaccagcatgggaggaaaaagcagctgtcctgtgtgtggtatcagttactcatttgaacatctacaggctaatcagcatctggccaacatagtggagagactcaaggaggtcaagttgagcccagacaatgggaagaagagagatctctgtgatcatcatggagagaaactcctactcttctgtaaggaggataggaaagtcatttgctggctttgtgagcggtctcaggagcaccgtggtcaccacacagtcctcacggaggaagtattcaaggaatgtcaggagaaactccaggcagtcctcaagaggctgaagaaggaagaggaggaagctgagaagctggaagctgacatcagagaagagaaaacttcctggaagtatcaggtacaaactgagagacaaaggatacaaacagaatttgatcagcttagaagcatcctaaataatgaggagcagagagagctgcaaagattggaagaagaagaaaagaagacgctggataagtttgcagaggctgaggatgagctagttcagcagaagcagttggtgagagagctcatctcagatgtggagtgtcggagtcagtggtcaacaatggagctgctgcaggacatgagtggaatcatgaaatggagtgagatctggaggctgaaaaagccaaaaatggtttccaagaaactgaagactgtattccatgctccagatctgagtaggatgctgcaaatgtttagagaactgacagctgtccggtgctactgggtggatgtcacactgaattcagtcaacctaaatttgaatcttgtcctttcagaagatcagagacaagtgatatctgtgccaatttggccttttcagtgttataattatggtgtcttgggatcccaatatttctcctctgggaaacattactgggaagtggacgtgtccaagaaaactgcctggatcctgggggtatactgtagaacatattcccgccatatgaagtatgttgttagaagatgtgcaaatcgtcaaaatctttacaccaaatacagacctctatttggctactgggttatagggttacagaataaatgtaagtatggtgtctttgaagagtctttgtcctctgatcccgaggttttgactctctccatggctgtgcctccctgccgtgttggggttttcctcgactatgaagcaggcattgtctcatttttcaatgtcacaagccatggctccctcatttacaagttctctaaatgttgcttttctcagcctgtttatccatatttcaatccttggaactgtccagctcccatgactctatgcccaccaagctcttgaattttctcatttcttcacctacaaccctttgtcttgacttatctcctgcaactgactcatctgcaacattcacaccattgcttccttgtggtttcccttctttagaacttttactcatccttgagatgtatggtgtatttggcttgagttatgagagatgcttatttattcatttactctttttcatattttcagagaaagttacctaatccctcctaaagacacagcagtatgggtataacatccttgccttcccatttatccatgtttcactttatcactgatatgaagaggcccaaagcctgttagccaccatccatgctacctaggtagtccataggaaccacccccatgaccaccaccaacatcaactaaaggttcttggagggtatgtcagtgtgttgctcaggataccccaggtacatcaaggaatcaaggagaggaaaatatgagcaatatgtgtattcagagtgaagattttatgtccagagtatttgagctcaaaccttgcctgttgttttctaatcatgatgaatactttctcagtttctttttcctgaaatataaattgggatttaagactgtacctaactattaagatcactgtgtaaaactaagtgtctctaaatgtaatgcatcgatttagtgtctggaacataataaatatttgctctcatgattgctaaaaaaaaaaaaaaaaaa

SEQ ID NO: 860 - protein, 488 aa, Homo sapiens
MASKILLNVQEEVTCPICLELLTEPLSLDCGHSLCRACITVSNKEAVTSMGGKSSCPVCGISYSFEHLQANQHLANIVERLKEVKLSPDNGKKRDLCDHHGEKLLLFCKEDRKVICWLCERSQEHRGHHTVLTEEVFKECQEKLQAVLKRLKKEEEEAEKLEADIREEKTSWKYQVQTERQRIQTEFDQLRSILNNEEQRELQRLEEEEKKTLDKFAEAEDELVQQKQLVRELISDVECRSQWSTMELLQDMSGIMKWSEIWRLKKPKMVSKKLKTVFHAPDLSRMLQMFRELTAVRCYWVDVTLNSVNLNLNLVLSEDQRQVISVPIWPFQCYNYGVLGSQYFSSGKHYWEVDVSKKTAWILGVYCRTYSRHMKYVVRRCANRQNLYTKYRPLFGYWVIGLQNKCKYGVFEESLSSDPEVLTLSMAVPPCRVGVFLDYEAGIVSFFNVTSHGSLIYKFSKCCFSQPVYPYFNPWNCPAPMTLCPPSS

SEQ ID NO: 861 - DNA, 2302 bp, Homo sapiens
accctggcttttcttcacctcttcaaccaggagccgagatttctgttgctctgaagccatccaggggtctttaaccagaagagagaggagagcctcaggagttaggaccagaagaagccagggaagcagtgcaatggcttcaaaaatcttgcttaacgtacaagaggaggtgacctgtcccatctgcctggagctgttgacagaacccttgagtctagactgtggccacagcctctgccgagcctgcatcactgtgagcaacaaggaggcagtgaccagcatgggaggaaaaagcagctgtcctgtgtgtggtatcagttactcatttgaacatctacaggctaatcagcatctggccaacatagtggagagactcaaggaggtcaagttgagcccagacaatgggaagaagagagatctctgtgatcatcatggagagaaactcctactcttctgtaaggaggataggaaagtcatttgctggctttgtgagcggtctcaggagcaccgtggtcaccacacagtcctcacggaggaagtattcaaggaatgtcaggagaaactccaggcagtcctcaagaggctgaagaaggaagaggaggaagctgagaagctggaagctgacatcagagaagagaaaacttcctggaagtatcaggtacaaactgagagacaaaggatacaaacagaatttgatcagcttagaagcatcctaaataatgaggagcagagagagctgcaaagattggaagaagaagaaaagaagacgctggataagtttgcagaggctgaggatgagctagttcagcagaagcagttggtgagagagctcatctcagatgtggagtgtcggagtcagtggtcaacaatggagctgctgcaggacatgagtggaatcatgaaatggagtgagatctggaggctgaaaaagccaaaaatggtttccaagaaactgaagactgtattccatgctccagatctgagtaggatgctgcaaatgtttagagaactgacagctgtccggtgctactgggtggatgtcacactgaattcagtcaacctaaatttgaatcttgtcctttcagaagatcagagacaagtgatatctgtgccaatttggccttttcagtgttataattatggtgtcttgggatcccaatatttctcctctgggaaacattactgggaagtggacgtgtccaagaaaactgcctggatcctgggggtatactgtagaacatattcccgccatatgaagtatgttgttagaagatgtgcaaatcgtcaaaatctttacaccaaatacagacctctatttggctactgggttatagggttacagaataaatgtaagtatggtgtctttgaagagtctttgtcctctgatcccgaggttttgactctctccatggctgtgcctccctgccgtgttggggttttcctcgactatgaagcaggcattgtctcatttttcaatgtcacaagccatggctccctcatttacaagttctctaaatgttgcttttctcagcctgtttatccatatttcaatccttggaactgtccagctcccatgactctatgcccaccaagctcttgaattttctcatttcttcacctacaaccctttgtcttgacttatctcctgcaactgactcatctgcaacattcacaccattgcttccttgtggtttcccttctttagaacttttactcatccttgagatgtatggtgtatttggcttgagttatgagagatgcttatttattcatttactctttttcatattttcagagaaagttacctaatccctcctaaagacacagcagtatgggtataacatccttgccttcccatttatccatgtttcactttatcactgatatgaagaggcccaaagcctgttagccaccatccatgctacctaggtagtccataggaaccacccccatgaccaccaccaacatcaactaaaggttcttggagggtatgtcagtgtgttgctcaggataccccaggtacatcaaggaatcaaggagaggaaaatatgagcaatatgtgtattcagagtgaagattttatgtccagagtatttgagctcaaaccttgcctgttgttttctaatcatgatgaatactttctcagtttctttttcctgaaatataaattgggatttaagactgtacctaactattaagatcactgtgtaaaactaagtgtctctaaatgtaatgcatcgatttagtgtctggaacataataaatatttgctctcatgattgctaaaaaaaaaaaaaaaaaa

SEQ ID NO: 862 - protein, 488 aa, Homo sapiens; identical to SEQ ID NO: 860

SEQ ID NO: 863 - DNA, 2222 bp, Homo sapiens
accctggcttttcttcacctcttcaaccaggagccgagatttctgttgctctgaagccatccaggggtctttaaccagaagagagaggagagcctcaggagttaggaccagaagaagccagggaagcagtgcaatggcttcaaaaatcttgcttaacgtacaagaggaggtgacctgtcccatctgcctggagctgttgacagaacccttgagtctagactgtggccacagcctctgccgagcctgcatcactgtgagcaacaaggaggcagtgaccagcatgggaggaaaaagcagctgtcctgtgtgtggtatcagttactcatttgaacatctacaggctaatcagcatctggccaacatagtggagagactcaaggaggtcaagttgagcccagacaatgggaagaagagagatctctgtgatcatcatggagagaaactcctactcttctgtaaggaggataggaaatattcaaggaatgtcaggagaaactccaggcagtcctcaagaggctgaagaaggaagaggaggaagctgagaagctggaagctgacatcagagaagagaaaacttcctggaagtatcaggtacaaactgagagacaaaggatacaaacagaatttgatcagcttagaagcatcctaaataatgaggagcagagagagctgcaaagattggaagaagaagaaaagaagacgctggataagtttgcagaggctgaggatgagctagttcagcagaagcagttggtgagagagctcatctcagatgtggagtgtcggagtcagtggtcaacaatggagctgctgcaggacatgagtggaatcatgaaatggagtgagatctggaggctgaaaaagccaaaaatggtttccaagaaactgaagactgtattccatgctccagatctgagtaggatgctgcaaatgtttagagaactgacagctgtccggtgctactgggtggatgtcacactgaattcagtcaacctaaatttgaatcttgtcctttcagaagatcagagacaagtgatatctgtgccaatttggccttttcagtgttataattatggtgtcttgggatcccaatatttctcctctgggaaacattactgggaagtggacgtgtccaagaaaactgcctggatcctgggggtatactgtagaacatattcccgccatatgaagtatgttgttagaagatgtgcaaatcgtcaaaatctttacaccaaatacagacctctatttggctactgggttatagggttacagaataaatgtaagtatggtgtctttgaagagtctttgtcctctgatcccgaggttttgactctctccatggctgtgcctccctgccgtgttggggttttcctcgactatgaagcaggcattgtctcatttttcaatgtcacaagccatggctccctcatttacaagttctctaaatgttgcttttctcagcctgtttatccatatttcaatccttggaactgtccagctcccatgactctatgcccaccaagctcttgaattttctcatttcttcacctacaaccctttgtcttgacttatctcctgcaactgactcatctgcaacattcacaccattgcttccttgtggtttcccttctttagaacttttactcatccttgagatgtatggtgtatttggcttgagttatgagagatgcttatttattcatttactctttttcatattttcagagaaagttacctaatccctcctaaagacacagcagtatgggtataacatccttgccttcccatttatccatgtttcactttatcactgatatgaagaggcccaaagcctgttagccaccatccatgctacctaggtagtccataggaaccacccccatgaccaccaccaacatcaactaaaggttcttggagggtatgtcagtgtgttgctcaggataccccaggtacatcaaggaatcaaggagaggaaaatatgagcaatatgtgtattcagagtgaagattttatgtccagagtatttgagctcaaaccttgcctgttgttttctaatcatgatgaatactttctcagtttctttttcctgaaatataaattgggatttaagactgtacctaactattaagatcactgtgtaaaactaagtgtctctaaatgtaatgcatcgatttagtgtctggaacataataaatatttgctctcatgattgctaaaaa

SEQ ID NO: 864 - protein, 243 aa, Homo sapiens
MELLQDMSGIMKWSEIWRLKKPKMVSKKLKTVFHAPDLSRMLQMFRELTAVRCYWVDVTLNSVNLNLNLVLSEDQRQVISVPIWPFQCYNYGVLGSQYFSSGKHYWEVDVSKKTAWILGVYCRTYSRHMKYVVRRCANRQNLYTKYRPLFGYWVIGLQNKCKYGVFEESLSSDPEVLTLSMAVPPCRVGVFLDYEAGIVSFFNVTSHGSLIYKFSKCCFSQPVYPYFNPWNCPAPMTLCPPSS

SEQ ID NO: 865 - DNA, 959 bp, Homo sapiens
ccatccaggggtctttaaccagaagagagaggagagcctcaggagttaggaccagaagaagccagggaagcagtgcaatggcttcaaaaatcttgcttaacgtacaagaggaggtgacctgtcccatctgcctggagctgttgacagaacccttgagtctagactgtggccacagcctctgccgagcctgcatcactgtgagcaacaaggaggcagtgaccagcatgggaggaaaaagcagctgtcctgtgtgtggtatcagttactcatttgaacatctacaggctaatcagcatctggccaacatagtggagagactcaaggaggtcaagttgagcccagacaatgggaagaagagagatctctgtgatcatcatggagagaaactcctactcttctgtaaggaggataggaaagtcatttgctggctttgtgagcggtctcaggagcaccgtggtcaccacacagtcctcacggaggaagtattcaaggaatgtcaggagaaactccaggcagtcctcaagaggctgaagaaggaagaggaggaagctgagaagctggaagctgacatcagagaagagaaaacttcctggaagtatcaggtacaaactgagagacaaaggatacaaacagaatttgatcagcttagaagcatcctaaataatgaggagcagagagagctgcaaagattggaagaagaagaaaagaagacgctggataagtttgcagaggctgaggatgagctagttcagcagaagcagttggtgagagagctcatctcagatgtggagtgtcggagtcagtggtcaacaatggagctgctgcaggacatgagtggaatcatgaaatggtgcgtatgggtggccaggagtggtgcttgtgagttataaagaagtgtttgtagctattagagttatttggtggtcaattggaataaaaaatctcccagagtagtaaaa

SEQ ID NO: 866 - protein, 270 aa, Homo sapiens
MASKILLNVQEEVTCPICLELLTEPLSLDCGHSLCRACITVSNKEAVTSMGGKSSCPVCGISYSFEHLQANQHLANIVERLKEVKLSPDNGKKRDLCDHHGEKLLLFCKEDRKVICWLCERSQEHRGHHTVLTEEVFKECQEKLQAVLKRLKKEEEEAEKLEADIREEKTSWKYQVQTERQRIQTEFDQLRSILNNEEQRELQRLEEEEKKTLDKFAEAEDELVQQKQLVRELISDVECRSQWSTMELLQDMSGIMKWCVWVARSGACEL

SEQ ID NO: 867 - DNA, 1276 bp, Homo sapiens
cttgtcctttcagaagatcagagacaagtgatatctgtgccaatttggccttttcagtgttataattatggtgtcttgggatcccaatatttctcctaatgtttccctgatgtgatactttgagagcccaggatgccagtacaataattgaaattcacaaatgtctggtatcttgtccctcgtgccccatatattatctgtggtttcggagagctcacttgtctcttatcttcagaaatgacagcacatgaaatgttgtttggagccactgtcacatcaactgtagaaaaattaacaggtcagctaagggatataatgtaactttatttgtgatatgagagaaatcttgataaagacttgagagaaaactgggaggaaccttgtttagaagttataaggaggggtaagttatgtgtgtcttggaaggagaatcataaatcttaaaacatgagcctaatagagaacataaaattctaaaagataaagataataataatgataagccgcagggtggcttatgataatgtgacttctccttaccccagtagcgtcggacatctgtcagctctgaaatgataaaaatgcacaatattgaatacaaacaaaggagtcagcactgaaattcattttctctccagattagggaaagagtaggtatgccctatggtagggcagtaaattgctgaatgatgagatgaaacagccacctagccatttcccattaaatataatcccatcagcagcagacaatatctatcctcccctatcccctctatccatatttggaaactgcaccctcttccctatttagcaccctaacaccacttgaattccataaccctgttgttgatctagctctcctcacctctaaacacttctagcattcctttcagatcaggagctcgaaacactctcctttgattttttggaaaagtttctggcttcttcaaggtcacgttctccgtcctaagaattaaaaaaaaaaaaaaaacttccaaacctttgaccttgtgtccgtggaacacccctgacttcctatcatttcaacccattgaggcacttgaactctcttcttggggatcctgagaagggagagtgcaaactcttgaccctggaggcaaacaaaatgttctcatgtttgccttcccacttactttctgcgagaacgtgggaagatcttaacctctcagaagcacagtttcttccttctaaaatgaaataattaacctctccctgtctacattcttaaactcataggacataaaaaaaaaaaaaa

SEQ ID NO: 868 - DNA, 2364 bp, Homo sapiens
gtcatcgctgtctggaacagcgatgactcgatcgcgagatcaggaaggtggccgagtgtgtcgccgcggccatcaggcacttctccttcctgcccttgtatgaagaaggatgtgtttgcttccccttgtgccatgattgtaaatttcctgaggcctcctcagccctgcagaactggggttatagccatgtgactgatcttcgtccaagaatatgtaaagaaaaagtgttgagttggcttttagggctagagcaatgtatcttaggctcacttaaggaagctgtagagatgagcccaaggagggaaaccagaagagccccccaggctcaccagttgtttgttggctccctacaaacatgtcattcaagtggctaatcttacaacagcacaaattcatctaaccagaaagagaagaggaggctccaaaggcacttgactactgagcatcaccctggacgtgtacaagtctgcgtccttattgttttcttcattgggccgaactttctggtcctcatccaacagctcttctatcacgtgttcgaaagtgtcagccaatgatgtcaagcatcttgaacctgccttgggcccattcacgctctccagagtcccatgggtccgcacacctggagatactctattatagcaaagaagaaagataatttcattgagccatcctgttttacagtattgaattattaccacaaggtaccaaccatatatgcatacttaatagggtattttgtcaaaactatgcatgaaggtcatttgtttgagatgtcagaacattttcccgtgagaagatctcattgggcattgaaacagaaccacatgctcttcagaccagcaaccgcgactaccaaatactcctctgtcaactctacttgagtaagaacgctttcaattaaggcctaagtgtcaacatgcctttaaaaaaaatcgtggtgacacaaaatctttctttttagcacccaacagaatcccttcaaagcctcgtggtctgacaccctatgctacgtgacttgtgacccatccatttgtcatgttcttcgggaatgtggctaaggggctaagatgtgacttgaaaagaaaggtagaacaagatcatctcaaatttattatcaaggaatagttcagaaaacgacttcagaccacagagacagcagaacagatggtccggcatggatagagcatcagacactcacagactgtgccaacaagagccatcgagtcaaaacagccaaaggaaggagggtcatggaatgggttctctcacaccaaactgatgcccagaggccctcagcatgaataacaaaggcaaccagacccacaagccatactgagtggatacaaaacctatacctaggctgacatcccaaatgtgtgtggcaagttagatgatgatggcacaaaagacagaacaccttgcttctggccattgtcagctcttggaagagagcacacttttagaggagcagctgcaaggagcctgagaacaaaactggaaatgtctgttatgaaagccttcacaggaaattctgcaagtggcaacgtgggtccattccgtgtgtgtcactagagctggcgcaagcccatggccatggtgaggcagcgtttccactggaactaatctgatacctgcaccaactcttgcaactgtgcagtgttcccactgcaaactacggatggggtaaaagactgctcacctcctatttctcatctaatctcacacactctgtttgatgaggctatggagaaacaggtcttctcatacactaaaggtgggagtacaaacaattcaagccctgtgcaggacaattaggcaatacctatcaaaattatacatgatttttcctgctgacccagcaattccacttttgggaataattgacagatataggtgcatatgtacaaaatgatggaaagctctctggtatatattagtaagtgataaaacaaggtgtaaaatagtgtatatatggctactaccttttgttttaaaaatgggggaaaatggtggagcttgcggtgagccgagatcgtgccactgcactccagcctgggcgacagagcgagactccgtctcaaaaaaaaaacagggtggggtgggggggaaataatagtacatactcatatttacctgtatctatataaaacacactatcaaggattcacaagaaactaatacaaatgatccccttatagatggtatgtattgggggatactgaggtgagcagggtataagtggggcaagacttttcagtgtaaacttcttttaaattttattttgatttttgaataatgtaaattaactgtcaaataattaaattaaaaataaccaatttattaacaaaaaaaaaaaaaaaa

SEQ ID NO: 869 - DNA, 2068 bp, Homo sapiens
agtgttggccaatcccagcagccatacttcaactactcatagactgctgaatgttcaaactgtgttcaaataagatggtgtcacaagaaggatctgaagtggagcttctagtatccccaggagcgcgaagtgaacacggaaggtacctgcaggatccaattgtgtccattgatctctcagagtggctgaggataatagagtttcttcttcaaggtctcaaggtgtatggctctgtgtatcacatcaatcacgggaaccccttcaacatggaggtgctggtggattcctggcctgaatatcagatggttattatccggcctcaaaagcaggagatgactgatgacatggattcatacacaaacgtatatcgtatgttctccaaagagcctcaaaaatcagaagaagttttgaaaaattgtgagatcgtaaactggaaacagagactccaaatccaaggtcttcaagaaagtttaggtgaggggataagagtggctacattttcaaagtcagtgaaagtagagcattcgagagcactcctcttggttacggaagatattctgaagctcaatgcctccagtaaaagcaagcttggaagctgggctgagacaggccacccagatgatgaatttgaaagtgaaactcccaactttaagtatgcccagctggatgtctcttattctgggctggtaaatgacaactggaagcgagggaagaatgagaggagcctgcattacatcaagcgctgcatagaagacctgccagcagcctgtatgctcggcccagagggagtcccggtctcatgggtaaccatggacccttcttgtgaagtaggaatggcctacagcatggaaaaataccgaaggacaggcaacatggcacgagtgatggtgcgatacatgaaatatctgcgtcagaagaatattccattttacatctctgtgttggaagaaaatgaagactcccgcagatttgtggggcagtttggtttctttgaggcctcctgtgagtggcaccaatggacttgctacccacagaatctagttccattttagacaatgaagctgcttagtaatctctgccaagccatctcttaatattaaagcagacaccacagaatagatttcttcacttacaaatgcatattgggcacttataatacagcaggaactcttctcacctggagccttgatgttaaaagacacagccatgctcttgaggagcttacaatcctggctggaggcaggggagggtatattctttaaatatgcttaagtgttatagggaaagacggggttaccagtaaacatgtaactagaaagccaggctcagttcttacctctgggaatcagaactctttatgcaacttggttaatagaatctactatctggaagataaatgaaggattttaataaaattttcaatagaataaacctaatctgtatggatactttatcaaaaatgaatgtccctgctatttctggatttatgaggcaatggtacactaaagaatggaatcagttcagtgagtagaaaggtatccaaggtgaagcctgagacgaatggctttcccaggctaccttccatcactgttgtacagaaaagaaatccagagaatcaaatggactggccttgggggtctctgctatggaaatgccattttttgtgtctcctttctcctactctttctcacatcctcttcatgattgaagcatggcacaaggcaaggtgttgcctgcgagtctggttgtaagttcagcctttggtgtttgcactactgctatcataaggggtcagggacattccggggagaagtgaccactaaggtgaggattagagagtgagtagaagtgagccagacaaaaaaagcagaaaatgcagatgatggaaaggacatgtgccatgcactatcataagaacttcctaactgaacactgatactacaattctgaatccctgatcttaaaaaataattatacttcaccaacaaaacttggcctcttttggttccactctgccaccctgccattggaacttggattactgtgaacattgcagctatagcaaaat

SEQ ID NO: 870 - protein, 333 aa, Homo sapiens
MFKLCSNKMVSQEGSEVELLVSPGARSEHGRYLQDPIVSIDLSEWLRIIEFLLQGLKVYGSVYHINHGNPFNMEVLVDSWPEYQMVIIRPQKQEMTDDMDSYTNVYRMFSKEPQKSEEVLKNCEIVNWKQRLQIQGLQESLGEGIRVATFSKSVKVEHSRALLLVTEDILKLNASSKSKLGSWAETGHPDDEFESETPNFKYAQLDVSYSGLVNDNWKRGKNERSLHYIKRCIEDLPAACMLGPEGVPVSWVTMDPSCEVGMAYSMEKYRRTGNMARVMVRYMKYLRQKNIPFYISVLEENEDSRRFVGQFGFFEASCEWHQWTCYPQNLVPF

SEQ ID NO: 871 - DNA, 1568 bp, Homo sapiens
cttaatattcacttttaattcattccaccagagaggaaatgcatgggttttggataggactctgtcatttatccctgtaagaacttgagaaatttatttagtctctctaagctttggcgtattcaaaatgaagacgatactaacagtacctacatcatgagtgttacttgaatggagatgtgtaaagtgcattttaatttcatctggtcctttaacattttcccttcacttctcttcagagttttttcttgaagggctcgaggactgaagcatcccacaaaatgattctattgaataattctgagcagctgctggccctattcaaatctttagcaaggagcattcctgagtccctgaaggtgtatggctctctgtttcacatcaatcacgggaaccccttcaacatggaggtgttggtggactcctggcccgggtatcagatggttattatccgacctcaaaaacaggagatgactgatgacatggattcatacactaatgtatatcgtatattctccaaagaccctcaaaaatcacaagaagttttgaaaaattctgagatcataaactggaaacagaaactccaaatccaaggttttcaagaaagtttaggtgaggggataaaagcagctgcattttcaaattcagtgaaggtagagcattcgagagcactcctctttgttacggaagatatcctgaagctctatgccaccaataaaagcaagcttggaagctgggctgagacaggccacccagatgacgaattggagagcgagactcccaattttaagtatgcccagctgaatgtgtcttattctgggctggtaaatgacaactggaagctagggatgaataagaggagcctgcattacatcaagcgctgcctaggagccctgccagcagtctgtatgctgggcccagagggggtcccggtctcatgggtaaccatggacccttcttgtgaaataggaatgggctacagtgtggaaaaataccgaaggagaggcaacgcgacacggatgatggtgcgatacatgaagtatctgtgtcagaagaatattccattttacggctctgtgctggaagaaaatcaaggcgccatcagaatgaataaggcactaggtttccttgaggcctcctgtcagtggcaccaatggacctgctacccacagaatcttgttccgttgtagacaatgaagctgcttagcaatcttgggcaagccatctcttaatattaaagcagacaccacagaatagctttcttcacttacaaatgttgattgggcatttatgatatggcaggaactccttctcacatggagacctgatgttaaaggacacagccatgctcttgaggagcttacaatccaagctggaggcaggggagggtatagtctttaaatatgcttaagtgttgtagggaaggacagagttaccaataaacatgtaactagaaagccaggctcagttcttacctctgggaatcagaactctttatgaaacttgattgatagaatctactatctggaagataattgaagaactttaataaaattgtcaatagaata

SEQ ID NO: 872 - protein, 302 aa, Homo sapiens
MILLNNSEQLLALFKSLARSIPESLKVYGSLFHINHGNPFNMEVLVDSWPGYQMVIIRPQKQEMTDDMDSYTNVYRIFSKDPQKSQEVLKNSEIINWKQKLQIQGFQESLGEGIKAAAFSNSVKVEHSRALLFVTEDILKLYATNKSKLGSWAETGHPDDELESETPNFKYAQLNVSYSGLVNDNWKLGMNKRSLHYIKRCLGALPAVCMLGPEGVPVSWVTMDPSCEIGMGYSVEKYRRRGNATRMMVRYMKYLCQKNIPFYGSVLEENQGAIRMNKALGFLEASCQWHQWTCYPQNLVPL

SEQ ID NO: 873 - DNA, 1568 bp, Homo sapiens
cttaatattcacttttattcattccaccagagaggaaatgcatgggttttggatatgactctgtcgtttatccctgtaagaacttgagaaatttatttagtctctctaagctttggcgtattcaaaatgaagacgatactaacagtacctacatcatgagtgttacttgaatggagatgtgtaaagtgcattttaatttcatctggtcctttaacattttccctccacttctcttcagagtttttttcttgaagggcttgaggactgaagcatcccacaaaatgattctattgaataattccgagcggctgctggccctattcaaatctttagcaaggagcattcctgagtccctgaaggtgtatggctctctgtttcacatcaatcacgggaaccccttcaacatggaagtgttggtggactcctggcccgagtatcagatggttattatccgacctcaaaaacaggagatgactgatgacatggattcatacactaatgtatatcgtgtattctccaaagaccctcaaaaatcacaagaagttttgaaaaattctgagatcataaactggaaacagaaactccaaatccaaggttttcaagaaagtttaggtgaggggataagagcagctgcattttcaaattcagtgaaggtagagcattcgagagcactcctctttgttacggaagatatcctgaagctctatgccaccaataaaagcaagcttggaagctgggctgagacaggccacccagatgacgaattggagagcgagactccgaactttaagtatgcccagctgaatgtgtcttattctgggctggtaaatgacaactggaagctagggatgaataagaggagcctgcgttacatcaagcgctgcctaggagccctgccagcagcctgtatgctgggcccagagggggtcccggtctcatgggtaaccatggacccttcttgtgaaataggaatgggctacagtgtggaaaaataccgaaggagaggcaatgggacacggctgatcatgcgatgcatgaagtatctgtgtcagaagaatattccattttacggctctgtgctggaagaaaatcaaggcgtcatcagaaagactagtgcactaggtttccttgaggcctcctgtcagtggcaccaatggaactgctacccacagaatcttgttccattgtagacaatgaagctgcttagcaatcttgggcaagccatctcttaatattaaagcagacaccacagaatagctttcttcacttacaaatgttgattgggcatttgtgatatggcaggaactctttctcacatggagacttgatgttaaaggacacagccatgctcttgaggagcttacaatccaagctggaggcaggggagggtatagtctttaaatatgcttaagtgttgtagggaaggacagagttaccaataaacatgtaactagaaagccaggctcagttcttacctctgggaatcagaactctttatgaaacttggttgatagaatctactatctggaagataaatgaagaactttaataaaattgtcaatagaata

SEQ ID NO: 874 - protein, 302 aa, Homo sapiens
MILLNNSERLLALFKSLARSIPESLKVYGSLFHINHGNPFNMEVLVDSWPEYQMVIIRPQKQEMTDDMDSYTNVYRVFSKDPQKSQEVLKNSEIINWKQKLQIQGFQESLGEGIRAAAFSNSVKVEHSRALLFVTEDILKLYATNKSKLGSWAETGHPDDELESETPNFKYAQLNVSYSGLVNDNWKLGMNKRSLRYIKRCLGALPAACMLGPEGVPVSWVTMDPSCEIGMGYSVEKYRRRGNGTRLIMRCMKYLCQKNIPFYGSVLEENQGVIRKTSALGFLEASCQWHQWNCYPQNLVPL

SEQ ID NO: 875 - DNA, 3489 bp, Homo sapiens
aaatccagagcggcgggcactgacgggcacttgcaccgtgtggacagactctccggttctggggaaatccagtccctgttactccattttggccagaaattcaagacatttcaggtggcagaataaattcaatccttgtttctccatcttatcgagtagtagaagttagttacattctctttgaactcatcatgaattccatgaagactgaagaaaacaagtcatttagcgctatggaagatgaccagaggactagacctgaagtttcaaaggatactgtcatgaagcagacacatgctgacacacctgttgatcattgtctatctggcataagaaagtgtagcagcacctttaagcttaaaagtgaagtcaacaagcatgaaacagcccttgaaatgcagaatccaaatttgaacaataaagaatgttgtttcacctttacgttgaatggaaactccagaaaattagaccgtagtgtgtttacagcatatggtaaacccagcgagagtatctactcagccctgagtgctaatgactatttcagtgaaaggataaagaatcagtttaataagaacattattgtttatgaagaaaagacaatagatggacatataaatttaggaatgcctctcaagtgcctgcctagtgattctcattttaaaattacatttggtcaaagaaagagtagcaaagaagatggacacatattacgccaatgtgaaaatccaaacatggaatgcattctttttcatgttgttgctataggaaggacaagaaagaagattgttaagatcaacgaacttcatgaaaaaggaagtaaactttgtatttatgccttgaagggtgagactattgaaggagccttatgcaaggatggccgttttcggtctgacataggtgaatttgaatggaaactaaaggaaggtcataagaaaatttatggaaaacagtccatggtggatgaagtatctggaaaagtcttagaaatggacatttcaaaaaaaaaagcattacaacagaaagatatccataaaaaaattaaacagaatgaaagtgccactgatgaaattaatcaccagagtctgatacagtctaagaaaaaagtccacaaaccaaagaaagatggagagaccaaagatgtagaacacagcagagagcaaattctcccacctcaggatctaagccattatattaaagataaaactcgccagacaattcccaggattagaaattattacttttgtagtttgccccgaaaatataggcaaataaactcacaagttagacggaggccgcatctgggtaggcggtatgctattaatctggatgtccaaaaggaggcaattaatctcttaaagaattatcaaacgttgaatgaagccataatgcatcagtatccgaattttaaagaggaggcacagtgggtaagaaaatattttcgggaagaacaaaagagaatgaatctttcaccagctaagcaattcaacatatataaaaaggacttcggaaaaatgactgcaaattctgtttcagttgcaacctgcgaacagcttacatattatagcaagtcagttgggttcatgcaatgggacaataatggaaacacaggtaatgctacttgctttgtcttcaatggtggttatattttcacctgtcgacatgttgtacatcttatggtgggtaaaaacacacatccaagtttgtggccagatataattagcaaatgtgcgaaggtaaccttcacttatacagagttctgccctactcctgacaattggttttccattgagccatggcttaaagtgtccaatgaaaatctagattatgccattttaaaactaaaagaaaatggaaatgcgtttcctccaggactatggcgacagatttctcctcaaccatctactggtttgatttatttaattggtcatcctgaaggccagatcaagaaaatagatggttgtactgtgattcctctaaacgaacgattgaaaaaatatccaaacgattgtcaagatgggttggtagatctctatgataccaccagtaatgtatactgtatgtttacccaaagaagtttcctatcagaggtttggaacacacacacgcttagttatgatacttgtttctctgatgggtcctcaggctccccagtgtttaatgcatctggcaaattggttgctttgcatacctttgggcttttttatcaacgaggatttaatgtgcatgcccttattgaatttggttattctatggattctattctttgtgatattaaaaagacaaatgagagcttgtataaatcattaaatgatgagaaacttgagacctacgatgaagagaaaggtaaacaagagtcatcacttcaagatcatcagattgaacccatggaatgttagaaaagagatgctgtcttcaagaaaatatgccaataattcctggcaaagatttcatgacaaagacacttaaagcaattgcaacaaaagtgaaaattggcaaatgagacctaattaaatcttctgcacagcaaaagaaactatcaacagggtaaacacacaacctacggaatgggagaaaatatttgcaaactatgcatacagcaaagatctaatattcagaatccattaggaacttaaacagattaacaagcaaaaaaaaacaagcaaccccattaaaaagtgggcaaaggacatgaacaaacacttttcaaaagaagatatacacatggccaacaaggatatgaaaaaatacctgatatcactaatcattagagaaatgcaaatcaaaaaaatgccatcacactaatcagaatggctgttattaaaatgccaaaaaattacagatgctggcgaggttgcagagaaaggggaatgcttatacactgctagtgggaaaataaattagttcagccattgtggaaagcagttgggtgatttctaaaagaacttaaaacagctaccattcaagccagcaatctcatgactgggtatatgtccaaaggaatataaattgttctaccataaagacatgcacatatatgttcactgcagcactattcacaatagcaaaacatgaaatcaacctaaatgcccatcaatggtagactggataaagaaaatgtgacacatatacaccatagcatactacacagccataaaaaagtacaagatcatgtgctttgcagcaacatggatggaactgaaggtcattatcctaagcgaactaatgcaggaacagaaagccaagtaccacatgttctctcataagtggaagctaaatattgagtacacatggacacaaagaagaaaacaacagatatggggcctacttgagggtggagggtgggaggagggtgaagactgaaaaactgcctatggggtactatgcttattacctgggtgatgaaataatctgaacacaaaaccctggtgacatgcagtttacctatataacaaaactgcacatggactcttaaacctaaataaaagttta

SEQ ID NO: 876 - protein, 734 aa, Homo sapiens
MNSMKTEENKSFSAMEDDQRTRPEVSKDTVMKQTHADTPVDHCLSGIRKCSSTFKLKSEVNKHETALEMQNPNLNNKECCFTFTLNGNSRKLDRSVFTAYGKPSESIYSALSANDYFSERIKNQFNKNIIVYEEKTIDGHINLGMPLKCLPSDSHFKITFGQRKSSKEDGHILRQCENPNMECILFHVVAIGRTRKKIVKINELHEKGSKLCIYALKGETIEGALCKDGRFRSDIGEFEWKLKEGHKKIYGKQSMVDEVSGKVLEMDISKKKALQQKDIHKKIKQNESATDEINHQSLIQSKKKVHKPKKDGETKDVEHSREQILPPQDLSHYIKDKTRQTIPRIRNYYFCSLPRKYRQINSQVRRRPHLGRRYAINLDVQKEAINLLKNYQTLNEAIMHQYPNFKEEAQWVRKYFREEQKRMNLSPAKQFNIYKKDFGKMTANSVSVATCEQLTYYSKSVGFMQWDNNGNTGNATCFVFNGGYIFTCRHVVHLMVGKNTHPSLWPDIISKCAKVTFTYTEFCPTPDNWFSIEPWLKVSNENLDYAILKLKENGNAFPPGLWRQISPQPSTGLIYLIGHPEGQIKKIDGCTVIPLNERLKKYPNDCQDGLVDLYDTTSNVYCMFTQRSFLSEVWNTHTLSYDTCFSDGSSGSPVFNASGKLVALHTFGLFYQRGFNVHALIEFGYSMDSILCDIKKTNESLYKSLNDEKLETYDEEKGKQESSLQDHQIEPMEC

SEQ ID NO: 877 - DNA, 1368 bp, Homo sapiens
gtgactgcctcttccagggcgggcggtgtggtgcacgcattgctgtgctccaactccctcagggcctgtgttgccgcactctgctgctatgagcttcctcaaaagtttcccgccgcctgggccagcggaggggctcctgcggcagcagccagacactgaggctgtgctgaacgggaagggcctcggcactggtaccctttacatcgctgagagccgcctgtcttggttagatggctctggattaggattctcactggaataccccaccattagtttacatgcattatccagggaccgaagtgactgtctaggagagcatttgtatgttatggtgaatgccaaatttgaagaagaatcaaaagaacctgttgctgatgaagaagaggaagacagtgatgatgatgttgaacctattactgaatttagatttgtgcctagtgataaatcagcgttggaggcaatgttcactgcaatgtgcgaatgccaggccttgcatccagatcctgaggatgaggattcagatgactacgatggagaagaatatgatgtggaagcacatgaacaaggacagggggacatccctacattttacacctatgaagaaggattatcccatctaacagcagaaggccaagccacactggagagattagaaggaatgctttctcagtctgtgagcagccagtataatatggctggggtcaggacagaagattcaataagagattatgaagatgggatggaggtggataccacaccaacagttgctggacagtttgaggatgcagatgttgatcactgaaaatgatttatgcaagtttaagattctgctcctaagtgtaggagagaacttggtgcctcttccactctggagtgaagttaatgaaagtctttttccttttccaaaacccaacctgaaccagttctttcttgagacagactatactgagacaacaagttgtcaccagcagaagatagataatatgacctttattaacttgatgaattaacttaaccaagagggtatttgtagtttactatttaccctaaaactttctgtgtctgggtaccctctgagtaggcctataattcctaccttgactgtgtgcatcatttgtaagctagcagatctatgtggtgaaaatgcacaggagcttggtagactgcgggggaaagagagagctcctttcgccatgttttaccagtctgctgttataacctcttaggttgtatcctttaatttccagccttttaggttagtttctgtaacagaacaagtgagtctgggatgaagtcctcaaagtacttcaaatggtaattgttttgtttttgtaatagcttaacaaataaacctaggttttctataaa

SEQ ID NO: 878 - protein, 237 aa, Homo sapiens
MSFLKSFPPPGPAEGLLRQQPDTEAVLNGKGLGTGTLYIAESRLSWLDGSGLGFSLEYPTISLHALSRDRSDCLGEHLYVMVNAKFEEESKEPVADEEEEDSDDDVEPITEFRFVPSDKSALEAMFTAMCECQALHPDPEDEDSDDYDGEEYDVEAHEQGQGDIPTFYTYEEGLSHLTAEGQATLERLEGMLSQSVSSQYNMAGVRTEDSIRDYEDGMEVDTTPTVAGQFEDADVDH

SEQ ID NO: 879 - DNA, 5138 bp, Homo sapiens
gatccgcagaggagcccacttgagagcgcctcctgtcgtctgtaaggttgccttgccatccctcggcaccccaacttcccccgcccccccatcgcctcctcctccatcctccagttcaaaatggcgacggcggcggcagcggcggcggtgatggctcctccgggctgcccgggttcgtgccccaacttcgccgtagtctgctccttcttggagcgctacgggccgctgctagacctgcctgagttgccgttccctgagctggagcgggtgctgcaggcgccgccgccggacgtcggcaacggagaagtaccaaaagaattggtggagctccatttgaagctgatgaggaaaattggcaaatctgttactgcagacagatgggaaaaatatttgatcaagatatgccaagagtttaacagtacctgggcatgggagatggagaagaagggctatcttgaaatgagtgttgaatgcaaactagcactcttaaagtacctctgtgagtgtcagtttgatgacaatctcaaattcaagaatattattaatgaggaggatgccgatactatgcgtctccagccaattggtcgagacaaagatggcctcatgtactggtaccaattggatcaagatcacaatgtcagaatgtacatagaagaacaagatgatcaagatggctcttcatggaaatgcattgtcagaaatcgaaacgagttggctgagactcttgcactcctgaaagcacaaattgatcctgtactattgaaaaactctagccaacaagacaactcttctcgggaaagtcccagcttagaggatgaggagactaaaaaagaggaagaaacacctaaacaagaggaacagaaagaaagtgaaaagatgaaaagtgaggagcagcctatggatttagaaaaccgttctacagccaatgttctagaagagactactgtgaaaaaagaaaaagaagatgaaaaggaacttgtgaaactgccagtcatagtgaagctagaaaaacctttgccagaaaatgaagaaaaaaagattatcaaagaagaaagtgattccttcaaggaaaatgtcaaacccattaaagttgaggtgaaggaatgtagagcagatcctaaagataccaaaagtagcatggagaagccagtggcacaggagcctgaaaggatcgaatttggtggcaatattaaatcttctcacgaaattactgagaaatctactgaagaaactgagaaacttaaaaatgaccagcaggccaagataccactaaaaaaacgagaaattaaactgagtgatgattttgacagtccagtcaagggacctttgtgtaaatcagttactccaacaaaagagtttttgaaagatgaaataaaacaagaggaagagacttgtaaaaggatctctacaatcactgctttgggtcatgaagggaaacagctggtaaatggagaagttagtgatgaaagggtagctccaaattttaagacagaaccaatagagacaaagttttatgagacaaaggaagagagctatagcccctctaaggacagaaatatcatcacggagggaaatggaacagagtccttaaattctgtcataacaagtatgaaaacaggtgagcttgagaaagaaacagcccctttgaggaaagatgcagatagttcaatatcagtcttagagatccatagtcaaaaagcacaaatagaggaacccgatcctccagaaatggaaacttctcttgattcttctgagatggcaaaagatctctcttcaaaaactgctttatcttccaccgagtcgtgtaccatgaaaggtgaagagaagtctcccaaaactaagaaggataagcgcccaccaatcctagaatgtcttgaaaagttagagaagtccaaaaagacttttcttgataaggacgcacaaagattgagtccaataccagaagaagttccaaagagtactctagagtcagaaaagcctggctctcctgaggcagctgaaacttctccaccatctaatatcattgaccactgtgagaaactagcctcagaaaaagaagtggtagaatgccagagtacaagtactgttggtggccagtctgtgaaaaaagtagacctagaaaccctaaaagaggattctgagttcacaaaggtagaaatggataatctggacaatgcccagacctctggcatagaggagccttctgagacaaagggttctatgcaaaaaagcaaattcaaatataagttggttcctgaagaagaaaccactgcctcagaaaatacagagataacctctgaaaggcagaaagagggcatcaaattaacaatcaggatatcaagtcggaaaaagaagcccgattctccccccaaagttctagaaccagaaaacaagcaagagaagacagaaaaggaagaggagaaaacaaatgtgggtcgtactttaagaagatctccaagaatatctagacccactgcaaaagtggctgagatcagagatcagaaagctgataaaaaaagaggggaaggagaagatgaggtggaagaagagtcaacagctttgcaaaaaactgacaaaaaggaaattttgaaaaaatcagagaaagatacaaattctaaagtaagcaaggtaaaacccaaaggcaaagttcgatggactggttctcggacacgtggcagatggaaatattccagcaatgatgaaagtgaagggtctggcagtgaaaaatcatctgcagcttcagaagaggaggaagaaaaggaaagtgaagaagccatcctagcagatgatgatgaaccatgcaaaaaatgtggccttccaaaccatcctgagctaattcttctgtgtgactcttgcgatagtggataccatactgcctgccttcgccctcctctgatgatcatcccagatggagaatggttctgcccaccttgccaacataaactgctctgtgaaaaattagaggaacagttgcaggatttggatgttgccttaaagaagaaagagcgtgccgaacgaagaaaagaacgcttggtgtatgttggtatcagtattgaaaacatcattcctccacaagagccagacttttctgaagatcaagaagaaaagaaaaaagattcaaaaaaatccaaagcaaacttgcttgaaaggaggtcaacaagaacaaggaaatgtataagctacagatttgatgagtttgatgaagcaattgatgaagctattgaagatgacatcaaagaagccgatggaggaggagttggccgaggaaaagatatctccaccatcacaggtcatcgtgggaaagacatctctactattttggatgaagaaagaaaagaaaataaacgaccccagagggcagctgctgctcgaaggaagaaacgccggcgattaaatgatctggacagtgatagcaacctggatgaagaagagagcgaggatgaattcaagatcagtgatggatctcaagatgagtttgttgtgtctgatgaaaacccagatgaaagtgaagaagatccgccatctaatgatgacagtgacactgacttttgtagccgtagactgaggcgacacccctctcggccaatgaggcagagcaggcgtttgcgaagaaagaccccaaagaaaaaatattccgatgatgatgaagaggaggaatctgaggagaatagtagagactctgaaagtgacttcagtgatgattttagtgatgattttgtagaaactcggcgaaggcggtcaaggagaaatcagaaaagacaaattaactacaaagaagactcagaaagtgacggttcccagaagagtttgcgacgtggtaaagaaataaggcgagtacacaagcgaagactttccagctcagagagtgaagagagctatttgtccaagaactctgaagatgatgagctagctaaagaatcaaagcggtcagttcgaaagcggggccgaagcacagacgagtattcagaagcagatgaggaggaggaggaagaggaaggcaaaccatcccgcaaacggctacaccggattgagacggatgaggaggagagttgtgacaatgctcatggagatgcaaatcagcctgcccgtgacagccagcctagggtcctgccctcagaacaagagagcaccaagaagccctaccggatagaaagtgatgaggaagaggactttgaaaatgtaggcaaagtggggagcccattggactatagcttagtggacttaccttcaaccaatggacagagccctggcaaagccattgagaacttgattggcaagcctactgagaagtctcagacccccaaggacaacagcacagccagtgcaagcctagcctccaatgggacaagtggtgggcaggaggcaggagcaccagaagaggaggaagatgagcttttgagagtgactgaccttgttgattatgtctgtaacagtgaacagttataagactttttttccatttttgtgctaatttattccacggtagctctcacaccagcgggccagttattaaaagctgtttaatttttcctagaaaactccactacagaatgacttttagaagaaaaatttcaacaaatcctgaagtctttctgtgaagtgaccagttctgaactttgaagataaataattgctgtaaattccttttgattttctttttccaggttcatggtccttggtaatttcattcatggaaaaaaatcttattataataacaacaaagatttgtatatttttgactttatatttcctgagctctcctgactttgtgaaaaagggtggatgaaaatgcattccgaatctgtgagggcccaaaacagaatttaggggtgggtgaaagcacttgtgctttagctttttcatattaaatatatattatatttaaacattcatggcatagatgatgatttacagacaatttaaaagttcaagtctgtactgttacagtttgagaattgtagataacatcatacataagtcatttagtaacagcctttgtgaaatgaacttgtttactattggagataaccacacttaataaagaagagacagtgaaagtaccatcataattaacctaaatttttgttatagcagagtttcttgtttaaaaaaaaataaaatcatctgaaaagcaaaaa

SEQ ID NO: 880 - protein, 1441 aa, Homo sapiens
MATAAAAAAVMAPPGCPGSCPNFAVVCSFLERYGPLLDLPELPFPELERVLQAPPPDVGNGEVPKELVELHLKLMRKIGKSVTADRWEKYLIKICQEFNSTWAWEMEKKGYLEMSVECKLALLKYLCECQFDDNLKFKNIINEEDADTMRLQPIGRDKDGLMYWYQLDQDHNVRMYIEEQDDQDGSSWKCIVRNRNELAETLALLKAQIDPVLLKNSSQQDNSSRESPSLEDEETKKEEETPKQEEQKESEKMKSEEQPMDLENRSTANVLEETTVKKEKEDEKELVKLPVIVKLEKPLPENEEKKIIKEESDSFKENVKPIKVEVKECRADPKDTKSSMEKPVAQEPERIEFGGNIKSSHEITEKSTEETEKLKNDQQAKIPLKKREIKLSDDFDSPVKGPLCKSVTPTKEFLKDEIKQEEETCKRISTITALGHEGKQLVNGEVSDERVAPNFKTEPIETKFYETKEESYSPSKDRNIITEGNGTESLNSVITSMKTGELEKETAPLRKDADSSISVLEIHSQKAQIEEPDPPEMETSLDSSEMAKDLSSKTALSSTESCTMKGEEKSPKTKKDKRPPILECLEKLEKSKKTFLDKDAQRLSPIPEEVPKSTLESEKPGSPEAAETSPPSNIIDHCEKLASEKEVVECQSTSTVGGQSVKKVDLETLKEDSEFTKVEMDNLDNAQTSGIEEPSETKGSMQKSKFKYKLVPEEETTASENTEITSERQKEGIKLTIRISSRKKKPDSPPKVLEPENKQEKTEKEEEKTNVGRTLRRSPRISRPTAKVAEIRDQKADKKRGEGEDEVEEESTALQKTDKKEILKKSEKDTNSKVSKVKPKGKVRWTGSRTRGRWKYSSNDESEGSGSEKSSAASEEEEEKESEEAILADDDEPCKKCGLPNHPELILLCDSCDSGYHTACLRPPLMIIPDGEWFCPPCQHKLLCEKLEEQLQDLDVALKKKERAERRKERLVYVGISIENIIPPQEPDFSEDQEEKKKDSKKSKANLLERRSTRTRKCISYRFDEFDEAIDEAIEDDIKEADGGGVGRGKDISTITGHRGKDISTILDEERKENKRPQRAAAARRKKRRRLNDLDSDSNLDEEESEDEFKISDGSQDEFVVSDENPDESEEDPPSNDDSDTDFCSRRLRRHPSRPMRQSRRLRRKTPKKKYSDDDEEEESEENSRDSESDFSDDFSDDFVETRRRRSRRNQKRQINYKEDSESDGSQKSLRRGKEIRRVHKRRLSSSESEESYLSKNSEDDELAKESKRSVRKRGRSTDEYSEADEEEEEEEGKPSRKRLHRIETDEEESCDNAHGDANQPARDSQPRVLPSEQESTKKPYRIESDEEEDFENVGKVGSPLDYSLVDLPSTNGQSPGKAIENLIGKPTEKSQTPKDNSTASASLASNGTSGGQEAGAPEEEEDELLRVTDLVDYVCNSEQL

SEQ ID NO: 881 - DNA, 939 bp, Homo sapiens
atagagacgttctttgccgagagtcgtcggggtttcctgcttcaacagtgcttggacggaacccggtgctcgtcccccaccccagccggccgcccatagccagccctccctcacctcttcacggcaccctcagaccgccccaaggcccctgccgccgccccagcgccacgcagccactgccaccgccgccacctctccttagtcgccgccatgaggaccacgtccacctcacaggtgcgccagaactaccaccaggactcagaggccgccatcaaccgccagatcaacctagagctctgtgcctcctacgtttacctgtccatgtcttactgctttgaccgtgatgatgtggctttgaagaactttgccaaatactttcttcaccaatctcatgaggagagggagcatgctgagaaactgatgaagctgcagaaccaacgaggtggccgaatcttccttcaggatatcaaaaaaccagactgtgatgactgggagagcgggctgaatgtgatggagtgtgcattacatttggaaaaaaatgtgaatcagtcactactggaactgcacaaattggccactgacaaaaatgacccccatttgtgtgacttcattgagacacattacctgaatgagcaggtgaaagccatcaaagaattggatgaccatgtgaccaacttgcacaagatgggagcactcgaatctggcttggcagaatatctctttgacaagcacaccctgggagacagtgataatgaaagctaagcctcggctaatttccccgtagccgtggggtgacttccctggtcaccaaggcagtgcatgcatgttggggtttcctttaccttttctataagttgtaccaaaacatccacctaagttctttgatttgtgccattccttcagatgaagaaatttggtacccccccccaaaaaaagtaa

SEQ ID NO: 882 - DNA, 524 bp, Homo sapiens
atggctttgaaggttaccggaaaaacacgcgtggagctggaggtggcagttcaccgaaattgaatcactctaacgagccgcaacataaaatccctggaaaaggtgtgtgctgacttcatcagaggagcagaggcaaagaatctccaagtgaaaggaccagttcgaatacctaccaagactttgagaatcactacagaaaaagtccttgtggtgaaggttctaagacgtgggatcctttccagatgagaatccacaagcgactcattgacttgcacagtccttctgagattgttaagcagattgcttccatcagtttgagccgggagttgaggtgaaagtcaccattgcagatgcttaagtcaactattttaataaattgattaccagttgttaaaaaaaaattataaatggcagacttgatcccattcatcattagactactttcatgttttgctcagaattaagtaagttttaatattcatttaaaaatacttatcaaataaatttggtttctctcaaagtaa

SEQ ID NO: 883 - DNA, 557 bp, Homo sapiens
ccgaagcagcgctgggagcgtaagtgcgggcagagcactgcgccgtttgggaacgcaactttgaggagacagtgcggtggacttcagtgaagttccttatgacttcccctgaaattgcttccttatcatgggggcaaatgaaagtaaaaggctctaatacaacctataaggactgcaaagtatggccagggggtagtcggacttgggattggagagaaacaggaactgagcattctcctggtgtgcagcctgcagatgtgaaggaagttgttgagaagggtgtacagactcttgtgattggccgagggatgagtgaggccttgaaggtgccttcatcaactgtggagtacctcaagaaacatggcattgatgtgcgggtcctccagacagagcaggcagtgaaggagtataatgccttggttgcccaaggggtcagggtgggaggtgtcttccattccacctgctgatggagccttaagaggagaataaatcactaagtgcctaaaaaaaaaaaaaaaaaaaaaaaaaaaaaaaaaaaaaaaaaaaaaaaaaaaaaa

SEQ ID NO: 884 - protein, 122 aa, Homo sapiens
MTSPEIASLSWGQMKVKGSNTTYKDCKVWPGGSRTWDWRETGTEHSPGVQPADVKEVVEKGVQTLVIGRGMSEALKVPSSTVEYLKKHGIDVRVLQTEQAVKEYNALVAQGVRVGGVFHSTC

SEQ ID NO: 885 - DNA, 2929 bp, Homo sapiens
gtttgcagcctccgtgccagggccgggggtgcggttcgggacgcgggatcctaggtcgggtcctgccccgcccatgtggcgccggcgtctgtgttgtctgcggtctccagggcagcgccggggcgggcgggggcccgggcggcggcggcggcggcgcgggaggatgcggggcccgtccgggtcgcggccgcggaggagcgccgggcaggtaacgcttttgtgaaccacaactttaaatatcagccagctgctcctatcaacacgagtatcccctgttaattttttgcatttttcaagatgagtaaacgtaaactaattcccaagctctctattcaatctcctgtccttcataccaacttaaatgtccagtccacacacccacctttgaagaaagaagacttacatcggatttcaaaagactccttggaatctgattcagaaagcctcacgcaagagattatgtgccattctgagtttgatgatcgaatccggggcaacggtatggagcccgacagcttagacgaggaggaaagccctcgatggggaagcctgcacgagatggaagaggaagcaagtggaaaagcagctcagatggctcgcgagcaaaaccaccatacctgggaccagggcgccaataacaggcaacaaccaatagaagacaaatattcagacctccgctatgacccgaactggaagagtaagaaggaggaagggcagctgctgtctgtggaagcgttgccggagtccacggacagctctttagaaaatctgcctttggctcccctctacccttcccaggagacgtcaatggaactctccgggggaaaaggcgagcagaaagagagtccacagagtgcagcttctttacttggtagtgaatttttaagcccaaactatgagcatggtgcccgtcgcagcaagccgttttcagagctgagcgacagtgacctggaggagaagtcgagcagcctttctccgtacgtgaagagctcaagttcacataacgaggttttcctgccgggatcacgtggccctcggcgaaggaaatccaaacaacattttgtggaaaaaaacaagctcactttgggattacccaccccgaaaacggactcttatcttcaacttcacaataaaaaaagaggggaatctcatccagaacagatctcctaccccgtcagagtaacagacaagacgtctattcagaatgccaaggaaatggaaaatgctgccatcgatcctgaagataaatggcatcaaagagcacaacagctaaagaattaccaggaacactggtctcaatatgaaagtacaaaatcaagcaatgtaccaagagggcaaccttctgacatggtgaatgaccatcaaccttccagaagaccagccaagctcaagattcgaaagcagtgtaaacaccagaatggcctgaagtcttccacaacggaagaggtgactgccagtcaggggaaccagaataaccctcccaggcagcaacaaaaccaaaataagcctcttgatacttcaacaaagcctgaatcgattgtgattatgcatgcctctaacaatgatgtacaagcctcaagggcacttagaagccacaatctcaaagaaacctccaatacatttgctccaccaaaacaggcttttgacaaggtcttatctaaaaactctactggatgtgactctgggctgaatgttaataaagaaagaggacacaaagaccaagaagagaaaagattttcatatcagcagctacacaccctttctgacatggatttgaacaaccttaatgaactttctaagagacacgtgctcctgagccagaaaggctctcagtttgtttatcacataaatactcatggatcaaccaaaaataagaaacaactcaaacagccttatacagagacaaaatacaggaacttagaaatgttatggaaattccattcttcttctgacagccagacggttagagcttctccagattcatggctcacccagataatggagcagcatcagcaagccttggtgcagctgaccgacgtgcagcccagtgaaggggccttatccagcgtcacgcttccacctatactgtcaagggtagaaagtgaatcccaactcagttcagagagaagccaaagaaaccaagtgaaaattagccgtagcaattctgaaggctatctgtttcaactggaaaagggaaaaaagcataagaaaagaagcagcagtaagaacaccaagctgaaaggttatcagaaaagagacgtgaagcttggaggcctcggacctgactttgagtccatcagagacaaaacgcaaaaattaatacagcaaaaggaatatgcaaaacaagtcaaggagtacaacatgaagacactatccattctatcaaaaccacaaacagaaaaaactcaaaagaaatctgctatccctcggcagaaggctttggaatacgctaagaccatccccaaacccaaaccatcaaatctgactcatcaagcatcaaaggaacaaaaaaatccaacctatgctgggaaagaagaaagtttacctgaaatctcactgctggaaatactgcagaacagacacgaaagggaaaaacaggctgtggctgctttcaaagtccttcacatcgtatagacaacatttgataggaaggagaccaaaaatggtccaggaatgaacgtggagaaaagaaacgccaaccaccttctctgcgttgagagtaatggcctattattatcatctatctgccgtccatgtttgctttctgcaggatttaaaatatgaggcccaattggattatggtgccatattttactttctaggaagaaaattttttaaattatttattttcaaatcagttagaattggagctgaataataactagagaataaagcttttgttttatattgaaaaaaaaaaaaaaaaaaa

SEQ ID NO: 886 - protein, 778 aa, Homo sapiens
MSKRKLIPKLSIQSPVLHTNLNVQSTHPPLKKEDLHRISKDSLESDSESLTQEIMCHSEFDDRIRGNGMEPDSLDEEESPRWGSLHEMEEEASGKAAQMAREQNHHTWDQGANNRQQPIEDKYSDLRYDPNWKSKKEEGQLLSVEALPESTDSSLENLPLAPLYPSQETSMELSGGKGEQKESPQSAASLLGSEFLSPNYEHGARRSKPFSELSDSDLEEKSSSLSPYVKSSSSHNEVFLPGSRGPRRRKSKQHFVEKNKLTLGLPTPKTDSYLQLHNKKRGESHPEQISYPVRVTDKTSIQNAKEMENAAIDPEDKWHQRAQQLKNYQEHWSQYESTKSSNVPRGQPSDMVNDHQPSRRPAKLKIRKQCKHQNGLKSSTTEEVTASQGNQNNPPRQQQNQNKPLDTSTKPESIVIMHASNNDVQASRALRSHNLKETSNTFAPPKQAFDKVLSKNSTGCDSGLNVNKERGHKDQEEKRFSYQQLHTLSDMDLNNLNELSKRHVLLSQKGSQFVYHINTHGSTKNKKQLKQPYTETKYRNLEMLWKFHSSSDSQTVRASPDSWLTQIMEQHQQALVQLTDVQPSEGALSSVTLPPILSRVESESQLSSERSQRNQVKISRSNSEGYLFQLEKGKKHKKRSSSKNTKLKGYQKRDVKLGGLGPDFESIRDKTQKLIQQKEYAKQVKEYNMKTLSILSKPQTEKTQKKSAIPRQKALEYAKTIPKPKPSNLTHQASKEQKNPTYAGKEESLPEISLLEILQNRHEREKQAVAAFKVLHIV

SEQ ID NO: 887 - DNA, 1865 bp, Homo sapiens
gtttgcagcctccgtgccagggccgggggtgcggttcgggacgcgggatcctaggtcgggtcctgccccgcccatgtggcgccggcgtctgtgttgtctgcggtctccagggcagcgccggggcgggcgggggcccgggcggcggcggcggcggcgcgggaggatgcggggcccgtccgggtcgcggccgcggaggagcgccgggcaggtaacgcttttgtgaaccacaactttaaatatcagccagctgctcctatcaacacgagtatcccctgttaattttttgcatttttcaagatgagtaaacgtaaactaattcccaagctctctattcaatctcctgtccttcataccaacttaaatgtccagtccacacacccacctttgaagaaagaagacttacatcggatttcaaaagactccttggaatctgattcagaaagcctcacgcaagagattatgtgccattctgagtttgatgatcgaatccggggcaacggtatggagcccgacagcttagacgaggaggaaagccctcgatggggaagcctgcacgagatggaagaggaagcaagtggaaaagcagctcagatggctcgcgagcaaaaccaccatacctgggaccagggcgccaataacaggcaacaaccaatagaagacaaatattcagacctccgctatgacccgaactggaagagtaagaaggaggaagggcagctgctgtctgtggaagcgttgccggagtccacggacagctctttagaaaatctgcctttggctcccctctacccttcccaggagacgtcaatggaactctccgggggaaaaggcgagcagaaagagagtccacagagtgcagcttctttacttggtagtgaatttttaagcccaaactatgagcatggtgcccgtcgcagcaagccgttttcagagctgagcgacagtgacctggaggagaagtcgagcagcctttctccgtacgtgaagagctcaagttcacataacgaggttttcctgccgggatcacgtggccctcggcgaaggaaatccaaacaacattttgtggaaaaaaacaagctcactttgggattacccaccccgaaaacggactcttatcttcaacttcacaataaaaaaagaggggaatctcatccagaacaggtcattttgagagtaaattctctcccacgtgatggattcaaaaccttttggagccagtaaacttagttccatttcacaggtgcacataaagaccttcctgcccacctcctatggacatgtccagggatacaggacaagagtggggttagaatggtagagtccaccactcttactggaaagagcttgagatttatcacctgctaatgtgaggtcattttcaaatacaaaggagaggttattatgttaaatgtggttgcccttagacctattccaaatcccaactggtatttttttttaacatattctaacctgttctaacctctaagcattttctaatggaacaaaatagatgaggtggatgaacatttgtggcttttcttcagagactcccttttttgtcttaaagaattacgtctggtggcacgttggctcatgcctgtaatcccagcactttgggaggtcgaggtgggaggatcacttgaggccacgagttcaagaccagcctggccaacatggtgaaacccatctataccaaaaatacaaaaattagccgggtgtggtgatgcacacctgtaatcccagctactcgggaggctgaggcacaagaatcgcttgaacacgggaggcagaggttgcagtgagccgagatggcgccactacactccagcctgggttatagagtgagactctgtctcaaaataaat

SEQ ID NO: 888 - protein, 307 aa, Homo sapiens
MSKRKLIPKLSIQSPVLHTNLNVQSTHPPLKKEDLHRISKDSLESDSESLTQEIMCHSEFDDRIRGNGMEPDSLDEEESPRWGSLHEMEEEASGKAAQMAREQNHHTWDQGANNRQQPIEDKYSDLRYDPNWKSKKEEGQLLSVEALPESTDSSLENLPLAPLYPSQETSMELSGGKGEQKESPQSAASLLGSEFLSPNYEHGARRSKPFSELSDSDLEEKSSSLSPYVKSSSSHNEVFLPGSRGPRRRKSKQHFVEKNKLTLGLPTPKTDSYLQLHNKKRGESHPEQVILRVNSLPRDGFKTFWSQ

SEQ ID NO: 889 - DNA, 871 bp, Homo sapiens
agaataccagtgctcattaatattcagccacccttgcatttagatgtagccaatatatttatgttgtaagtagattcctttggttacaatgaaaataaaagaccacaggagaataagtgataaatcaacaagaccagttaggatgctattgcagtatttttggaaagaaaaactagtaagactagaacagtgagatatggaaacagaactactttttctgcaacaggttgctggcagaacacaggtgtcttgaaaactatctctaaagatgctgtgtcgcgccactgtagtggcttcttcctctgcctttctcttcctccgctgtcgcctcccaactctagtcagcctccggccggccgtctccttaacacagaacaccatgccttcaattaagttgcagagttctggtggagagatatttgaagttgatgtggaaattgtcaaacaatctgtgactatcaagaccatgttggaagatttgggaatgaatgatgaaggagatcatgacccagttcctctaccaaatgttaatgcagcaatattaaaaaaggtcattcagtggtgcacccaccatgaggatgactcacctcctcccaaagtttatgaaaacaaagaaaagcgaacagacgatatccctgtttgggaccaagaatttctgaaagttgaccaaggaacactttttgaactcattctggctgcaaactacttagacatcaaaggtttgcttgatgttacatgcaagactgttgccaatatggtcaacaggaaaactcctgaggagattcacaagaccttcaatttaaaaaatgactttactgaagagtgggaagcccaggtacaccaagagaaccagcagtgtgaagagaagtga

SEQ ID NO: 890 - protein, 163 aa, Homo sapiens
MPSIKLQSSGGEIFEVDVEIVKQSVTIKTMLEDLGMNDEGDHDPVPLPNVNAAILKKVIQWCTHHEDDSPPPKVYENKEKRTDDIPVWDQEFLKVDQGTLFELILAANYLDIKGLLDVTCKTVANMVNRKTPEEIHKTFNLKNDFTEEWEAQVHQENQQCEEK

SEQ ID NO: 891 - DNA, 1413 bp, Homo sapiens
atgggaaaggaaaagactaatatcaacattgtcatcactggacaagtaggttcaggcaagtccaccactactggccatctgatctacaaatgcattgacgtcgacaaaagaaccattcaaaaatttgagaaggaggctgcttagatgggaaagggctccttcaagtatgcttgggtcttggataaactgaaagctaaacatgaacctggtatcaccattggtatctccctgtagaaatttgagaccagtaagtactacgtgagtatcattgatgccccaggacacagagacttcatcaaaaacatgattacagggacatctcaggctgactgtgctgtcctgattgttgctgctggtgttggtgaatttgaagctggtatctccaagaatggacagacccatgagcatgcccttctggcttacacactaggtgtgaaacaactaattgttggtgttaacaaaatggattccactgagcaaccctacagccagaagacatatgaggaaatcgttaaagaagtcaacacttacattatgaaaattggctgcaaccttgacacagcagcatttgtgcttatttctggttgaaatggtgacaacatactgtagccaagtgctaacatgccttggtttaagggactgaaagtcacctgtaaggatggcaataccagtggaacctcactgcttgaggctctggactgcatcctaccaccaactcatccaactaacaagccctttcacctgcttctctaggatatctacaaaaattggtggtattggtactgtttctgttggctgagtagagactggtgttctcaaaccctgtatggtgctccagtcaatgttacaactgaagtaaagtctgttgaaatacaccatgaagctttgagtgaagctcttcctggggacaatgtgggcttcaatgtcaagaacgtgtctgtcaaggatgttcgtcatggcaacaatgctggtgacagcaaaaacgacccaccaatggaagcagctggcttcactgctcaggtgattatcctgaaccatccaggccaaataagtgctggctatgcccttgtactggattgtcacacggctcacactgcatgcaagtttgctgagctgaaggaaaagattgatcgctgttctggtaaaaagctggaagacggccctaaattcttgaagtctggtgatgctgccatcatttatatggttcctggcaagcccatgtgtgtagagagcttctcagactatccacctctgggtcactttgctgttggtcatatgagacagacagttgccatgggtatcatcaaagcagaggacaggaaggctgctggagttggcaaggtcactaagtctgcccagaaagctccaaagcctagtgaatattatcccttgtacctgccaccccagtcttaa

SEQ ID NO: 892 - DNA, 942 bp, Homo sapiens
gcacccagaattctaactaggatcttcaagaacaactctccccaggtcagtgcatggagcagaaagagaagggaaagggatagaatgtcttcatgactttaatcctagtatttgaaaaaaaaaaatcaaaccttgcacctacaaatttctgtcttgatccagaaagtcattagcataaaaaagataatagtggccttctcacctaacgccaccaacatggtgttcaggcgcttcgtggaggttggccgggtggcctatgtctcctttggacctcatgccggaaaattggtcgcgattgtagatgttattgatcagaacagggctttggtcgatggaccttgcactcaagtgaggagacaggccatgcctttcaagtgcatgcagctcactgatttcatcctcaagtttccgcacagtgcccgccaaaagtatgtccaacaagcctggcagaaggcagacatcaatacaaaatgggcagccacacgatgggccaagaagattgaagccagagaaaggaaagccaagatgacagattttgatcgttttaaagttatgaaggcaaagaaaacgaggaacagaataatcaagaatgaagttaagaagcttcaaaaggcagctctcctgaaagcttctcccaaaaaagcacctggtactaagggtactgctgctgctgctgctgctgctgctgctgctaaagttccagcaaaaaagatgacggccgcgagtaaaaaggcttcagcccagaaggttcctgcccagaaagccacaggccagaaagcagcacctgctccaaaagctcagaagggtcaaaaagctccagcccagaaagcacctgctccaaaggcatctggcaagaaagcataagtggcaatcataaaaagtaataaaggttctttttgacctgttggcaaatgtaaaaaaaaaaaaaaagataatagtgag

SEQ ID NO: 893 - DNA, 762 bp, Homo sapiens
cgggtcttcatggccttctcacctaacgccaccaacatggtgttcaggcgcttcgtggaggttggccgggtggcctatgtctcctttggacctcatgccggaaaattggtcgcgattgtagatgttattgatcagaacagggctttggtcgatggaccttgcactcaagtgaggagacaggccatgcctttcaagtgcatgcagctcactgatttcatcctcaagtttccgcacagtgcccgccaaaagtatgtccaacaagcctggcagaaggcagacatcaatacaaaatgggcagccacacgatgggccaagaagattgaagccagagaaaggaaagccaagatgacagattttgatcgttttaaagttatgaaggcaaagaaaacgaggaacagaataatcaagaatgaagttaagaagcttcaaaaggcagctctcctgaaagcttctcccaaaaaagcacctggtactaagggtactgctgctgctgctgctgctgctgctgctgctaaagttccagcaaaaaagatgacggccgcgagtaaaaaggcttcagcccagaaggttcctgcccagaaagccacaggccagaaagcagcacctgctccaaaagctcagaagggtcaaaaagctccagcccagaaagcacctgctccaaaggcatctggcaagaaagcataagtggcaatcataaaaagtaataaaggttctttttgacctgttggcaaatgtaaaaaaaaaaaaaaagataatagtgag

SEQ ID NO: 894 - DNA, 336 bp, Homo sapiens
atggagacagcgggctctggtactgggcagccggcctctctgctggaggctcccgggtccacggatgaccggcttttcctggttaaaggtggaattttccttggtactgttgctgcagcaggaacgctagctggatttattacaacattatcattggctaaaaagaaaagccctgaatggttcaataagggaagtatggtcacgactgcattaccggaaagcgggtcttcccttgccttgcgagctctgggctgcggctcactgtatgcatggtgtggggttggtgtgattagcttctcagtctggaaagctttaggggttcacagtgacatgtaa

SEQ ID NO: 895 - protein, 111 aa, Homo sapiens
METAGSGTGQPASLLEAPGSTDDRLFLVKGGIFLGTVAAAGTLAGFITTLSLAKKKSPEWFNKGSMVTTALPESGSSLALRALGCGSLYAWCGVGVISFSVWKALGVHSDM

SEQ ID NO: 896 - DNA, 1142 bp, Homo sapiens
atgagttggactgtacctgttgtgtgggccagccagagagtgagctcggcaggagcgaattttctgtgcctggggatggccctgtgtccccgtcaggcagcgtgcatgccactcatgggcacctggctcttcacctccgtgagcaagatggcgactgtgaagagtgagcttattgagtgcttcacttccgaggagccctttcatcacagaaaggtctccatcacaggaactggatcagtgggcatggcctgcgctaccagcatcttattaaaaggcttgagtgatgaacttgcctttgtggatcttgatgaaggcaaactgaaaggtgagacaatggatcttcaacatgacagccctttcatgaaaatgtcaaatattgtttgtagcaaagattaccttgtcacagcaaacccccatctagtgattatcacagcaggtgcacgccgagaaaagggagaaatgcgctttaatttagtccggcaaaatgtggccatcttcaagttaatgatttccagtattgtccagcagagccccctctgcaaactaattattgtttccaatccagtagatatcttaacttacgtagcctggaagttgagtgcatttcccaaaaaccgtgttattggaagcggctgtaatctggatactgttcgttttcaattcttcattggacaaaagcttggtatccactctgaaagctgccgtggatggatcctcggagagcatggagactcaagtgttcctgtgtggagtggaatgaacatagctggtgtccttttgaaggatctgaactctgatataggaactgataaagatcctgagaaatggaaaaatgtccacaaagaagtgattgctagtgcctatgagattattgaaatgaaaagttctacttcgtgggccattggcctatctggagctgatttaacagaaagtattttgaagaatcttaggagaaaacatccagtttccaccataattaagggcctctacggaataaatgaagaagtcttcctcagtattccttctttggagagaagggtattaccaaccttataaagagaaagctgacccctgaagaggaggcccatctgaaaaagagtgcaaaaacactttgggaaattcagaaggagcttgagacttaa

SEQ ID NO: 897 - DNA, 1061 bp, Homo sapiens
aggccgaggcgggggtggaggggtccatacggcgctgttctggattcccgttgtaacttaaagggaaactttcacaatgtccggagcccttgatgtcctgcaaatgagggaggaggatgtccttaagttccttgcagcaggaacccacttaggtggcaccaatcttgacttccagatggaacagtacatctatgaaaggaaaagtgatggcatctatatcataaatctgaagaggacctgggagaagcttctgctggcagctcatgctattgttgccattgaaaaccctgctgatgtcagtgttatatcctccaggaatactggccagacggctgtgctgaagtttgctgctgccactggagccactccaattgctgggcgcttcactcctggaaccttcactaaccagatccaggcagccttccgggagccacggcttcttgtggttactgaccccagggctgaccaccagcctctcacggaggcatcttatgttaacctacctaccattgcgctgtgtaacacagattctcctctgcgctatgtggacattgccatcccatgcaacaacaagggagcttactcagtgggtttgatgtggtggatgctggctcgggaagttctgtgcatgcttggcaccatttcctgtgaacacccatgggaggtcatgcctgatctgtacttctacagagatcctgaagagattgaaaaagaagagcaggctgctgctgaaaaggcagtgaccaaggaggaatttcagggtgaatggactgctccagctcctgagttcactgctattcagcctgaggttgcagactggtctgaaggtgtacaggtgccctctgtgcctattcagcaattccctactgaagactggagctctcagcctgccatggaagactggtctgcagctcccactgctcaggccactgaatgggtaggagcaaccactgactggtcttaagctgttcttgcataggctcttaagcagcatggaaaaatggttgatggaaaataagcatcagtttctaaaaaaaaaaaaagaataatttgacttcttc

SEQ ID NO: 898 - protein, 295 aa, Homo sapiens [sequence omitted]

SEQ ID NO: 899 - DNA, 2117 bp, Homo sapiens
gcgaggctgaacgcctgacgtcaaggcgacatcgccaaacctcgcccagattcaggcgtgtaaaccagccggagcggcgcggcagcggcaggaccgccgtggcgcctagagtagcgacccggggggagcgcggggcgacgctggctgcagggacccggtgacagcgtgagaggtactaggttttgacaagcttgcatcatgcgtgagtataagctagtcgttcttggctcaggaggcgttggaaagtctgctttgactgtacaatttgttcaaggaatttttgtagaaaaatacgatcctacgatagaagattcttatagaaagcaagttgaagtagatgcacaacagtgtatgcttgaaatcttggatactgcaggaacggagcaatttacagcaatgagggatttatacatgaaaaatggacaaggatttgcattagtttattccatcacagcacagtccacatttaacgatttacaagacctgagagaacagattcttcgagttaaagacactgatgatgttccaatgattcttgttggtaataagtgtgacttggaagatgaaagagttgtagggaaggaacaaggtcaaaatctagcaagacaatggaacaactgtgcattcttagaatcttctgcaaaatcaaaaataaatgttaatgagatcttttatgacctagtgcggcaaattaacagaaaaactccagtgcctgggaaggctcgcaaaaagtcatcatgtcagctgctttaatatactaaatgcattgtagctctgagccaggtctgaagaactgttgcccaattcaacagtgccagcattccaactttgttaaacctaccaacatcttaaatggactttcctgtggtggtaccctttaagaggcggatgaaagctactatatcagtttgcacattctaatcactttccagtatcacaagagagatttttacttatataatagtcctagagtttgcagctggtaaaaccagaggctacatccagtattactgctaagagacattcttcatccaccaatgttgtacatgtatgaaaatggtgtactgtatactttaacatgccccatactttgtattggagagtacaataatgtaaatcctaaaagcaccactattttagcataataaaagaaagtccaaagagctcctatatagactactccagataacttcgcttctttgatacttgtagcttattgtaattttttttaagaaattcaaggtcattattattgtacaaaataagcgctttgattaacacagctatatagtttttttaatttttaaaaaacctgtggagacggtgatcttgtctttaaaacatgatagtcctttcagtataatgtcttagattaaagacgttgcctttaatatctgttgggaaggaaatgtccagacttttcaaatctcttattatatgtttcctttttttgtttacatagggaacaatgtttatagtcgtgtgtacagtgggggtctacaacaagaagtgtatattttcaaacaattttttaatgatttaacaatttttgtaaatcattttcaggcttctgcagctgtagattctcactgtgaatcccttgcttgctcatgcataagtgtatttgcaataccaaatatacaggtttagtatttttgcctgttagtgattgtttcacatgtgtaacgttttggttgagatgttaaatggtggacgagtactgtggatgtgaatgtgggaagtaattttaatcatatgtaattggtcacaaggcctaatttgcagtaactattgctgttttatttaacaatgccttgttgctttgtatgcattaatgtttggatgtaaagattgtgtgtctatccaacagggagccacagtatttaaattgaccaacctaatgttacaactactttgaggtggccaaatgtaaactaaaagccttaattaaagtggtgcaattttgtataacttagcatcagtagttcaataaatttggattgccatgcaagggcttgcattataattacttgccacttgaatgtgttttgtgtaatgttttaacagtgctagtaaataaatacgggtttaccctggtaaaaaaaaaaaaaaaaaaa

SEQ ID NO: 900 - protein, 184 aa, Homo sapiens
MREYKLVVLGSGGVGKSALTVQFVQGIFVEKYDPTIEDSYRKQVEVDAQQCMLEILDTAGTEQFTAMRDLYMKNGQGFALVYSITAQSTFNDLQDLREQILRVKDTDDVPMILVGNKCDLEDERVVGKEQGQNLARQWNNCAFLESSAKSKINVNEIFYDLVRQINRKTPVPGKARKKSSCQLL

SEQ ID NO: 901 - DNA, 2126 bp, Homo sapiens
gcgaggctgaacgcctgacgtcaaggcgacatcgccaaacctcgcccagattcaggcgtgtaaaccagccggagcggcgcggcagcggcaggaccgccgtggcgcctagagtagcgacccggggggagcgcggggcgacgctggctgcagggacccggtgacagcgtgagaggttcgcagagtactaggttttgacaagcttgcatcatgcgtgagtataagctagtcgttcttggctcaggaggcgttggaaagtctgctttgactgtacaatttgttcaaggaatttttgtagaaaaatacgatcctacgatagaagattcttatagaaagcaagttgaagtagatgcacaacagtgtatgcttgaaatcttggatactgcaggaacggagcaatttacagcaatgagggatttatacatgaaaaatggacaaggatttgcattagtttattccatcacagcacagtccacatttaacgatttacaagacctgagagaacagattcttcgagttaaagacactgatgatgttccaatgattcttgttggtaataagtgtgacttggaagatgaaagagttgtagggaaggaacaaggtcaaaatctagcaagacaatggaacaactgtgcattcttagaatcttctgcaaaatcaaaaataaatgttaatgagatcttttatgacctagtgcggcaaattaacagaaaaactccagtgcctgggaaggctcgcaaaaagtcatcatgtcagctgctttaatatactaaatgcattgtagctctgagccaggtctgaagaactgttgcccaattcaacagtgccagcattccaactttgttaaacctaccaacatcttaaatggactttcctgtggtggtaccctttaagaggcggatgaaagctactatatcagtttgcacattctaatcactttccagtatcacaagagagatttttacttatataatagtcctagagtttgcagctggtaaaaccagaggctacatccagtattactgctaagagacattcttcatccaccaatgttgtacatgtatgaaaatggtgtactgtatactttaacatgccccatactttgtattggagagtacaataatgtaaatcctaaaagcaccactattttagcataataaaagaaagtccaaagagctcctatatagactactccagataacttcgcttctttgatacttgtagcttattgtaattttttttaagaaattcaaggtcattattattgtacaaaataagcgctttgattaacacagctatatagtttttttaatttttaaaaaacctgtggagacggtgatcttgtctttaaaacatgatagtcctttcagtataatgtcttagattaaagacgttgcctttaatatctgttgggaaggaaatgtccagacttttcaaatctcttattatatgtttcctttttttgtttacatagggaacaatgtttatagtcgtgtgtacagtgggggtctacaacaagaagtgtatattttcaaacaattttttaatgatttaacaatttttgtaaatcattttcaggcttctgcagctgtagattctcactgtgaatcccttgcttgctcatgcataagtgtatttgcaataccaaatatacaggtttagtatttttgcctgttagtgattgtttcacatgtgtaacgttttggttgagatgttaaatggtggacgagtactgtggatgtgaatgtgggaagtaattttaatcatatgtaattggtcacaaggcctaatttgcagtaactattgctgttttatttaacaatgccttgttgctttgtatgcattaatgtttggatgtaaagattgtgtgtctatccaacagggagccacagtatttaaattgaccaacctaatgttacaactactttgaggtggccaaatgtaaactaaaagccttaattaaagtggtgcaattttgtataacttagcatcagtagttcaataaatttggattgccatgcaagggcttgcattataattacttgccacttgaatgtgttttgtgtaatgttttaacagtgctagtaaataaatacgggtttaccctggtaaaaaaaaaaaaaaaaaaa

SEQ ID NO: 902 - protein, 184 aa, Homo sapiens; identical to SEQ ID NO: 900

SEQ ID NO: 903 - DNA, 1107 bp, Homo sapiens
ccaggctggtctcaaactcctggcctcaaaagtgatcctcctgccttggcctcccaaagtgttgggatttcaggaatgagtcaccactgtctggcccattttcattttctataaagcaaggctatctaccaaaacttaggtctgttttttcagtatactggggagtctctctaaagataaattaacataccctgtacatctatctatatgataaaagacgcttttagttaggtattatgtttctgttagatgtagtttggctggtatgggtcacattccagcatgacgtgaagtaaggagctacacatggggtatttcgaaaagtgggtaaaacaaaagtcacgctgggaataacgagaggtgaagtttcaaggtcaggtcaaatttaaatgtgaaggcccagaagcccgggagacctaatcaattttaaagtagtggttggctaccaaaccatttatactcctaacactattattagtaaaatctctcattctagtagggattgggtatatttgtgtgttttaaaaaacaccctgctgcagcctattaagccaactgagttcctttcctcatgggggggcccagtgtgcaatggctgcaaacagcagcttccttggtagtgtatgcagcctgtgtgttgtattgtatgggttgctctaagggaccctggagacagtcctttcagatggatgttcatgtttctgaccttgcactaccccagtgtaggttccaaacaggcatgcgaggtgcctttgggaagccccagggcactgtggccagggttcacactggccaagttatcatctccattcacaccaagctgcagaacaaggagcatgtgattgaggccctgcgcagggccaagttcaagttttctggccgccagaagatccacatctcaaagaagtggggcttcaccaagttcaatgccaatgagtttgaagacatggtgactgagaagcggctcatcccagatggctgtcgggtcaagtacatttccaatcgtggccctgtggacaagtggcgggccctgcactcatgagggcttccactgtgctgccccctcttaatactcaccaataaattctacttcctgtccacccaaaa

SEQ ID NO: 904 - protein, 118 aa, Homo sapiens
MDVHVSDLALPQCRFQTGMRGAFGKPQGTVARVHTGQVIISIHTKLQNKEHVIEALRRAKFKFSGRQKIHISKKWGFTKFNANEFEDMVTEKRLIPDGCRVKYISNRGPVDKWRALHS

SEQ ID NO: 905 - DNA, 3158 bp, Homo sapiens
gttttagggacagactgcttccgggtcgaagggcttgcttccggagagcgggaaggctaaaacgcggtagctaaactgcagccaactttggttgtgtgtggaaaaggctttagccatggacaggagtggctttggagagatatcatcccctgtaatccgggaggcagaggtgacacggactgcacggaaacagagtgctcagaaaagagttttacttcaggcatctcaagatgaaaattttggtaatactacaccaagaaaccaggttatccctcgaactcctagctcatttcgacagccttttaccccaacaagccgaagcttactaaggcagccagatatttcctgcattcttggaacaggagggaagtcgccccgacttacgcagtcttcagggttctttggaaatctctccatggttactaatctggatgacagtaactgggcagctgcattttcatcacagcgttccgggctgttcacaaacacagagccccacagtataacagaagatgtaactatcagtgctgttatgttacgtgaggatgatcctggagaagctgcatccatgagtatgttttctgatttcctgcagtcttttctgaagcactcttcgagtacagtttttgatcttgtggaagagtatgaaaacatctgtggtagtcaggtgaatatactgagtaaaatagtgagtcgagcaacacctggacttcaaaaattttcaaaaacagccagtatgctctggcttcttcaacaggagatggtcacatggaggctgctggcttctttgtatagagacagaatacagtctgcattagaagaggaaagtgtattcgcagttactgctgttaatgccagtgaaaaaacagttgtggaagcgttatttcagagggattcacttgttcgacaaagtcagctggtggtagattggttagagagtattgccaaagatgaaattggagaattttctgataatattgagttttatgcaaaatcagtatattgggaaaatactctgcataccttaaaacaacggcagctgacttcttacgttggaagtgttcgtccgcttgtcactgaattggaccctgatgctcccataagacagaaaatgccccttgatgatctggatagagaagatgaagttagattactcaaatatctctttactctaatccgtgctggaatgacagaagaggcacaacgactctgtaaacgctgtggtcaagcatggagagctgcaacacttgaaggctggaaactgtaccatgaccctaatgttaatggaggaacagaattagaacctgttgaagggaatccatatagacgcatttggaaaataagttgctggagaatggcagaagatgagctttttaatagatacgagagagcaatttatgcagctttaagtgggaatcttaagcagctgcttcctgtctgtgacacctgggaagacacagtttgggcctacttccgggtgatggtggacagtctggtagaacaggagatccagacatcagtagcaactctggatgaaactgaagaactccctagagaatatctgggagcaaactggacgttagaaaaggtttttgaggaacttcaagctactgacaaaaagagagttctggaagagaatcaagaacattatcatatagttcaaaagtttcttatcctgggagacattgatggtttgatggatgagtttagcaaatggctttccaaaagcagaaacaatctacctggacacctgcttcgctttatgactcaccttattttgtttttccgtactctgggactacagaccaaggaggaagtttctattgaagttttaaagacatacatacagcttttaataagagagaaacatacaaatcttatagcattttatacctgtcatttgcctcaagacctagctgttgcccagtatgcattatttttggaaagtgttacagaatttgaacagcgccaccattgcctggagttggctaaagaagcagatttggatgttgcaacaataacaaaaactgtagttgagaatattcgaaagaaagataatggtgaatttagtcatcatgacctggccccagccctagatactggcactactgaggaggatcgtttaaaaattgatgtaattgactggttggtatttgacccagcgcagagggcagaagcactgaaacaaggcaatgcaattatgagaaaattcttggcatcaaaaaagcacgaagctgcaaaagaagtatttgtgaaaattcctcaggattctatagcagaaatctataatcagtgcgaggaacaaggaatggaaagtccacttcctgctgaagatgataatgctatccgagaacatttgtgcatcagagcttatttggaagcccatgaaacctttaatgagtggtttaagcatatgaattcagttccacaaaaacctgctttgatacctcaaccaacttttactgagaaagtggctcatgaacacaaagaaaagaaatatgaaatggattttggtatttggaaagggcatttggatgccctaactgctgatgtgaaggagaaaatgtataacgtcttgttgtttgttgatggagggtggatggtggatgttagagaggatgccaaagaagaccatgaaagaacacatcaaatggtcttactgagaaagctttgtctgccaatgttgtgttttctgcttcatacgatattgcacagtactggtcagtatcaggaatgcctacagttagcagatatggtatcctctgagcgccacaaactgtacctggtattttctaaggaagagctaaggaagttgctgcagaagctcagagagtcctctctaatgctcctagaccagggacttgacccattagggtatgaaattcagttatagtttaatctttgtaatctcactaattttcatgataaatgaagtttttaataaaatatacttgttattagtaattttttcttttgcattaccatgtaaaatttagacatttgaattttgtacttttcagaatattatcgtgacactttcaacatgtagggatatcagcgtttctctgtgtgcttgttaataaaactatataaaaattaaaattttctgtttttacaaattccaaaaaaaaaaaaaaaaaaaaaaaaaaaaaaaaaaa

SEQ ID NO: 906 - protein, 925 aa, Homo sapiens
MDRSGFGEISSPVIREAEVTRTARKQSAQKRVLLQASQDENFGNTTPRNQVIPRTPSSFRQPFTPTSRSLLRQPDISCILGTGGKSPRLTQSSGFFGNLSMVTNLDDSNWAAAFSSQRSGLFTNTEPHSITEDVTISAVMLREDDPGEAASMSMFSDFLQSFLKHSSSTVFDLVEEYENICGSQVNILSKIVSRATPGLQKFSKTASMLWLLQQEMVTWRLLASLYRDRIQSALEEESVFAVTAVNASEKTVVEALFQRDSLVRQSQLVVDWLESIAKDEIGEFSDNIEFYAKSVYWENTLHTLKQRQLTSYVGSVRPLVTELDPDAPIRQKMPLDDLDREDEVRLLKYLFTLIRAGMTEEAQRLCKRCGQAWRAATLEGWKLYHDPNVNGGTELEPVEGNPYRRIWKISCWRMAEDELFNRYERAIYAALSGNLKQLLPVCDTWEDTVWAYFRVMVDSLVEQEIQTSVATLDETEELPREYLGANWTLEKVFEELQATDKKRVLEENQEHYHIVQKFLILGDIDGLMDEFSKWLSKSRNNLPGHLLRFMTHLILFFRTLGLQTKEEVSIEVLKTYIQLLIREKHTNLIAFYTCHLPQDLAVAQYALFLESVTEFEQRHHCLELAKEADLDVATITKTVVENIRKKDNGEFSHHDLAPALDTGTTEEDRLKIDVIDWLVFDPAQRAEALKQGNAIMRKFLASKKHEAAKEVFVKIPQDSIAEIYNQCEEQGMESPLPAEDDNAIREHLCIRAYLEAHETFNEWFKHMNSVPQKPALIPQPTFTEKVAHEHKEKKYEMDFGIWKGHLDALTADVKEKMYNVLLFVDGGWMVDVREDAKEDHERTHQMVLLRKLCLPMLCFLLHTILHSTGQYQECLQLADMVSSERHKLYLVFSKEELRKLLQKLRESSLMLLDQGLDPLGYEIQL

SEQ ID NO: 907 - DNA, 3033 bp, Homo sapiens
gcccccgccccctactcccttccctcaggccccaggaagttgcaagagtaccatttgtcgcacactcggggaccgcgggtggccggaggagatgaaaccgtcttggctgcagtgtcgtaaagtcaccagcgccggggggctcggagggcccttgcctgggtcctctccggcccggggagccggtgcggccctcagggctttagtggtcccgggcccgcggggcggtctcgggggccggggatgcagggcactgtcctccggcagtggcagcgagtacaagacccacttcgcagcctcggtgaccgaccccgagaggttctggggcaaagctgccgagcagatcagctggtacaagccctggaccaaaacgctggagaacaaacactcgccctctaccaggtggtttgtggaaggaatgcttaacatttgttacaatgccgttgatcgtcatattgaaaatggtaaaggggataagattgctatcatctatgacagtcctgttacaaacactaaagcaacctttacctataaagaagttctggagcaggtctccaagctggctggtgtcttggtcaagcatggcatcaagaaaggtgacactgtggttatctacatgcctatgatcccacaggcgatgtataccatgttggcatgtgcaaggataggtgccatccacagtctcatatttggaggatttgcttccaaagaactaagtagtcgcattgatcatgtaaagcccaaggtggttgttacagcatcatttggcattgaacctggaaggagggtagagtacgtaccacttgtagaagaagcgctaaaaataggacaacacaaaccagacaaaattctcatttataatcgtccaaatatggaggcggttcctttggctcccggtcgtgaccttgattgggatgaagagatggcaaaagcccagtcacatgactgtgttcctgttctttcagaacacccactgtatattctttacacatctggcacaacggggttacctaagggtgtgattaggcccactgggggatacgctgtcatgctacactggtcaatgtcttccatatacggacttcaacccggagaggtgtggtgggcagcttctgacttaggctgggttgttggacattcctatatctgctatggacctcttcttcatgggaacacaacagttttatatgaggggaagcctgtgggaacaccagatgctggcgcttatttccgtgtgcttgcagagcatggagtagctgccttgtttacagcaccaactgcaattagagcaatccgtcaacaggaccctggggcagctttggggaagcagtactctctgacaaggttcaaaacattatttgtggctggagaacgatgtgatgtagagaccctggaatggtccaaaaatgtcttcagagtacctgtcttagaccattggtggcaaactgagactggatctccaattactgcgtcatgtgttggattaggcaattctaaaacacctccaccagggcaagcaggaaaaagcgtcccaggatacaatgttatgattttggatgacaacatgcaaaaactgaaggctcggtgtttaggaaatattgtggtaaagttaccattgccacctggggctttttcaggactctggaagaatcaggaagcattcaagcatttatactttgaaaaatttcctggatattatgataccatggatgctggttacatggatgaagaaggctatttgtatgttatgtctcgagtggatgatgtaataaatgttgcaggtcacagaatttctgcaggcgccattgaagagtcaatcctttcccatggtaccgtggcagactgtgctgttgttggcaaggaagatcccttaaaaggtcatgtccccttagcactctgtgtattgagaaaagatataaatgcaacagaggagcaagttttggaagaaattgtgaaacacgttagacagaacattggccctgtggctgcttttcgaaatgcagtgtttgtcaaacagctacccaaaaccagatctggcaagatcccccgatcagctttatctgccattgtcaatggcaagccatacaagataacttctacaattgaagaccccagcatttttggccacgtagaagaaatgctgaagcaagcataatgagtttgtcttattcctattttgagttgatttaatttcttaattgaaattaaattatttgagttgtttctcagaaataaatatttcagtagaaattacttgcaaaatgaaatgtgaattgtaaaacttggcctaaacaaatctaatgaaaacatgtgaaagacctgtgccttttttttggtttgaccctgttagcattgttattagttatctataacatggcttattgaatgtcatctactgctttaggaaaaacgtatctagtgtattatttttaaaattgtacctcccaagaagaacactttaattgaaagcaacactaatatagagccacttcctgaaaccaagaatctgtagttttgatccaaaatctaaaacttaaagtcagaaaataattaaaatttttcttgtagaaattttagatattttctagtattctttagatgctcacattgttttaaataaaatagatgaaatgggaagtttaggtaatcatctagacagatgaaattattatctaggtaggagggcttttctatacattttctgagggaaagcagaacaccggggttatagctataccttcaggtcttttgttacttaggcaaggaaaaccacatgtctgacctggttcagcatgtaatccgagcactttgggaggctgaggcaggcggatcacttgaggtcagcagtttgagacgagcctggccaacatggtgaaaccctgtagctactgaaaatacaaaaataagccaggcgtggtggcgggaggctgaggcaaggagaatcacttgaatacaagaggcagaggttgcagtgagccaagttcccccactgtactccagcctgggtgacagagtaagactccatctcaaaacaac

SEQ ID NO: 908 - protein, 686 aa, Homo sapiens
MKPSWLQCRKVTSAGGLGGPLPGSSPARGAGAALRALVVPGPRGGLGGRGCRALSSGSGSEYKTHFAASVTDPERFWGKAAEQISWYKPWTKTLENKHSPSTRWFVEGMLNICYNAVDRHIENGKGDKIAIIYDSPVTNTKATFTYKEVLEQVSKLAGVLVKHGIKKGDTVVIYMPMIPQAMYTMLACARIGAIHSLIFGGFASKELSSRIDHVKPKVVVTASFGIEPGRRVEYVPLVEEALKIGQHKPDKILIYNRPNMEAVPLAPGRDLDWDEEMAKAQSHDCVPVLSEHPLYILYTSGTTGLPKGVIRPTGGYAVMLHWSMSSIYGLQPGEVWWAASDLGWVVGHSYICYGPLLHGNTTVLYEGKPVGTPDAGAYFRVLAEHGVAALFTAPTAIRAIRQQDPGAALGKQYSLTRFKTLFVAGERCDVETLEWSKNVFRVPVLDHWWQTETGSPITASCVGLGNSKTPPPGQAGKSVPGYNVMILDDNMQKLKARCLGNIVVKLPLPPGAFSGLWKNQEAFKHLYFEKFPGYYDTMDAGYMDEEGYLYVMSRVDDVINVAGHRISAGAIEESILSHGTVADCAVVGKEDPLKGHVPLALCVLRKDINATEEQVLEEIVKHVRQNIGPVAAFRNAVFVKQLPKTRSGKIPRSALSAIVNGKPYKITSTIEDPSIFGHVEEMLKQA

SEQ ID NO: 909 - DNA, 4457 bp, Homo sapiens
tgtgattggctgttgccatggatacgctttgtgtagcggctatgggcgctgtcttacaacaaagccaaggaatctcgctgctgagggttctgtgctttattatgaagaataatggacgatgatgatgcaaagctcaaagcagaaatagaagctgaattggataaactcagcatttcctccttggaaaaagaagacattgagagtgatgcaaaatcagaaacccagagtgatgatagtgatacagattcagttgaattaccagaatcagttcttcactgtattaacatcataaagaacaggagtaaagctgttgaagagctcattcttcaggacctggaagatactgatattttaagctgtagttatggagcagtttctaataatcatatgcatttaagaacaggactatcaactgaatatgaagaaagttcagagcaattaattaagatattatctgaaatagaaaaagaagaatttatgagaagtaaaaccgattgtgccactcctgattttgttcctgagcctagtcctcatgacttgcctatggatgaacatgttttaccagatgatgctgatataaattttggatactgtgaagtggaagaaaaatgtagacagtcttttgaggcttggcaagagaaacagaaggaattagaagataaagagaaacaaactctcaaagctcagagggatagagaagaaaaacaatttcaagaagaagaagaaaagcgacattgctggatgaaacaatttaaagttgaaaagaagaaattagagaacattcagaagcaagaacaggacaagatgaatgatgaactctataaagaagagaaaatttggaaagagaaatttaaacagcatgaggagtatattagaaacttgcatttacaaatggaagaagaaagaacaagatttaaagaccaacaagaaaaagaaaaaaattctttgttaaaacagcagaataatgcagctgttaaaattcaagctaaatataaagcatttgttgcctatcaaaaatatggcccaattattaaagagcaaattgaaagtaagaaaaggaaagcacaagagtggaaggaaaaggaagcaaaaatacgacaaaaggaggaagaaaatcgaaaaagattagaggaggaacaaaggataaaagaagagagaaaaaagcaaaaggaagaggaaaggaaaaggagagaaaaagaatatgaagaaaaaaagaatattgtgaaacaggaaagagagcaactaataagcaaggaaaaaataatattaagagaagatgcaagccaacagctaataataagtagtgcattaaagaagagcggatataataacaaacatttaagtcttgaagatatttcaaatgataagggtgatatagccaaaaatctagtggatgaaaattcaaagaagcaggaagatgttctcctttggctagttgaggaatcaaatatgaaagaaaatgtagatagacagactatattaaaagaatcaatacaagtaaagttaaaagaatctatatcaagccaaacaattctggcagattttaaaatggaagaaaaaaatgaaaacctagcaaaaaaacgatgttcagaagaattggtcaagcaagaaagaaaatatgaaaatacagataacaaaactgaattgggaaactctgatctaaaaggaaatctgaaagaacagtttccattgcaagaattaaagtctgatgcacaaaaagaagaaaaaatcatgaaacatgtcataaatgagaatacaggacaaaaaacccagataatattaggacataaccaagaaatcagtgaggtgaaaaccaatgaagagcagaaaataatcaaagataatcagcagaaaaagatacaaaaagtagaaaaagaagagatacaagaacagaatggattattatataaagataaggatactttagttatttcagtgaaacaaagatcactctcactaacatcagaaaattccaaagatgtaagagaaaacgtaatattacaagaaaaagaaatttattcaaaatccaaagaaattgaggagaacccaaaagacaatgcttggaatagtggcattgtgatttttaacacaactgataccatgataaatatagaaggcaaaagaaatgaccaagattatgtgttaggtagacatgctccttgtgagggcttgagtaactataatgcagaaagctccatggtatctaaagaagtcaactctcttaaatctgagattagaaatatttcagaaaaatgccatgaaaatgcacctgaacctgatagcatgacctgctgtgtatcagagtcaacccttctatattctattgaagaaaggagactagcctggataaaatcatttaaaccttggcttgaaattttcaagcaaaatcaacaaaagaaaattgttagaagaaagagacctgtgaaatgcccagccaacatgacacccgctttggataaactggaaattcttcgatgtggcccttgggatactttacagcaggttacaacagttacatttcaagatttgccaggctgtgttctctccacactggcagagtgtacaaatcttcagtttctatcccttcgacgctgtggattaacttctttgcacagcctgagtaattgtaaaaaacttaagtacattgatgcacaggaaaaccatattgaggctattgagtgtgaaaatttggaaaatctctgtgttgttcttcttaataaaaatcaactgacttctcttcatggtttggatggctgtactaatattcagtgtcttgaactttcatataataaaattactcgaattggatattccttctttctggaagaaaaacttgttgacaatgcagggttctgccatcacttgggcacctccacttcttacttatccctggcacaagtctggattccaactggattatgttggtcctggatacctattacctcacttacaaaaaattcagattgtaatttccttatctcccacttatactggaattgtggtttagaatctttgaaaaatcttcaacaactaattttggaccacaatcagttaattaatacaaaaggtctttgtgatacacctaccattgtatacctagattgctcccataatcatcttactgatgtagagggcgttgaaaattgtggattgctccaaatattgaagttacagggaaattatctgagtgagcttccatccttggagaatcttgttttactaagagaattgcacttggatgataacagcatttcaactgtggaagcattttcttcatactggctgcctttactacaaaatattactatctctcaaaacagcttgactaaaatcgtaccactttttcattttgtttcattggaaaagctagatgtcagccacaattgtctttctgatcttaaaagtgccataaaatggtttgatgcatgctattctctccatgaattgtctcttactggaaacccacttcttcaagaaacaaactggagggattctctacttaaagtgttgcctgctctgagaatcctcaatggcaatatactaaactctaattcagaaagccgcactgaagaacacaatcaactgggatcagcaggtttcctggcactttgtcagtctcagattcgagaattcaacttgctaattgaaaattatataactggaaaaggagatgtatttaccttggatactgcagaaaatctctgtcattattttaagaaattgatgatacttagtactgaataccgacatgcacacgaacgaggggatgtaactatcaccaagaaagatgaatcagaagcccagaaaaatcatttggcccctacaaacagtgacagcactctgcaaaatggagtcttctactcttgtgcacgtgaaggtgagccagactcaccagatattcctgagaaatggatggactctgtctccagccactccccattaagcaaatccgccacatgtgaaaatatggaaggaagacatcaggaaatattagtatgtcagaagagagaagacagcaaggcaagcagtattcccaccataagaatcccatttaaggaagtagtaatgacaaattctttgctgaggaatcaccaaaatattgagcctagtgaaaaaatgtaagatatataaataatgtttcttttatagatgtatgtttactccttttgatggatgatattagtcaatggtacctagtaatttgctgaaggattcaaatcacaatcatatttcataccgattccattatgttttcgtgaggtgcattatgttttcatgaggtgcacaaatcattaattatagtgcatattaatttgattaaattctcatttaatttctagtagtatttaaatgagtaaatgtgagtttttttctgccttgtaatttctaaataattaatatgttttaaggagaaataaaatatcacagtctaaaaataataaaaacattttctgagt

SEQ ID NO: 910 - protein, 1336 aa, Homo sapiens
MDDDDAKLKAEIEAELDKLSISSLEKEDIESDAKSETQSDDSDTDSVELPESVLHCINIIKNRSKAVEELILQDLEDTDILSCSYGAVSNNHMHLRTGLSTEYEESSEQLIKILSEIEKEEFMRSKTDCATPDFVPEPSPHDLPMDEHVLPDDADINFGYCEVEEKCRQSFEAWQEKQKELEDKEKQTLKAQRDREEKQFQEEEEKRHCWMKQFKVEKKKLENIQKQEQDKMNDELYKEEKIWKEKFKQHEEYIRNLHLQMEEERTRFKDQQEKEKNSLLKQQNNAAVKIQAKYKAFVAYQKYGPIIKEQIESKKRKAQEWKEKEAKIRQKEEENRKRLEEEQRIKEERKKQKEEERKRREKEYEEKKNIVKQEREQLISKEKIILREDASQQLIISSALKKSGYNNKHLSLEDISNDKGDIAKNLVDENSKKQEDVLLWLVEESNMKENVDRQTILKESIQVKLKESISSQTILADFKMEEKNENLAKKRCSEELVKQERKYENTDNKTELGNSDLKGNLKEQFPLQELKSDAQKEEKIMKHVINENTGQKTQIILGHNQEISEVKTNEEQKIIKDNQQKKIQKVEKEEIQEQNGLLYKDKDTLVISVKQRSLSLTSENSKDVRENVILQEKEIYSKSKEIEENPKDNAWNSGIVIFNTTDTMINIEGKRNDQDYVLGRHAPCEGLSNYNAESSMVSKEVNSLKSEIRNISEKCHENAPEPDSMTCCVSESTLLYSIEERRLAWIKSFKPWLEIFKQNQQKKIVRRKRPVKCPANMTPALDKLEILRCGPWDTLQQVTTVTFQDLPGCVLSTLAECTNLQFLSLRRCGLTSLHSLSNCKKLKYIDAQENHIEAIECENLENLCVVLLNKNQLTSLHGLDGCTNIQCLELSYNKITRIGYSFFLEEKLVDNAGFCHHLGTSTSYLSLAQVWIPTGLCWSWIPITSLTKNSDCNFLISHLYWNCGLESLKNLQQLILDHNQLINTKGLCDTPTIVYLDCSHNHLTDVEGVENCGLLQILKLQGNYLSELPSLENLVLLRELHLDDNSISTVEAFSSYWLPLLQNITISQNSLTKIVPLFHFVSLEKLDVSHNCLSDLKSAIKWFDACYSLHELSLTGNPLLQETNWRDSLLKVLPALRILNGNILNSNSESRTEEHNQLGSAGFLALCQSQIREFNLLIENYITGKGDVFTLDTAENLCHYFKKLMILSTEYRHAHERGDVTITKKDESEAQKNHLAPTNSDSTLQNGVFYSCAREGEPDSPDIPEKWMDSVSSHSPLSKSATCENMEGRHQEILVCQKREDSKASSIPTIRIPFKEVVMTNSLLRNHQNIEPSEKM

SEQ ID NO: 911 - DNA, 1320 bp, Homo sapiens
gattatggagtttctgagcgagaagtttgccctcaagagccctccgagtaaaaacagtgacttttacatgggcgcaggaggtcctctggagcacgttatggagacgctggacaatgagtccttttacagcaaagcgtctgcaggcaaatgcgtgcaggccttcggacccctgccccgcgccgagcatcacgtgcgcttggagaggacctcgccctgtcaggacagcagcgtgaactatgggatcactaaagtagaaggacagccccttcacaccgaactgaatagagctatggacaactgtaacagtctccgaatgtctcccgtgaaagggatgcaagagaagggagagctggatgaacttggggataaatgtgatagcaatgtatccagcagtaagaaacggaggcaccgaaccaccttcaccagtttgcagctagaggagctggagaaagtctttcagaaaactcattacccggatgtgtatgtcagagaacagcttgctctgaggacagagctcactgaggccagggtccaggtttggtttcaaaatcgaagggccaaatggagaaaaagggaacgttatggccaaatacaacaagcgaaaagccattttgctgccacctatgatatatcagttttgccaaggactgacagctacccacagattcagaacaatttgtgggcaggaaatgcaagtggtggttctgtggttacttcatgcatgttaccacgtgacacttcctcctgtatgacaccttattctcactcgcctcggacagattccagttacacggggttttcaaaccaccagaaccagttcagccacgtgcccctcaacaattttttcactgactctcttcttactggggcaaccaatggacatgcatttgaaacaaagccagagtttgaaaggaggtcttccagtatcgcagttcttcgaatgaaagccaaggagcacaccgccaatatttcatgggccatgtaacatacagtactcttttatttttcttttaatagcaaagttaaacattcttatttctcatatttaaaggataccacaataagctgctgtgtgtggaattgctaaaggtcaagatattcagtgagaccagcttaaatgaatagttgttatttaacattaaaatctaagaatgaacctctgaaaagactaaataggtttaccatgtgccagtctccacaaaccctgttttagtagtaaggttttctttttctattgtacaagtcaatgaaatatgatcacgcaacttattaaagaataaatgtgttaaacaaaaaaaaaaaaaaaaaaaaaaaaaaaaa

SEQ ID NO: 912 - protein, 326 aa, Homo sapiens
MEFLSEKFALKSPPSKNSDFYMGAGGPLEHVMETLDNESFYSKASAGKCVQAFGPLPRAEHHVRLERTSPCQDSSVNYGITKVEGQPLHTELNRAMDNCNSLRMSPVKGMQEKGELDELGDKCDSNVSSSKKRRHRTTFTSLQLEELEKVFQKTHYPDVYVREQLALRTELTEARVQVWFQNRRAKWRKRERYGQIQQAKSHFAATYDISVLPRTDSYPQIQNNLWAGNASGGSVVTSCMLPRDTSSCMTPYSHSPRTDSSYTGFSNHQNQFSHVPLNNFFTDSLLTGATNGHAFETKPEFERRSSSIAVLRMKAKEHTANISWAM

SEQ ID NO: 913 - DNA, 545 bp, Homo sapiens
atgctagtggaaaacagtttgatctcagactgctgtgctagcaatcagcgagactccgtgggcgtaggaccctccgagccaggcatcagctatcaaaacttatgggaaatggaattgaagacaactacttctagaattggtgcatggaagcttctcataggtgattagccacactcttcttctgtcaacctggtgcagaaaagcttgaagaccttggaaatcacatattgatgatggaggagatacaagaatgaaggaccctgggttcctgaatcaacactctaagaagagactccttgaaatcaagagcactcattttgacattgcaaacggaaaaattcacttctatcaggtttgaaccaatatatagtttagggtttttaaaaaataactgttagcatgactttaactaatacacatgccatacaggatcagacctctgtgactttgcttttacagtctgctctgtctggaggggagtttcatctttgccatccttaatgatatagcatagacgctatgtcctccagaaacttccttggcac

SEQ ID NO: 914 - protein, 55 aa, Homo sapiens [sequence omitted]

SEQ ID NO: 915 - DNA, 2958 bp, Homo sapiens
aaattgcggaacgcgaggggcgagcgcgagggagcccccctccggaacccctgcccacccccggagcgccggcagcggcggccccgcgaggatcggctccaggagatgatagaaagtgacacctcatccataatgtcaggaattattcgaaactcagggcaaaatcaccacccctctccacaggaatacagggtcaagcagggcaggcttcctggcagaggcggcattgggctgtcagcctgagaccctttcatgcctggcctgccctgtcctgccctgccctgccctgccccacctcctgcccccagctgtctgatcgccatggccctgaagaacagcaagacaggcagcctgcctgtgagcgagatctacagcttcatgaaggagcacttcccctacttcaagacggcccccgacgggtggaagaactcggtgcggcacaacctgtctctgaacaagtgcttcgagaaggtggagaacaagatgagcggctcctcccgcaagggctgcctgtgggctctgaacctggcccgcatcgacaagatggaggaggagatgcacaagtggaagaggaaggacctggctgccatccaccggagtatggccaaccctgaggagttggacaagctgatctccgaccggcctgaaagctgccggcgccccggcaaaccgggggaaccagaggcccccgtgctgactcacgccaccacagtggccgtggcgcatggctgcctggctgtctcccagctcccaccccagccactgatgaccctgtccctgcagtcagtccccctgcaccaccaggtccagccccaggcacatcttgctccagactctccagcaccagcccagaccccgccactgcacgccctgccggacctcagccccagcccgctcccccaccccgccatgggaagggctcctgtagacttcatcaacatcagcaccgacatgaacactgaggtggatgccctcgacccgagcatcatggacttcgctctgcaggggaacctgtgggaggagatgaaggatgagggattcagcctggacacactgggcgcctttgcagactccccgcttggctgtgacctgggggcctcaggcctaacccctgcctcgggtggcagcgaccagtccttcccagacttgcaggtgacgggtctctacacagcgtactccactccggacagtgtggctgcatcgggcaccagctcctcctcccagtaccttggtgcacaggggaacaagcctatagccctgctttgagctgtcagcctcacctgccctggaaccccggcacccggcttgggcagagaactgactagaacagggtgttcccagaaggcaggtccctcattgtccccgaagcctctcctggacctgtggcgaagttgccggctggacagggaagcggttcccctcagcagcccctctccttctcgtgcctccccctggagcttccggagcagtttctgggggctcttccaagtcagaagaatggaggaaggtggacaagcaacccagcatcccctgaccccttgacactcctccgaggcctgagccgcaatgcctgcccgtgttgagtgagacttctccatcctggatcctggctgcgtgacctcagtgacctgcaccccattttgggacaccttggtgcattaaggaaacaccctggggtgaaagcccttgaattcatcctcatgggaaatggctgagtggatcaaacctcagccgcagcctccgggggacaggcccagggcgggaaatggagccggagaagcttgagcctctctcttggacaggacaagctgaactctgaaatgggagccggtccaggtggccttcagccccacctttccgatagtctgttagaattttattagcgcagattcctgggccatgccgggtaccgtgaccttgtgtaaatttatttatatttattgtggcccatccaccccacttctgcaaacccatcccgaggcctctggaatgggactccttctccctccctacctcccagccatcctaactcctacaggccagagaatgacatctctaactggctcataatcccttggcagcctggggctactttttagaaccagcaagcactgttgatactgtgaaacatcccattttttccgtattagagaccagatatttttctacctgttcatgattcacatctcttcttgcatgtacctaagaggggcggtgccattgtttgggggcttggggggctttcaaaggggaaaatgcgatgggagagggaggaactggaggggggtgcttttgtactgggatttaagacacccctgatggaatgaaagccaactgaaccacgtaaagctcgaaccacgtggcaagtggtggacaaaacttcaacgcatgatatttattggcacttccttacctccctttgccctgcagctgtttttatgcttctttttctctccttgctaattactgactccccaagtggcaagttccgcagatagctgggttagaagagagacaggggagtgagctagtcaaatgtgaaaaatgctctcccagcaaagctgagacaaaattggagaagctgcagcctcacgcaccatccccctctttccaccagatggatgttgacttggtgtctgggagttcccgaaccctagagccaggatgttctgtttaatcaacagctcagccagctgcctgggagttttggcattaagccccgccttgaagggcgagctttaagtttttcccagttctggaactttctaccgagtatccaccacccttagacacaatcccagtgctacccgtctgacctgcactgctcatctgctttgtgtaacatgacccctgataagatgttgaaactgttattcacaaagactccgtgtttgggcaacatcaagactgtaagtgtagaattgagcaactgtcttctatcaataaaggctgaatggc

SEQ ID NO: 916 - protein, 337 aa, Homo sapiens
MPGLPCPALPCPAPPPAPSCLIAMALKNSKTGSLPVSEIYSFMKEHFPYFKTAPDGWKNSVRHNLSLNKCFEKVENKMSGSSRKGCLWALNLARIDKMEEEMHKWKRKDLAAIHRSMANPEELDKLISDRPESCRRPGKPGEPEAPVLTHATTVAVAHGCLAVSQLPPQPLMTLSLQSVPLHHQVQPQAHLAPDSPAPAQTPPLHALPDLSPSPLPHPAMGRAPVDFINISTDMNTEVDALDPSIMDFALQGNLWEEMKDEGFSLDTLGAFADSPLGCDLGASGLTPASGGSDQSFPDLQVTGLYTAYSTPDSVAASGTSSSSQYLGAQGNKPIALL

SEQ ID NO: 917 - DNA, 716 bp, Homo sapiens
aaattgtgcggttaacggtcaaagcccccctgcctactttgacactcatttaaagatgacagggaacaatagagatttgttctgtgcaaccctttcttgttatgccggcgacatcagctccgcacatgaaactgcccgatatttcattccacctgccacctccctcccgcctcggtcgactctctcctctgctactttgcttgtccccactttaacacaaagagacagctctgtgttcacagcacctaacagtgttgaaaaagaatgctatttaaaacccgagttgagacatcacctttccaaacccatgactgcttcctggctcactaaacacgaaccagaaattaatgctgcaaagagcagagacaagagattcgactgtgttagccaggatggtctcgatctcctgacttcgtgatctgcccgcctcagcctcccaaagtgctgggattacaggcttgagccactgtgcctggcttcaggctgggatttttatagcttattatggcaagggaggagacggagagtaaaagaagaaggaagagcatacacagtcaccccttgtgtgacaaatatgcaagaaataaagataaatgtgtacaattcttacaattttacttttctgaattttgctattgcactgaatgatttgtgataagacagatggggatgaaaaatatacttattaaataaacagctattaaaagcccctaaaa

SEQ ID NO: 918 - protein, 120 aa, Homo sapiens
MTGNNRDLFCATLSCYAGDISSAHETARYFIPPATSLPPRSTLSSATLLVPTLTQRDSSVFTAPNSVEKECYLKPELRHHLSKPMTASWLTKHEPEINAAKSRDKRFDCVSQDGLDLLTS

SEQ ID NO: 919 - DNA, 2628 bp, Homo sapiens
gtgcgctgccgtaccggtcacgtggacgtttggtcacgtgactgcgtccgtggtcctcccgtaggaaccggcggactcggttggcgttgtggggcagggggtggtggagcaagatggcggctcatctgtcctacggccgagtgaacctaaacgtgttgcgcgaggcggtgcgtcgcgagctgcgcgagttcctggacaagtgcgcaggaagcaaggcaatagtttgggatgaatacctaactggaccctttggcctgattgcacagtattcactattgaaggaacatgaagtggaaaaaatgttcacacttaaaggaaatcgtttgccggcagctgatgtgaagaatataattttttttgtcagacccaggctagagttgatggatataatcgctgaaaacgtgctcagtgaagatagacgaggcccaacgagagattttcatattctgtttgtgccacgccgtagcctgttgtgcgaacagcggttgaaggatctgggtgtcttgggatcctttattcacagggaggagtacagcttagatctcattccattcgatggggatctcttatccatggaatcagagggtgcattcaaagagtgctacctggagggtgaccagacgagcctgtaccacgcagccaaggggctgatgaccctgcaagctctgtatggaacgatcccccagatctttgggaaaggagaatgcgctcggcaagtggccaatatgatgatcaggatgaagagagagtttacaggaagccagaattcaatatttcctgtttttgataatctcttgttgcttgatcggaatgtggatttattaacacctcttgccactcagctgacatatgaaggactcattgatgaaatttatggcattcagaacagttatgtgaaattacctccagagaaatttgcacctaagaaacagggcgatggtggtaaggacctccccacggaagcaaagaagctgcagctgaattctgcagaggagctctatgctgagatccgagataagaacttcaacgcagttggctctgtgctcagcaagaaagcaaagatcatctctgcagcattcgaggaaagacacaatgctaagaccgtgggggagatcaagcagtttgtttcccagttgccccacatgcaggcagcaaggggctcgcttgcaaaccatacctcaattgcagaattgatcaaagatgtcactacttctgaagacttttttgataaattaaccgtggaacaggagtttatgtctggaatagacactgataaggtcaacaattacattgaggattgtatcgcccaaaagcactcgttgatcaaggtgttaagactagtttgcctccaatccgtgtgtaatagtgggctcaaacaaaaagttttggattattacaaaagagagattctccagacatacggctatgagcacatattgaccttacacaacctggagaaggccggcctgctgaaaccgcagacggggggcagaaacaattacccaactatacggaaaacattacgcctctggatggatgatgttaatgagcaaaaccccacggacatatcgtatgtgtacagtgggtatgccccgctcagtgtgcggctggcccagctgctttcccggcctggctggcggagcatcgaggaggtcctccgcatcctcccagggccccactttgaggagcggcagccactgcccacaggactgcagaagaaacgtcaaccgggagaaaaccgagtgactctgatatttttccttgggggcgtaaccttcgctgaaattgctgccctgcgatttctctcccagttggaagatggaggtacagaatatgtcattgccaccactaaactaatgaatggaaccagttggatagaggctctgatggaaaaacctttctaggatgttcagaggagacttaacaagtgtactgcagaataaactacctctttgaagaaattgctgaaaggaagtaaaaccccatagaagaaacatgggaatacagaatatattctggggtcagcttcttaaattatactactgtttactgctttctccgtctcttttgtattccctttttttttttcctttgagacggagtcttgctctgtcacccagactagagtgcagtggcacggtctcacctcactgcaacctccacctcctaggttcaagcaattctcctgcctcagcctcctgagtagctgggactacaggcatgcaccaccacacccggctaatttttgtatttttagtagccatggtgtttcaccatgttggccaggctggtctcaaactcctgacctcaggtgatccacctgcctcggcctcccacagtgctgggattacaggcctgagccaccgtgcctggcccctaatctgctgaagaaagaagaatagaagaaaatcaacctgagtaaaagcagcactggttttgagttttctaagctcagggtcttcattagagacctctggaaatacattaaggatggtgggggtagataatccattcagccagacaaacggggccagctcttaaaataagaaagctgagactgaggaggtgaaactgaaaataaaaagagaaagttcatcctctaaaaaaaaaaaaaaaaaaaaaaaaaaa

SEQ ID NO: 920 - protein, 596 aa, Homo sapiens
MAAHLSYGRVNLNVLREAVRRELREFLDKCAGSKAIVWDEYLTGPFGLIAQYSLLKEHEVEKMFTLKGNRLPAADVKNIIFFVRPRLELMDIIAENVLSEDRRGPTRDFHILFVPRRSLLCEQRLKDLGVLGSFIHREEYSLDLIPFDGDLLSMESEGAFKECYLEGDQTSLYHAAKGLMTLQALYGTIPQIFGKGECARQVANMMIRMKREFTGSQNSIFPVFDNLLLLDRNVDLLTPLATQLTYEGLIDEIYGIQNSYVKLPPEKFAPKKQGDGGKDLPTEAKKLQLNSAEELYAEIRDKNFNAVGSVLSKKAKIISAAFEERHNAKTVGEIKQFVSQLPHMQAARGSLANHTSIAELIKDVTTSEDFFDKLTVEQEFMSGIDTDKVNNYIEDCIAQKHSLIKVLRLVCLQSVCNSGLKQKVLDYYKREILQTYGYEHILTLHNLEKAGLLKPQTGGRNNYPTIRKTLRLWMDDVNEQNPTDISYVYSGYAPLSVRLAQLLSRPGWRSIEEVLRILPGPHFEERQPLPTGLQKKRQPGENRVTLIFFLGGVTFAEIAALRFLSQLEDGGTEYVIATTKLMNGTSWIEALMEKPF

SEQ ID NO: 921 - DNA, 5898 bp, Homo sapiens
gctgctgctgcagtgggacaggtggcggcgaccggcggcgtccgaggagatttaatccagagactgacttcactatagaacccacagttgtatcaatggttggggaaagatagtggcaacaggcaaaggagaaacagctctgacatacaaagaaaatgagtatgctaaagccaagtgggcttaaggcccccaccaagatcctgaagcctggaagcacagctctgaagacacctacggctgttgtagctccagtagaaaaaaccatatccagtgaaaaagcatcaagcactccatcatctgagactcaggaggaatttgtggatgactttcgagttggggagcgagtttgggtgaatggaaataagcctggatttatccagtttcttggagaaacccagtttgcaccaggccagtgggctggaattgttttagatgaacccataggcaagaacgatggttcggtggcaggagttcggtatttccagtgtgaacctttaaagggcatatttacccgaccttcaaagttaacaaggaaggtgcaagcagaagatgaagctaatggcctgcagacaacgcccgcctcccgagctacttcaccgctgtgcacttctacggccagcatggtgtcttcctccccctccaccccttcaaacatccctcagaaaccatcacagccagcagcaaaggaaccttcagctacgcctccgatcagcaaccttacaaaaactgccagtgaatctatctccaacctttcagaggctggctcaatcaagaaaggagaaagagagctcaaaatcggagacagagtattggttggtggcactaaggctggtgtagtccggtttcttggggagaccgactttgccaagggggagtggtgtggcgtggagttagatgagccacttgggaagaatgatggcgctgttgctggaacaaggtattttcagtgtcaacccaaatatggcttgttcgctcctgtccacaaagttaccaagattggcttcccttccactacaccagccaaagccaaggccaacgcagtgaggcgagtgatggcgaccacgtccgccagcctgaagcgcagcccttctgcctcttccctcagctccatgagctcagtggcctcctctgtgagcagcaggcccagtcggacaggactattgactgaaacctcctcccgttacgccaggaagatctccggtaccactgccctccaggaggccctgaaggagaagcagcagcacattgagcagctgctggcggaacgggatctggagagggcggaggtggccaaggccacgagccacgtgggggagatagagcaggagctagctctggcccgggacggacatgaccagcatgtcctggaattggaagccaaaatggaccagctgcgaacaatggtggaagctgctgacagggagaaggtggagcttctcaaccagcttgaagaggagaaaaggaaggttgaggaccttcagttccgggttgaagaagaatcaattaccaaaggtgatcttgagacgcagaccaaactggagcatgcccgcattaaggagcttgaacagagcctgctctttgaaaagaccaaagctgacaaactccagagggagttagaagacactagggtggctacagtttcagaaaagtcacgtataatggaactggagaaagacctagcattgagagtacaggaagtagctgagctccgaagaaggctagagtccaataagcctgctggggatgtggacatgtcactttcccttttgcaagagataagctctttgcaagaaaagttagaagtcacccgtactgaccaccagagagaaataacttctctgaaggagcattttggagcccgggaagaaactcatcagaaggagataaaggctctgtataccgccacggaaaagctttccaaagagaacgagtcattgaaaagcaagctggagcatgccaacaaagagaactcagatgtgatagctctatggaagtccaaactggagactgccatcgcatcccaccagcaggcgatggaagaactgaaggtatctttcagcaaagggcttggaacagagacggcagaatttgctgaactaaaaacacaaatagagaaaatgagactagattaccaacacgaaatagaaaatttgcagaatcaacaagactctgaacgggctgcccatgctaaagagatggaagccttgagggctaaactgatgaaagttattaaagaaaaggaaaacagtctggaagccatcaggtcgaaactggacaaagcagaagaccagcatctcgtagaaatggaagacacgttaaacaaattacaggaagctgaaataaaggtaaaggagctagaggtactgcaagccaaatgcaatgaacaaaccaaggttattgataattttacatcacagctcaaggctactgaagaaaagctcttggatcttgatgcacttcggaaagccagttccgaaggtaaatcggaaatgaagaaacttagacagcagcttgaggcagctgagaaacagattaaacatttagagattgaaaagaatgctgaaagtagcaaggctagtagcattaccagagagctccaggggagagagctaaagcttactaaccttcaggaaaatttgagtgaagtcagtcaagtgaaagagactttggaaaaagaacttcagattttgaaagaaaagtttgctgaagcttcagaggaggcagtctctgttcagagaagtatgcaagaaactgtaaataagttacaccaaaaggaggaacagtttaacatgctgtcttctgacttggagaagctgagagaaaacttagcagatatggaggcaaaatttagagagaaagatgagagagaagagcagctgataaaggcaaaggaaaaactggaaaatgacattgcagaaataatgaagatgtcaggagataactcttctcagctgacaaaaatgaacgatgaattacgtctgaaagaaagagatgtagaagaattacagctaaaacttacaaaggctaatgaaaatgcaagttttctgcaaaaaagtattgaggacatgactgtcaaagctgaacagagccagcaagaagcagctaaaaagcatgaggaagaaaagaaagaattggagaggaaattgtcggacctggaaaagaaaatggaaacaagccacaaccagtgtcaggagctgaaagccaggtatgagagagccacttctgagacaaaaaccaagcatgaagaaatcctacagaacctccagaagacgctgctggacacagaggacaagctgaagggcgcacgggaggagaacagtggcttgctgcaggagctggaggagctgagaaagcaagccgacaaagccaaagctgctcaaacagcggaagatgccatgcagataatggaacagatgaccaaagagaagactgagactctggcctccttggaggacaccaagcaaacaaatgcaaaactacagaatgaattggacacacttaaagaaaacaacttgaaaaatgtggaagagctgaacaaatcaaaagaactcctgactgtagagaatcaaaaaatggaagaatttaggaaagaaatagaaaccctaaagcaggcagcagctcagaagtcccagcagctttcagcgttgcaagaagagaacgttaaacttgctgaggagctggggagaagcagggacgaagtcacaagtcatcaaaagctggaagaagaaagatctgtgctcaataatcagttgttagaaatgaaaaaaagagaatccaagttcataaaagacgcagatgaagagaaagcttccttgcagaaatccatcagtataactagtgccttactcacagaaaaggatgccgagctggagaaactgagaaatgaggtcacagtgctcaggggagaaaacgcctctgccaagtccttgcattcagttgttcagactctagagtctgataaggtgaagctcgagctcaaggtaaagaacttggagcttcaactcaaagaaaacaagaggcagctcagcagctcctcaggtaatacagacactcaggcagacgaggatgaaagagcccaggagagtcagattgatttcctaaattcagtaatagtggaccttcaaaggaagaatcaagacctcaagatgaaggtggagatgatgtcagaagcagccctgaatgggaacggggatgacctaaacaattatgacagtgatgatcaggagaaacagtccaagaagaaacctcgcctcttctgtgacatttgtgactgctttgatctccacgacacagaggattgtcctacccaggcacagatgtcagaggaccctccccattccacacaccatggcagtcggggtgaggaacgcccatactgtgaaatctgtgagatgtttggacactgggccaccaactgcaatgacgacgaaaccttctgatgaagcctccagtggagaactgggcttgctcagacgcactcgcattgacacaacgtaacaccagcattgtgtgtgcagacttcaggagaactcatgttattttttaaccccgtcaacaaatctaggaaaatattttgatcttcaacaaattgccctttagtctccccgtatgagttagaataataaatatttagtaggtgagttttcacctcgaattttgttttcttgatttttacgtttgaagacattgcaccagatgccattacatttattggccccccgaccttgtagaaaaacccctaccctcacaataccttatttaagtaactttaaattatgccgttacttttcatatttgcactaagatatttccaggctgcatttgtatatttagattttttggttaagctttgacactggaatgagttgaaaaaatgtgccattttgcattttcatctactcatttaaagtattttattcttattcaaagaaatatctgagctctttgcactacctgttatcagtagtgcctttacttcaggcttgataatacttaggtgtgattataaaatcatgaagcaggtaaagggaggggcaagcccccaaactgctgtggggacattttataatctatatgctgcacccacttaatctactgtggtgttttgtttattagttttgcataatttcagcttctatatattgtatgtatatattttttaaaaatctatattttgggaaaaaaacatacacaatgtgtctttctttttggacatttacctttttgaaaaagaaaacacttaaaatgatcattaggacataacagactaggccagacatagcatcttgtggctttgcaaccattttcatttgtttgttttccttttatttcttcaccagatttaaataactggaggaattttctccaatttttttttccttctctggcaggtatccccagcagtcaattaacaataagccagtataaaacacctaaataaccaatctacaatctcccttcacaagtttttttactgtttttagatgaatgtacgatgagaaattcaacgttaataattctggattttcttatcacaaaaaagaaaatgaaggacctcaaagcacctgaacagtttatcgaccagtttgaatctatttatcttcatttgaatgtcttctagaatatgtaaaaagtcataaaatgtatcttccatgctacatgtacaataagaacttctataattgtatatatgcctttgatgtattttcccctcaagattatcaactgtgtgttcgacagtgaatattcaatctggtaccagttgaaatttttggttataaatgtaatacgaattgtttcacaaacagaaaacatgtaaagcagtattaaaatttggccaaacaagtgttctgtatctactttaataaatggttattctttaaaaaaaaaaaaaaaaaa

SEQ ID NO: 922 - protein, 1427 aa, Homo sapiens
MSMLKPSGLKAPTKILKPGSTALKTPTAVVAPVEKTISSEKASSTPSSETQEEFVDDFRVGERVWVNGNKPGFIQFLGETQFAPGQWAGIVLDEPIGKNDGSVAGVRYFQCEPLKGIFTRPSKLTRKVQAEDEANGLQTTPASRATSPLCTSTASMVSSSPSTPSNIPQKPSQPAAKEPSATPPISNLTKTASESISNLSEAGSIKKGERELKIGDRVLVGGTKAGVVRFLGETDFAKGEWCGVELDEPLGKNDGAVAGTRYFQCQPKYGLFAPVHKVTKIGFPSTTPAKAKANAVRRVMATTSASLKRSPSASSLSSMSSVASSVSSRPSRTGLLTETSSRYARKISGTTALQEALKEKQQHIEQLLAERDLERAEVAKATSHVGEIEQELALARDGHDQHVLELEAKMDQLRTMVEAADREKVELLNQLEEEKRKVEDLQFRVEEESITKGDLETQTKLEHARIKELEQSLLFEKTKADKLQRELEDTRVATVSEKSRIMELEKDLALRVQEVAELRRRLESNKPAGDVDMSLSLLQEISSLQEKLEVTRTDHQREITSLKEHFGAREETHQKEIKALYTATEKLSKENESLKSKLEHANKENSDVIALWKSKLETAIASHQQAMEELKVSFSKGLGTETAEFAELKTQIEKMRLDYQHEIENLQNQQDSERAAHAKEMEALRAKLMKVIKEKENSLEAIRSKLDKAEDQHLVEMEDTLNKLQEAEIKVKELEVLQAKCNEQTKVIDNFTSQLKATEEKLLDLDALRKASSEGKSEMKKLRQQLEAAEKQIKHLEIEKNAESSKASSITRELQGRELKLTNLQENLSEVSQVKETLEKELQILKEKFAEASEEAVSVQRSMQETVNKLHQKEEQFNMLSSDLEKLRENLADMEAKFREKDEREEQLIKAKEKLENDIAEIMKMSGDNSSQLTKMNDELRLKERDVEELQLKLTKANENASFLQKSIEDMTVKAEQSQQEAAKKHEEEKKELERKLSDLEKKMETSHNQCQELKARYERATSETKTKHEEILQNLQKTLLDTEDKLKGAREENSGLLQELEELRKQADKAKAAQTAEDAMQIMEQMTKEKTETLASLEDTKQTNAKLQNELDTLKENNLKNVEELNKSKELLTVENQKMEEFRKEIETLKQAAAQKSQQLSALQEENVKLAEELGRSRDEVTSHQKLEEERSVLNNQLLEMKKRESKFIKDADEEKASLQKSISITSALLTEKDAELEKLRNEVTVLRGENASAKSLHSVVQTLESDKVKLELKVKNLELQLKENKRQLSSSSGNTDTQADEDERAQESQIDFLNSVIVDLQRKNQDLKMKVEMMSEAALNGNGDDLNNYDSDDQEKQSKKKPRLFCDICDCFDLHDTEDCPTQAQMSEDPPHSTHHGSRGEERPYCEICEMFGHWATNCNDDETF

SEQ ID NO: 923 - DNA, 5793 bp, Homo sapiens
gctgctgctgcagtgggacaggtggcggcgaccggcggcgtccgaggagatttaatccagagactgacttcactatagaacccacagttgtatcaatggttggggaaagatagtggcaacaggcaaaggagaaacagctctgacatacaaagaaaatgagtatgctaaagccaagtgggcttaaggcccccaccaagatcctgaagcctggaagcacagctctgaagacacctacggctgttgtagctccagtagaaaaaaccatatccagtgaaaaagcatcaagcactccatcatctgagactcaggaggaatttgtggatgactttcgagttggggagcgagtttgggtgaatggaaataagcctggatttatccagtttcttggagaaacccagtttgcaccaggccagtgggctggaattgttttagatgaacccataggcaagaacgatggttcggtggcaggagttcggtatttccagtgtgaacctttaaagggcatatttacccgaccttcaaagttaacaaggaaggtgcaagcagaagatgaagctaatggcctgcagacaacgcccgcctcccgagctacttcaccgctgtgcacttctacggccagcatggtgtcttcctccccctccaccccttcaaacatccctcagaaaccatcacagccagcagcaaaggaaccttcagctacgcctccgatcagcaaccttacaaaaactgccagtgaatctatctccaacctttcagaggctggctcaatcaagaaaggagaaagagagctcaaaatcggagacagagtattggttggtggcactaaggctggtgtagtccggtttcttggggagaccgactttgccaagggggagtggtgtggcgtggagttagatgagccacttgggaagaatgatggcgctgttgctggaacaaggtattttcagtgtcaacccaaatatggcttgttcgctcctgtccacaaagttaccaagattggcttcccttccactacaccagccaaagccaaggccaacgcagtgaggcgagtgatggcgaccacgtccgccagcctgaagcgcagcccttctgcctcttccctcagctccatgagctcagtggcctcctctgtgagcagcaggcccagtcggacaggactattgactgaaacctcctcccgttacgccaggaagatctccggtaccactgccctccaggaggccctgaaggagaagcagcagcacattgagcagctgctggcggaacgggatctggagagggcggaggtggccaaggccacgagccacgtgggggagatagagcaggagctagctctggcccgggacggacatgaccagcatgtcctggaattggaagccaaaatggaccagctgcgaacaatggtggaagctgctgacagggagaaggtggagcttctcaaccagcttgaagaggagaaaaggaaggttgaggaccttcagttccgggttgaagaagaatcaattaccaaaggtgatcttgaggtggctacagtttcagaaaagtcacgtataatggaactggagaaagacctagcattgagagtacaggaagtagctgagctccgaagaaggctagagtccaataagcctgctggggatgtggacatgtcactttcccttttgcaagagataagctctttgcaagaaaagttagaagtcacccgtactgaccaccagagagaaataacttctctgaaggagcattttggagcccgggaagaaactcatcagaaggagataaaggctctgtataccgccacggaaaagctttccaaagagaacgagtcattgaaaagcaagctggagcatgccaacaaagagaactcagatgtgatagctctatggaagtccaaactggagactgccatcgcatcccaccagcaggcgatggaagaactgaaggtatctttcagcaaagggcttggaacagagacggcagaatttgctgaactaaaaacacaaatagagaaaatgagactagattaccaacacgaaatagaaaatttgcagaatcaacaagactctgaacgggctgcccatgctaaagagatggaagccttgagggctaaactgatgaaagttattaaagaaaaggaaaacagtctggaagccatcaggtcgaaactggacaaagcagaagaccagcatctcgtagaaatggaagacacgttaaacaaattacaggaagctgaaataaaggtaaaggagctagaggtactgcaagccaaatgcaatgaacaaaccaaggttattgataattttacatcacagctcaaggctactgaagaaaagctcttggatcttgatgcacttcggaaagccagttccgaaggtaaatcggaaatgaagaaacttagacagcagcttgaggcagctgagaaacagattaaacatttagagattgaaaagaatgctgaaagtagcaaggctagtagcattaccagagagctccaggggagagagctaaagcttactaaccttcaggaaaatttgagtgaagtcagtcaagtgaaagagactttggaaaaagaacttcagattttgaaagaaaagtttgctgaagcttcagaggaggcagtctctgttcagagaagtatgcaagaaactgtaaataagttacaccaaaaggaggaacagtttaacatgctgtcttctgacttggagaagctgagagaaaacttagcagatatggaggcaaaatttagagagaaagatgagagagaagagcagctgataaaggcaaaggaaaaactggaaaatgacattgcagaaataatgaagatgtcaggagataactcttctcagctgacaaaaatgaacgatgaattacgtctgaaagaaagagatgtagaagaattacagctaaaacttacaaaggctaatgaaaatgcaagttttctgcaaaaaagtattgaggacatgactgtcaaagctgaacagagccagcaagaagcagctaaaaagcatgaggaagaaaagaaagaattggagaggaaattgtcggacctggaaaagaaaatggaaacaagccacaaccagtgtcaggagctgaaagccaggtatgagagagccacttctgagacaaaaaccaagcatgaagaaatcctacagaacctccagaagacgctgctggacacagaggacaagctgaagggcgcacgggaggagaacagtggcttgctgcaggagctggaggagctgagaaagcaagccgacaaagccaaagctgctcaaacagcggaagatgccatgcagataatggaacagatgaccaaagagaagactgagactctggcctccttggaggacaccaagcaaacaaatgcaaaactacagaatgaattggacacacttaaagaaaacaacttgaaaaatgtggaagagctgaacaaatcaaaagaactcctgactgtagagaatcaaaaaatggaagaatttaggaaagaaatagaaaccctaaagcaggcagcagctcagaagtcccagcagctttcagcgttgcaagaagagaacgttaaacttgctgaggagctggggagaagcagggacgaagtcacaagtcatcaaaagctggaagaagaaagatctgtgctcaataatcagttgttagaaatgaaaaaaagagaatccaagttcataaaagacgcagatgaagagaaagcttccttgcagaaatccatcagtataactagtgccttactcacagaaaaggatgccgagctggagaaactgagaaatgaggtcacagtgctcaggggagaaaacgcctctgccaagtccttgcattcagttgttcagactctagagtctgataaggtgaagctcgagctcaaggtaaagaacttggagcttcaactcaaagaaaacaagaggcagctcagcagctcctcaggtaatacagacactcaggcagacgaggatgaaagagcccaggagagtcagattgatttcctaaattcagtaatagtggaccttcaaaggaagaatcaagacctcaagatgaaggtggagatgatgtcagaagcagccctgaatgggaacggggatgacctaaacaattatgacagtgatgatcaggagaaacagtccaagaagaaacctcgcctcttctgtgacatttgtgactgctttgatctccacgacacagaggattgtcctacccaggcacagatgtcagaggaccctccccattccacacaccatggcagtcggggtgaggaacgcccatactgtgaaatctgtgagatgtttggacactgggccaccaactgcaatgacgacgaaaccttctgatgaagcctccagtggagaactgggcttgctcagacgcactcgcattgacacaacgtaacaccagcattgtgtgtgcagacttcaggagaactcatgttattttttaaccccgtcaacaaatctaggaaaatattttgatcttcaacaaattgccctttagtctccccgtatgagttagaataataaatatttagtaggtgagttttcacctcgaattttgttttcttgatttttacgtttgaagacattgcaccagatgccattacatttattggccccccgaccttgtagaaaaacccctaccctcacaataccttatttaagtaactttaaattatgccgttacttttcatatttgcactaagatatttccaggctgcatttgtatatttagattttttggttaagctttgacactggaatgagttgaaaaaatgtgccattttgcattttcatctactcatttaaagtattttattcttattcaaagaaatatctgagctctttgcactacctgttatcagtagtgcctttacttcaggcttgataatacttaggtgtgattataaaatcatgaagcaggtaaagggaggggcaagcccccaaactgctgtggggacattttataatctatatgctgcacccacttaatctactgtggtgttttgtttattagttttgcataatttcagcttctatatattgtatgtatatattttttaaaaatctatattttgggaaaaaaacatacacaatgtgtctttctttttggacatttacctttttgaaaaagaaaacacttaaaatgatcattaggacataacagactaggccagacatagcatcttgtggctttgcaaccattttcatttgtttgttttccttttatttcttcaccagatttaaataactggaggaattttctccaatttttttttccttctctggcaggtatccccagcagtcaattaacaataagccagtataaaacacctaaataaccaatctacaatctcccttcacaagtttttttactgtttttagatgaatgtacgatgagaaattcaacgttaataattctggattttcttatcacaaaaaagaaaatgaaggacctcaaagcacctgaacagtttatcgaccagtttgaatctatttatcttcatttgaatgtcttctagaatatgtaaaaagtcataaaatgtatcttccatgctacatgtacaataagaacttctataattgtatatatgcctttgatgtattttcccctcaagattatcaactgtgtgttcgacagtgaatattcaatctggtaccagttgaaatttttggttataaatgtaatacgaattgtttcacaaacagaaaacatgtaaagcagtattaaaatttggccaaacaagtgttctgtatctactttaataaatggttattctttaaaaaaaaaaaaaaaaaa

SEQ ID NO: 924 - protein, 1392 aa, Homo sapiens
MSMLKPSGLKAPTKILKPGSTALKTPTAVVAPVEKTISSEKASSTPSSETQEEFVDDFRVGERVWVNGNKPGFIQFLGETQFAPGQWAGIVLDEPIGKNDGSVAGVRYFQCEPLKGIFTRPSKLTRKVQAEDEANGLQTTPASRATSPLCTSTASMVSSSPSTPSNIPQKPSQPAAKEPSATPPISNLTKTASESISNLSEAGSIKKGERELKIGDRVLVGGTKAGVVRFLGETDFAKGEWCGVELDEPLGKNDGAVAGTRYFQCQPKYGLFAPVHKVTKIGFPSTTPAKAKANAVRRVMATTSASLKRSPSASSLSSMSSVASSVSSRPSRTGLLTETSSRYARKISGTTALQEALKEKQQHIEQLLAERDLERAEVAKATSHVGEIEQELALARDGHDQHVLELEAKMDQLRTMVEAADREKVELLNQLEEEKRKVEDLQFRVEEESITKGDLEVATVSEKSRIMELEKDLALRVQEVAELRRRLESNKPAGDVDMSLSLLQEISSLQEKLEVTRTDHQREITSLKEHFGAREETHQKEIKALYTATEKLSKENESLKSKLEHANKENSDVIALWKSKLETAIASHQQAMEELKVSFSKGLGTETAEFAELKTQIEKMRLDYQHEIENLQNQQDSERAAHAKEMEALRAKLMKVIKEKENSLEAIRSKLDKAEDQHLVEMEDTLNKLQEAEIKVKELEVLQAKCNEQTKVIDNFTSQLKATEEKLLDLDALRKASSEGKSEMKKLRQQLEAAEKQIKHLEIEKNAESSKASSITRELQGRELKLTNLQENLSEVSQVKETLEKELQILKEKFAEASEEAVSVQRSMQETVNKLHQKEEQFNMLSSDLEKLRENLADMEAKFREKDEREEQLIKAKEKLENDIAEIMKMSGDNSSQLTKMNDELRLKERDVEELQLKLTKANENASFLQKSIEDMTVKAEQSQQEAAKKHEEEKKELERKLSDLEKKMETSHNQCQELKARYERATSETKTKHEEILQNLQKTLLDTEDKLKGAREENSGLLQELEELRKQADKAKAAQTAEDAMQIMEQMTKEKTETLASLEDTKQTNAKLQNELDTLKENNLKNVEELNKSKELLTVENQKMEEFRKEIETLKQAAAQKSQQLSALQEENVKLAEELGRSRDEVTSHQKLEEERSVLNNQLLEMKKRESKFIKDADEEKASLQKSISITSALLTEKDAELEKLRNEVTVLRGENASAKSLHSVVQTLESDKVKLELKVKNLELQLKENKRQLSSSSGNTDTQADEDERAQESQIDFLNSVIVDLQRKNQDLKMKVEMMSEAALNGNGDDLNNYDSDDQEKQSKKKPRLFCDICDCFDLHDTEDCPTQAQMSEDPPHSTHHGSRGEERPYCEICEMFGHWATNCNDDETF

SEQ ID NO: 925 - DNA, 738 bp, Homo sapiens
atgaagtggagaaacagccggattcaggattcacccccgaatcaaaacccgatttttgaaaggcaggaccttccaattcggctccggaggagccccccagggacccccggcctccggcgccggccacccgagactcccgcggtcccctcccggacggctccggcgcgcgaggctcggccccgctcccggacgccgggcttcgacccccgacccgaccctgggcgggccccgcaggccgggaagccggcaggggagcagggggtgccgggaaagggagagggcccgcgccgccccctgctcacctcctcggacgccgccggtcgccgccacctgtcccactgcagcagcagcagccgccgcggccgccgcctcccgcctcccggctcgtcggctcggggcgggggagagcgtgacgcgccgccgccgccgcggggccgggcgggcgcgcgctgccaggagaagacgccgcgcggctcctcccagcgctccgccgccgcgcccgcccggccgacaagggtgagaaatcctttgaaacaggctgcaaggcgcttccgaagcaggttaagttggggattgggaaggatcatctctgccctcgcctccctccagggaaagaccctggatgaggcgtccctggagaaaatgctgaaaggaactgtagagcaggttaagcttgggaagaactgtatctgctccccacttccctccgggaacgaccgcgggttaaaaatcctttga

SEQ ID NO: 926 - protein, 245 aa, Homo sapiens
MKWRNSRIQDSPPNQNPIFERQDLPIRLRRSPPGTPGLRRRPPETPAVPSRTAPAREARPRSRTPGFDPRPDPGRAPQAGKPAGEQGVPGKGEGPRRPLLTSSDAAGRRHLSHCSSSSRRGRRLPPPGSSARGGGERDAPPPPRGRAGARCQEKTPRGSSQRSAAAPARPTRVRNPLKQAARRFRSRLSWGLGRIISALASLQGKTLDEASLEKMLKGTVEQVKLGKNCICSPLPSGNDRGLKIL

SEQ ID NO: 927 - DNA, 2874 bp, Homo sapiens
gcgtctggagaaaaccctagcgggtggctccgtgcggccagagctctagagagtggtgccgccttccaaccttcttccccaagccctggtggccggctccgcctcttctcgaatcttttccacagcccaaaatggccgcagaggtgtattttggcgatctagagctcttcgagccgttcgaccacccagaggagtcgattccgaagcccgttcacactcgcttcaaggacgacgacggcgacgaggaggacgaaaatggggtcggcgacgcggagctacgggagcggcttcggcagtgcgaggagaccatcgagcagctccgcgccgagaatcaagaacttaaacgaaaattgaacattctgactcgaccgagtggaatattggtgaacgatactaagttagatggacctatattacagattctattcatgaacaatgctatttcaaagcaatatcatcaagaaatagaggaatttgtatcaaatttagtaaaaagatttgaggaacagcagaaaaatgatgtggaaaagacttcctttaatcttttgccccagccatccagtattgtgctagaggaggaccacaaagtggaagagtcctgtgccattaaaaacaacaaggaagctttcagtgttgtaggaagtgtcctgtattttactaatttttgccttgataaattggggcaaccgcttctaaatgaaaaccctcagctttccgaaggatgggaaatacccaagtaccatcaagtcttcagccacattgtttctctagaagggcaagaaatacaagtaaaggcaaaaaggccaaagcctcactgtttcaattgtggttctgaagaacaccaaatgaaagattgcccaatgcctcggaatgctgctcgaataagtgaaaagagaaaagagtatatggatgcctgtggagaagcaaacaatcagaatttccagcagcgataccacgcagaagaagtagaagaaagatttggaagattcaagccaggagttattagtgaggaacttcaagatgcactaggtgtgacagacaagagtcttccaccttttatctatcggatgcgccagctagggtacccaccagggtggctcaaagaggctgaattggagaattcggggcttgcactctatgatggaaaagatggcactgatggggaaacagaagttggagaaatacaacagaataaaagtgtcacttacgatctctcaaaattggtcaactatcctggttttaatatatctactcccagaggaattccagacgaatggaggatctttggttccataccaatgcaggcatgtcagcagaaggatgtgtttgccaattaccttacttctaacttccaagcgccaggtgtgaagtctggcaacaagaggtcttcatctcactctagcccaggtagtccaaagaagcagaagaatgaaagcaactcagcgggatctcccgccgacatggagctcgattcagatatggaggtaccacatggttctcagagcagcgaaagttttcagtttcaaccaccattacctcctgacactcctccactcccccggggaactcctccacccgtcttcacccctccactcccaaagggcaccccgccgctgactcccagtgactcaccccagaccagaacagcatctggagctgtggatgaggacgcactgactctagaagaacttgaagaacagcagaggcggatctgggcagctcttgagcaggccgagagcgtaaacagcgactccgacgttcctgtggacacacctttaactggcaattccgttgcctcatcaccttgtccaaatgagctagacctccctgtcccggagggaaaaacatctgaaaagcagacgctggatgagcctgaggtaccagagatttttacaaagaaatcagaagctggacatgcctccagtccagactctgaggtgacatcactttgtcagaaggaaaaagcagagttggctccggtaaacactgaaggtgcccttcttgataatggcagtgtcgtaccaaactgtgacatcagcaatgggggcagccagaagctctttcctgcagacaccagtccttcaacggccactaaaattcatagccctatacctgacatgagcaaatttgcaactggaatcacgccatttgaatttgagaatatggcagaatctactggaatgtacctcaggataagaagcttgttaaagaactcaccccgaaaccagcagaaaaacaaaaaggcctctgaataatggcttgacttagcactgagagctatttaataactttgttccgttaattagtactaattaagtggatagatagaatggttttcctgtttgtccctcccatgtttaaaaatctatccaaggttcatgttccaaagtcaagcctattttaaagaaagactgagctcactagttcagtatattttattctcactgacaaaacttggggggagatgtgaatatgacctggtttagagagggtttgttaaggtttatactatttttggattgtgactatccgtcgagagtgatggtttttatctgtcttttgtacattgttttccctttctacattttgctaattatcctgtatataagtttaatatatcactttttaaaagaaaaaattctaccattttaaattcatgtttcaactcctacaaccaaatgagaaaaatcagggatgagcagctttatcccatttggggtatttttgtaagtgatttacatgtgtcaattttagtaatacttttacttttttgtaacttcatccttcatatatgcttgctatacaggtatgttcatctttgtgtacagaggtttaataaattagttttcatatacataatctaaaaaaaaaaaa

SEQ ID NO: 928 - protein, 707 aa, Homo sapiens
MAAEVYFGDLELFEPFDHPEESIPKPVHTRFKDDDGDEEDENGVGDAELRERLRQCEETIEQLRAENQELKRKLNILTRPSGILVNDTKLDGPILQILFMNNAISKQYHQEIEEFVSNLVKRFEEQQKNDVEKTSFNLLPQPSSIVLEEDHKVEESCAIKNNKEAFSVVGSVLYFTNFCLDKLGQPLLNENPQLSEGWEIPKYHQVFSHIVSLEGQEIQVKAKRPKPHCFNCGSEEHQMKDCPMPRNAARISEKRKEYMDACGEANNQNFQQRYHAEEVEERFGRFKPGVISEELQDALGVTDKSLPPFIYRMRQLGYPPGWLKEAELENSGLALYDGKDGTDGETEVGEIQQNKSVTYDLSKLVNYPGFNISTPRGIPDEWRIFGSIPMQACQQKDVFANYLTSNFQAPGVKSGNKRSSSHSSPGSPKKQKNESNSAGSPADMELDSDMEVPHGSQSSESFQFQPPLPPDTPPLPRGTPPPVFTPPLPKGTPPLTPSDSPQTRTASGAVDEDALTLEELEEQQRRIWAALEQAESVNSDSDVPVDTPLTGNSVASSPCPNELDLPVPEGKTSEKQTLDEPEVPEIFTKKSEAGHASSPDSEVTSLCQKEKAELAPVNTEGALLDNGSVVPNCDISNGGSQKLFPADTSPSTATKIHSPIPDMSKFATGITPFEFENMAESTGMYLRIRSLLKNSPRNQQKNKKASE

SEQ ID NO: 929 - DNA, 2252 bp, Homo sapiens
agctgtgcgacgcgccgggcctcctcgcctttgtgccatccgggtctctcgcgcgagcgatttagtctgaggcgaagcttcggagcggccggtactgttgaaagcgacaagtggaggcgccgctctagcggccgggactctgaactatggcggctagtgatacagagcgagatggactagccccagaaaagacatcaccagatagagataagaaaaaagagcagtcagaagtatctgtttctcctagagcttcaaaacatcattattcaagatcacgatcaaggtcaagagaaagaaaacgaaagtcagataatgaaggaagaaaacacaggagccggagcagaagcaaagagggaagaagacatgaatccaaagataaatcctctaagaaacataagtctgaggaacataatgacaaagaacattcttctgataaaggaagagagcgactaaattcatctgaaaatggtgaggacaggcacaaacgcaaagaaagaaagtcatcaagaggcagaagtcactcaagatctaggtctcgtgaaagacgccatcgtagtagaagcagggagcggaagaagtctcgatccaggagtagggagcggaagaaatcgagatccagaagcagagagaggaagaaatcgagatccagaagcagggaaagaaaacggcggatcaggtctcgttcccgctcaagatcaagacacaggcataggactagaagcaggagtaggacaaggagtaggagtcgagatagaaagaagagaattgaaaagccgagaagatttagcagaagtttaagccggactccaagtccacctcccttcagaggcagaaacacagcaatggatgcacaggaagctttagctagaaggttggaaagggcaaagaaattacaagaacagcgagaaaaggaaatggttgaaaaacaaaaacaacaagaaatagctgcagctgcagctactggaggttctgttctcaatgttgctgccctgttggcatcaggaacacaagtaacacctcagatagccatggcagctcagatggcagccctgcaagctaaagctttggcagagacaggaatagctgttcctagctactataacccagccgctgttaatccaatgaaatttgctgaacaagagaaaaaaaggaaaatgctttggcagggcaagaaagaaggggacaaatcccaatctgctgaaatatgggaaaaattgaattttggaaacaaggaccaaaatgtcaaatttaggaaattgatgggtattaagagtgaagatgaagctggatgtagctcagttgatgaagaaagttacaagactctgaagcagcaggaagaagtatttcgaaatttagatgctcagtatgaaatggcaagatcacaaacccacacacaaagaggaatgggtttgggtttcacatcttcaatgcgaggaatggatgcagtttgaaaatgatcacacttgtaaagtttgggacttatagacttcttgttctgatgtcacgtccttgttcaccaaacagctagcactctagcttgcatgggtgttgcattgactttaatttattgaaaaatacaaatttttgtaaatatcagatcagtgatactggtgttagtgttgtaatcaggttaaacccacttccattaaacttgacaggactatagaaggataatattttttagttcatgaattctacttttcaaatatataaaagctgcaggtggggataaaatctcatacatggattttttcgtgtccgctgtcttgtgtacttttgtacttaaccttgtacagttattttcatctcttgaaacatgaaagaaatgttatgtagatgttctttagaagatctggccatttggtacataatccagcacagataagctgggtggtaatgataataaaaatggttttctcaaaactggtgttaatttaagttacctgggatgtttctttgaatttgttttatagtttctgtagcatttggcaattgctgttagaaaacactagctagaaatcccctccccaccaccctttttaaggccagttaactatactacagtcaataccgtggtgagcaaaaatgtaaaaggtggaaggagaaaacttactaaaatagtatgttttcctattataagggacagacttggtattcagtatttgtcaaatattacatgtgttattcaggagatagattaatgcattaaagggatgtaagcacttttattttaataaagtgccttataacaa

SEQ ID NO: 930 - protein, 434 aa, Homo sapiens
MAASDTERDGLAPEKTSPDRDKKKEQSEVSVSPRASKHHYSRSRSRSRERKRKSDNEGRKHRSRSRSKEGRRHESKDKSSKKHKSEEHNDKEHSSDKGRERLNSSENGEDRHKRKERKSSRGRSHSRSRSRERRHRSRSRERKKSRSRSRERKKSRSRSRERKKSRSRSRERKRRIRSRSRSRSRHRHRTRSRSRTRSRSRDRKKRIEKPRRFSRSLSRTPSPPPFRGRNTAMDAQEALARRLERAKKLQEQREKEMVEKQKQQEIAAAAATGGSVLNVAALLASGTQVTPQIAMAAQMAALQAKALAETGIAVPSYYNPAAVNPMKFAEQEKKRKMLWQGKKEGDKSQSAEIWEKLNFGNKDQNVKFRKLMGIKSEDEAGCSSVDEESYKTLKQQEEVFRNLDAQYEMARSQTHTQRGMGLGFTSSMRGMDAV

SEQ ID NO: 931 - DNA, 2352 bp, Homo sapiens
agctgtgcgacgcgccgggcctcctcgcctttgtgccatccgggtctctcgcgcgagcgatttagtctgaggcgaagcttcggagcggccggtactgttgaaagcgacaagtggaggcgccgctctagcggccgggactctgaactatggcggctagtgatacagagcgagatggactagccccagaaaagacatcaccagatagagataagaaaaaagagcagtcagaagtatctgtttctcctagagcttcaaaacatcattattcaagatcacgatcaaggtcaagagaaagaaaacgaaagtcagataatgaaggaagaaaacacaggagccggagcagaagcaaagagcgtgcttatgcgcgaagagactgaactgaagacgctgcagactcagatagcaaaataataagcctacttcatgataagaaccaacttcttcttaaaacagggaagaagacatgaatccaaagataaatcctctaagaaacataagtctgaggaacataatgacaaagaacattcttctgataaaggaagagagcgactaaattcatctgaaaatggtgaggacaggcacaaacgcaaagaaagaaagtcatcaagaggcagaagtcactcaagatctaggtctcgtgaaagacgccatcgtagtagaagcagggagcggaagaagtctcgatccaggagtagggagcggaagaaatcgagatccagaagcagagagaggaagaaatcgagatccagaagcagggaaagaaaacggcggatcaggtctcgttcccgctcaagatcaagacacaggcataggactagaagcaggagtaggacaaggagtaggagtcgagatagaaagaagagaattgaaaagccgagaagatttagcagaagtttaagccggactccaagtccacctcccttcagaggcagaaacacagcaatggatgcacaggaagctttagctagaaggttggaaagggcaaagaaattacaagaacagcgagaaaaggaaatggttgaaaaacaaaaacaacaagaaatagctgcagctgcagctactggaggttctgttctcaatgttgctgccctgttggcatcaggaacacaagtaacacctcagatagccatggcagctcagatggcagccctgcaagctaaagctttggcagagacaggaatagctgttcctagctactataacccagccgctgttaatccaatgaaatttgctgaacaagagaaaaaaaggaaaatgctttggcagggcaagaaagaaggggacaaatcccaatctgctgaaatatgggaaaaattgaattttggaaacaaggaccaaaatgtcaaatttaggaaattgatgggtattaagagtgaagatgaagctggatgtagctcagttgatgaagaaagttacaagactctgaagcagcaggaagaagtatttcgaaatttagatgctcagtatgaaatggcaagatcacaaacccacacacaaagaggaatgggtttgggtttcacatcttcaatgcgaggaatggatgcagtttgaaaatgatcacacttgtaaagtttgggacttatagacttcttgttctgatgtcacgtccttgttcaccaaacagctagcactctagcttgcatgggtgttgcattgactttaatttattgaaaaatacaaatttttgtaaatatcagatcagtgatactggtgttagtgttgtaatcaggttaaacccacttccattaaacttgacaggactatagaaggataatattttttagttcatgaattctacttttcaaatatataaaagctgcaggtggggataaaatctcatacatggattttttcgtgtccgctgtcttgtgtacttttgtacttaaccttgtacagttattttcatctcttgaaacatgaaagaaatgttatgtagatgttctttagaagatctggccatttggtacataatccagcacagataagctgggtggtaatgataataaaaatggttttctcaaaactggtgttaatttaagttacctgggatgtttctttgaatttgttttatagtttctgtagcatttggcaattgctgttagaaaacactagctagaaatcccctccccaccaccctttttaaggccagttaactatactacagtcaataccgtggtgagcaaaaatgtaaaaggtggaaggagaaaacttactaaaatagtatgttttcctattataagggacagacttggtattcagtatttgtcaaatattacatgtgttattcaggagatagattaatgcattaaagggatgtaagcacttttattttaataaagtgccttataacaa

SEQ ID NO: 932 - protein, 375 aa, Homo sapiens
MIRTNFFLKQGRRHESKDKSSKKHKSEEHNDKEHSSDKGRERLNSSENGEDRHKRKERKSSRGRSHSRSRSRERRHRSRSRERKKSRSRSRERKKSRSRSRERKKSRSRSRERKRRIRSRSRSRSRHRHRTRSRSRTRSRSRDRKKRIEKPRRFSRSLSRTPSPPPFRGRNTAMDAQEALARRLERAKKLQEQREKEMVEKQKQQEIAAAAATGGSVLNVAALLASGTQVTPQIAMAAQMAALQAKALAETGIAVPSYYNPAAVNPMKFAEQEKKRKMLWQGKKEGDKSQSAEIWEKLNFGNKDQNVKFRKLMGIKSEDEAGCSSVDEESYKTLKQQEEVFRNLDAQYEMARSQTHTQRGMGLGFTSSMRGMDAV

SEQ ID NO: 933 - DNA, 2331 bp, Homo sapiens
aagctgtgcgacgcgccgggcctcctcgcctttgtgccatccgggtctctcgcgcgagcgatttagtctgaggcgaagcttcggagcggccggtactgttgaaagcgacaagtggaggcgccgctctagcggccgggactctgaactatggcggctagtgatacagagcgagatggactagccccagaaaagacatcaccagatagagataagaaaaaagagcagtcagaagtatctgtttctcctagagcttcaaaacatcattattcaagatcacgatcaaggtcaagagaaagaaaacgaaagtcagataatgaaggaagaaaacacaggagccggagcagaagcaaagagcgtgcttatgcgcgaagagactgaactgaagacgctgcagactcagatagcaaaataataagcctacttcatgataagggaagaagacatgaatccaaagataaatcctctaagaaacataagtctgaggaacataatgacaaagaacattcttctgataaaggaagagagcgactaaattcatctgaaaatggtgaggacaggcacaaacgcaaagaaagaaagtcatcaagaggcagaagtcactcaagatctaggtctcgtgaaagacgccatcgtagtagaagcagggagcggaagaagtctcgatccaggagtagggagcggaagaaatcgagatccagaagcagagagaggaagaaatcgagatccagaagcagggaaagaaaacggcggatcaggtctcgttcccgctcaagatcaagacacaggcataggactagaagcaggagtaggacaaggagtaggagtcgagatagaaagaagagaattgaaaagccgagaagatttagcagaagtttaagccggactccaagtccacctcccttcagaggcagaaacacagcaatggatgcacaggaagctttagctagaaggttggaaagggcaaagaaattacaagaacagcgagaaaaggaaatggttgaaaaacaaaaacaacaagaaatagctgcagctgcagctactggaggttctgttctcaatgttgctgccctgttggcatcaggaacacaagtaacacctcagatagccatggcagctcagatggcagccctgcaagctaaagctttggcagagacaggaatagctgttcctagctactataacccagccgctgttaatccaatgaaatttgctgaacaagagaaaaaaaggaaaatgctttggcagggcaagaaagaaggggacaaatcccaatctgctgaaatatgggaaaaattgaattttggaaacaaggaccaaaatgtcaaatttaggaaattgatgggtattaagagtgaagatgaagctggatgtagctcagttgatgaagaaagttacaagactctgaagcagcaggaagaagtatttcgaaatttagatgctcagtatgaaatggcaagatcacaaacccacacacaaagaggaatgggtttgggtttcacatcttcaatgcgaggaatggatgcagtttgaaaatgatcacacttgtaaagtttgggacttatagacttcttgttctgatgtcacgtccttgttcaccaaacagctagcactctagcttgcatgggtgttgcattgactttaatttattgaaaaatacaaatttttgtaaatatcagatcagtgatactggtgttagtgttgtaatcaggttaaacccacttccattaaacttgacaggactatagaaggataatattttttagttcatgaattctacttttcaaatatataaaagctgcaggtggggataaaatctcatacatggattttttcgtgtccgctgtcttgtgtacttttgtacttaaccttgtacagttattttcatctcttgaaacatgaaagaaatgttatgtagatgttctttagaagatctggccatttggtacataatccagcacagataagctgggtggtaatgataataaaaatggttttctcaaaactggtgttaatttaagttacctgggatgtttctttgaatttgttttatagtttctgtagcatttggcaattgctgttagaaaacactagctagaaatcccctccccaccaccctttttaaggccagttaactatactacagtcaataccgtggtgagcaaaaatgtaaaaggtggaaggagaaaacttactaaaatagtatgttttcctattataagggacagacttggtattcagtatttgtcaaatattacatgtgttattcaggagatagattaatgcattaaagggatgtaagcacttttattttaataaagtgccttataacaa

SEQ ID NO: 934 - protein, 202 aa, Homo sapiens
MDAQEALARRLERAKKLQEQREKEMVEKQKQQEIAAAAATGGSVLNVAALLASGTQVTPQIAMAAQMAALQAKALAETGIAVPSYYNPAAVNPMKFAEQEKKRKMLWQGKKEGDKSQSAEIWEKLNFGNKDQNVKFRKLMGIKSEDEAGCSSVDEESYKTLKQQEEVFRNLDAQYEMARSQTHTQRGMGLGFTSSMRGMDAV

SEQ ID NO: 935 - DNA, 6965 bp, Homo sapiens
ggcatggaacctaaagactagaggcggttgtgtgagtcaggaagaggggccagatatctgagtgttcctctttagtttcttcaattgcagataatatggtgtctaattttatgttgttcaggaaagacagtggttcctgactcaggaagacagtctcagaaacatgtggaatgatattgagctgctaacaaatgatgataccggaagtgggtacctgagtgtcggttcaagaaaagaacatggaactgctttatatcaagtagatttgctagtgaagatctcttctgaaaaggcctcattaaatccaaagatacaggcatgcagcttaagtgatgggtttattattgtagccgaccaatcagtgatattgcttgacagtatttgtagatcacttcaattgcatcttgtctttgatactgaagtggatgtagttggcctttgtcaagaaggaaagtttcttttggttggcgagagaagtggcaacctacatcttattcatgtaacatcaaaacaaacactactcactaatgcatttgttcagaaagctaacgatgaaaatcggcggacttaccagaatcttgtcattgagaaggatggttcaaatgaaggtacctattatatgctacttcttacatacagtggatttttttgtattacaaaccttcagcttttaaaaattcaacaagcaattgagaatgtagacttcagtacagcaaaaaagttacaaggacaaatcaagtccagttttatttctactgaaaattatcatactcttggttgtctcagtcttgtggctggagatttagcaagtgaagttcctgtgataattgggggaaccggtaattgtgcattctcaaaatgggaaccagattcttccaagaaaggaatgacagttaagaaccttattgatgcagagattattaaaggtgcaaagaagttccagctgatagacaatctactttttgttcttgatactgataacgtgctgagtttatgggatatttacactctaactcctgtatggaactggccctctcttcacgtagaagagtttcttcttactacagaagcagactctccttcatcagtcacgtggcaaggaattacaaatctcaaattaatagctctgacagcttcagctaataagaagatgaaaaacctcatggtttattcattacctacaatggaaatactatattctttggaagtatctagtgtttcttctctggtccaaacaggaattagcacagataccatataccttttagaaggagtttgcaaaaatgatccaaaattgtctgaagactcagtctctgtgttagtactcagatgtcttacggaagctttaccagaaaacagattgagtcggttacttcacaaacacagatttgctgaagctgagagttttgccattcagtttggactagatgttgagcttgtttacaaggtcaagtcaaatcatatattggagaaactggcattgagttctgtggatgccagtgaacagaccgaatggcaacaacttgtagacgacgctaaggaaaatctacataagatccaggatgatgaatttgtggtgaattactgcctgaaagctcagtggataacctatgaaaccactcaagagatgctgaattatgccaaaaccaggcttttgaagaaagaagataaaactgctctcatttattctgatggcttgaaagaggtgctaagagctcatgcaaaattgactactttttatggagcatttggaccagaaaaattcagtggcagttcttggattgaatttctaaataatgaagatgatcttaaagatatttttttacagctaaaagaaggaaaccttgtttgtgcacagtatctttggcttcgacatcgggcaaactttgaaagcagatttgatgtgaaaatgctggagagcttgctcaactcaatgtctgcatcagtctctttgcaaaagctgtgtccatggtttaaaaatgatgtgattccatttgtaagaaggactgtgcctgaaggacagataattcttgcaaaatggttggaacaagcagccaggaaccttgaattaactgataaggcaaattggccagaaaatggacttcaattggcagagatattttttacagcagaaaaaacagacgagttgggattggcatcttcctggcattggatttccttgaaagattatcagaacacagaggaagtatgtcagctaaggactttggtaaataacttgcgagagttgatcacgttgcataggaagtacaactgcaaattagccctctctgattttgagaaggaaaatacaaccaccatagtgttccgaatgtttgataaagtgctggccccagagcttattccctccatcttagagaagtttataagagtttacatgagagaacatgacttgcaagaggaggaacttctcttgctgtacatagaggatttactgaatagatgcagctcaaagtccacatcactctttgaaacagcatgggaagcaaaggccatggcagtaatagcgtgtttatctgacacggacctcatatttgatgccgtgctcaagatcatgtatgcggcagtggttccttggagtgcagctgtggagcaactggtgaaacagcacctggaaatggaccatcccaaagtcaagttattacaggaaagttacaaactaatggagatgaaaaaacttttacgaggctatggaataagagaggtaaatctcttaaacaaggaaataatgagagtggttagatacattctcaaacaagatgtcccatcttctttagaagatgctttaaaggtagcccaagcgtttatgttatctgatgatgagatctacagtctaagaattattgacctgattgatagagaacagggtgaagactgtctccttctgttgaagtctttgcctcctgctgaagctgagaaaactgcagaaagagtcatcatatgggcacgactggcattacaagaagagccagatcattctaaagagggcaaggcctggagaatgtctgtagcgaagacatccgtggacattcttaagatactatgtgacattcagaaagacaatctgcagaagaaggacgaatgtgaagaaatgttgaaactatttaaagaggttgctagcttacaggagaactttgaggtctttctttcatttgaagattatagcaatagttccctggtagcagatctccgtgagcagcacattaaagctcacgaagttgcacaggcgaaacacaaacctgggagcaccccagagcccatagctgctgaggtgaggagcccaagcatggaatcaaagctgcacagacaggcactggccctgcagatgtccaaacaagagctggaggcagagctgaccttgagagccttaaaagatgggaacatcaaaacagcactgaaaaaatgcagcgacttgtttaagtatcactgcaatgctgacactgggaaattgctatttctgacatgtcagaagctttgtcagatgttggctgataatgtcccagtgacagtgcctgtgggactgaatcttccttccatgatacatgatctagcaagccaagctgccaccatttgcagtccagattttttactagatgctttagaactatgtaaacatactttaatggctgtagagctttccagacaatgccaaatggatgactgtggaatcctcatgaaagcttcttttgggacacataaagatccatatgaagagtggtcttacagtgacttcttcagtgaagatggaattgttcttgagtcacagatggtgcttccagtgatttatgaactgatttcatctcttgtgcctctagctgaaagcaagagatatcccttggagtctaccagtttgccatactgctcccttaatgaaggagatggccttgttttacctgttataaattccatctctgccctgcttcagaatcttcaggaatctagccagtgggagctagccctaagatttgtggttggttcatttggtacctgtcttcagcactctgtgtcaaacttcatgaatgccactttgagtgaaaagttatttggagagactacattagttaaatcaaggcatgttgttatggaattgaaagaaaaagctgttatatttatcagggaaaatgctacaacactactgcacaaagtatttaattgtcgcttggtagatcttgacctggcgttgggttactgcactctcttacctcaaaaagatgtgtttgaaaatctctggaagctcatagataaagcatggcagaattacgacaaaatcttggcaatatctctggtgggctctgagctggcaagtctctatcaggaaatagaaatggggcttaagttccgtgaactcagtactgatgcccagtggggcattcgtcttggtaaacttggtatttcttttcaaccagttttcaggcaacattttctcaccaagaaagacctcattaaagctcttgtggagaatatagatatggacacaagcctcattttggaatattgcagcacatttcagttggactgcgatgcagttcttcagctcttcattgaaacgctgctccacaacacaaatgccggccaaggccagggagatgcaagcatggactctgcaaagcggcggcatcccaaactcctggccaaagcccttgagatggttcctttactgacgagcacaaaagatttggtcatcagtcttagtggaatactacataagttggatccttatgactatgaaatgattgaagttgtcttgaaagttatagaacgagctgatgaaaagataaccaatattaatattaatcaggcattgagtattctgaaacatttgaagtcatacagaagaatttctcctcccgtggatctagaatatcagtatatgttggaacatgtcataactttgccatcagctgcccaaactagactgccttttcacctgatattctttggcacagcacagaacttctggaaaattctctctacagaactcagtgaagaatctttcccaacattgctcttaatttcgaaattaatgaagttctctctggacactctgtacgtgtctacagcaaaacacgttttcgaaaaaaaactgaagccaaagctcctgaagttaacacaagctaaatcctcaacactgattaacaaggaaataactaagatcacgcagaccatcgaatcctgcttactctctatagtcaacccagagtgggctgtagctattgccatcagccttgcccaggatatccctgaaggttccttcaagatatctgctttgaaattctgcctttatttagctgagagatggctacagaatatcccatcgcaggacgaaaaacgtgaaaaagccgaggctttgttgaagaagcttcatatccagtaccggcgatcgggcacagaagctgtgctcatagcccacaagctgaacactgaggaatatttaagagtgatcggaaagccagcacatcttattgtcagtctctacgaacatcctagcatcaatcaaagaattcagaattcatctggcacagattatcctgatattcatgcagcagctaaagaaatagccgaagtcaatgaaattaatttggaaaaagtctgggacatgttgttggaaaaatggctatgcccttcaacaaaacctggtgaaaaaccatcagaattatttgaacttcaagaagatgaagccctacgaagagtgcagtatctcctcctgtctcgtccaattgattatagttcaagaatgctgtttgtatttgcaacatcaactacaaccacattaggtatgcatcagttaacttttgcccatagaactcgagctcttcagtgtctcttctatttggctgacaaggaaactatagaatctctctttaaaaaacccattgaagaagtgaaatcttatttgagatgtataacttttctggcatcatttgagactttgaatatccccatcacatatgaattattttgcagcagtcctaaagaaggaatgattaagggtctgtggaaaaaccacagccacgagtccatggcagtaagattggtgactgagctgtgtttagaatacaaaatctatgacctgcagctttggaatggactcttgcaaaagcttctgggcttcaatatgattccttatctaaggaaagttttaaaagccatctccagtatccattctttatggcaggttccctacttcagcaaagcgtggcagcgtgtgatacagataccactgctttcagcctcttgtcctttaagtcctgatcagctgtcagattgttctgagagtctcatcgctgtcctcgaatgtccagtctcaggtgatcttgacctgatcggagtcgccaggcagtatatccagttagaacttccggcttttgcattagcttgtctgatgctcatgccccactcagagaaaagacaccagcaaattaagaattttctgggttcctgtgaccctcaggttattttaaagcaattggaagagcatatgaacacgggccagctagcaggattttcacatcaaattagaagtctgattttgaataatatcatcaataagaaggagtttgggattttggcaaagaccaaatactttcaaatgttgaagatgcatgcgatgaataccaacaatatcactgagctagtgaactatttggcaaatgacttaagtttagatgaagcttcagtcttgataactgaatattcaaagcactgcgggaaacctgtgcctccagacactgctccctgtgaaattctgaagatgtttcttagtggattatcgtaaatcactgaacctttttttcaagaaggacaagaattttggagtctgctattaatggaccatatttattacagtttttaaattgtacaatctctgtattatagctatttgtctaacattaccccacatgtaataaataaaacaatatgagcataattgccccataaagaactca

SEQ ID NO: 936 - protein, 2209 aa, Homo sapiens
MWNDIELLTNDDTGSGYLSVGSRKEHGTALYQVDLLVKISSEKASLNPKIQACSLSDGFIIVADQSVILLDSICRSLQLHLVFDTEVDVVGLCQEGKFLLVGERSGNLHLIHVTSKQTLLTNAFVQKANDENRRTYQNLVIEKDGSNEGTYYMLLLTYSGFFCITNLQLLKIQQAIENVDFSTAKKLQGQIKSSFISTENYHTLGCLSLVAGDLASEVPVIIGGTGNCAFSKWEPDSSKKGMTVKNLIDAEIIKGAKKFQLIDNLLFVLDTDNVLSLWDIYTLTPVWNWPSLHVEEFLLTTEADSPSSVTWQGITNLKLIALTASANKKMKNLMVYSLPTMEILYSLEVSSVSSLVQTGISTDTIYLLEGVCKNDPKLSEDSVSVLVLRCLTEALPENRLSRLLHKHRFAEAESFAIQFGLDVELVYKVKSNHILEKLALSSVDASEQTEWQQLVDDAKENLHKIQDDEFVVNYCLKAQWITYETTQEMLNYAKTRLLKKEDKTALIYSDGLKEVLRAHAKLTTFYGAFGPEKFSGSSWIEFLNNEDDLKDIFLQLKEGNLVCAQYLWLRHRANFESRFDVKMLESLLNSMSASVSLQKLCPWFKNDVIPFVRRTVPEGQIILAKWLEQAARNLELTDKANWPENGLQLAEIFFTAEKTDELGLASSWHWISLKDYQNTEEVCQLRTLVNNLRELITLHRKYNCKLALSDFEKENTTTIVFRMFDKVLAPELIPSILEKFIRVYMREHDLQEEELLLLYIEDLLNRCSSKSTSLFETAWEAKAMAVIACLSDTDLIFDAVLKIMYAAVVPWSAAVEQLVKQHLEMDHPKVKLLQESYKLMEMKKLLRGYGIREVNLLNKEIMRVVRYILKQDVPSSLEDALKVAQAFMLSDDEIYSLRIIDLIDREQGEDCLLLLKSLPPAEAEKTAERVIIWARLALQEEPDHSKEGKAWRMSVAKTSVDILKILCDIQKDNLQKKDECEEMLKLFKEVASLQENFEVFLSFEDYSNSSLVADLREQHIKAHEVAQAKHKPGSTPEPIAAEVRSPSMESKLHRQALALQMSKQELEAELTLRALKDGNIKTALKKCSDLFKYHCNADTGKLLFLTCQKLCQMLADNVPVTVPVGLNLPSMIHDLASQAATICSPDFLLDALELCKHTLMAVELSRQCQMDDCGILMKASFGTHKDPYEEWSYSDFFSEDGIVLESQMVLPVIYELISSLVPLAESKRYPLESTSLPYCSLNEGDGLVLPVINSISALLQNLQESSQWELALRFVVGSFGTCLQHSVSNFMNATLSEKLFGETTLVKSRHVVMELKEKAVIFIRENATTLLHKVFNCRLVDLDLALGYCTLLPQKDVFENLWKLIDKAWQNYDKILAISLVGSELASLYQEIEMGLKFRELSTDAQWGIRLGKLGISFQPVFRQHFLTKKDLIKALVENIDMDTSLILEYCSTFQLDCDAVLQLFIETLLHNTNAGQGQGDASMDSAKRRHPKLLAKALEMVPLLTSTKDLVISLSGILHKLDPYDYEMIEVVLKVIERADEKITNININQALSILKHLKSYRRISPPVDLEYQYMLEHVITLPSAAQTRLPFHLIFFGTAQNFWKILSTELSEESFPTLLLISKLMKFSLDTLYVSTAKHVFEKKLKPKLLKLTQAKSSTLINKEITKITQTIESCLLSIVNPEWAVAIAISLAQDIPEGSFKISALKFCLYLAERWLQNIPSQDEKREKAEALLKKLHIQYRRSGTEAVLIAHKLNTEEYLRVIGKPAHLIVSLYEHPSINQRIQNSSGTDYPDIHAAAKEIAEVNEINLEKVWDMLLEKWLCPSTKPGEKPSELFELQEDEALRRVQYLLLSRPIDYSSRMLFVFATSTTTTLGMHQLTFAHRTRALQCLFYLADKETIESLFKKPIEEVKSYLRCITFLASFETLNIPITYELFCSSPKEGMIKGLWKNHSHESMAVRLVTELCLEYKIYDLQLWNGLLQKLLGFNMIPYLRKVLKAISSIHSLWQVPYFSKAWQRVIQIPLLSASCPLSPDQLSDCSESLIAVLECPVSGDLDLIGVARQYIQLELPAFALACLMLMPHSEKRHQQIKNFLGSCDPQVILKQLEEHMNTGQLAGFSHQIRSLILNNIINKKEFGILAKTKYFQMLKMHAMNTNNITELVNYLANDLSLDEASVLITEYSKHCGKPVPPDTAPCEILKMFLSGLS

SEQ ID NO: 937 - DNA, 14805 bp, Homo sapiens
gtcgatttggtcagacaacgccaccacttgttgattttctcaaggacattttgagaagatatccagaaggaggacagattcttaaggaattaattcagaatgcagaagatgctggggcgacagaagttaaatttttatatgatgaaactcaatacggaacagagactctttggtcaaaagatatggcgccatatcaggggccagctctctatgtgtacaacaacgcggttttcaccccagaggactggcacggcattcaagaaatagcaagaagcaggaaaaaggatgatcctctgaaggtcggaagatttggaattgggtttaattctgtctatcatataacagatgttccttgtatctttagtggtgaccaaatcgggatgctagatcctcatcaaacactttttggcccacatgaatcaggccaatgttggaatctcaaagatgacagcaaagaaattagtgaactttcagaccagtttgcaccatttgttggcatttttggaagcaccaaggaaacatttataaacggcaattttccaggaacatttttccgtttccctcttcgcctacaaccttcacaacttagtagtaacctctacaataagcagaaggttcttgagttgtttgagtcttttagggcagatgcagacacagtgctgctctttctgaaaagtgtgcaggatgtttccttatatgtccgagaggctgacggaacagagaaactggtgtttagagtgacttcgagtgagagtaaggcactgaaacatgagcggccgaattctataaagattctgggaactgctataagtaactattgtaaaaagactccaagcaataacatcacctgtgtaacatatcacgtaaatattgttttagaagaggagagtactaaggatgcacagaaaacatcttggttggtgtgtaacagtgtgggtgggcgagggatcagtagtaagcttgactctttagctgatgaactgaaatttgtcccaatcattggaatagccatgcctttatcaagcagagatgatgaagcaaaaggagcaacgtctgatttctcaggaaaagcattttgtttccttcctttaccacctggtgaggaaagcagcacaggcctcccagttcacatcagtgggttctttggccttactgataaccgcaggagcataaaatggagagagctggaccagtggagagacccggcagccttatggaatgagtttcttgtcatgaatgttgtccccaaagcttatgctactctgatcttagattcaataaaacgtctggagatggaaaagagctctgatttccccttgtcagttgatgttatctataagctttggccggaggcgagcaaagtcaaggtgcactggcaaccggtgttagagcctctattcagcgagctgttgcagaatgcagtgatttattcaattagctgtgactgggtcaggttggagcaggtgtacttctcagaacttgatgaaaatttagaatacacaaaaactgtgctcaactacctccagagctcagggaagcagattgccaaggtaccagggaatgtggatgctgctgttcagctcacagctgcctctggcacaacacctgtgaggaaggtgacgcccgcgtgggtgcggcaggtgctgcggaagtgtgcacacctgggctgtgctgaagaaaagcttcaccttctagaatttgtgctttctgaccaagcctacagtgagctgcttgggctggagctgctccctttacaaaatggcaattttgtccccttctcctcatctgtatcagaccaagatgtcatttatattacctcagcagaatatccaaggtcccttttcccaagtcttgaaggaagatttattttggataacttgaaacctcaccttgtggctgctttaaaggaagctgcccaaacccgaggaagaccatgtactcagctgcagcttctaaatccagaacgatttgcacgtcttatcaaggaagtaatgaatacattctggcctggcagagaattgattgttcaatggtatccatttgatgaaaacagaaatcacccatctgtttcatggcttaagatggtttggaaaaatctttatatacatttttcagaggatttgactttatttgatgagatgccacttatccccagaactatactagaggaaggtcagacatgtgtggaactcattagactcaggattccatcgttagtcattttagacgatgaatctgaagcacagcttccagaatttttagcagacattgtacaaaaacttggagggtttgtccttaaaaaattagatgcatctatacaacatccgcttattaaaaaatatattcattcaccattaccaagtgctgttttgcagataatggagaagatgccattgcagaaattgtgtaatcaaataacttcgctacttccaacacacaaagatgccctgaggaagttcttggctagtttaaccgatagcagtgagaaagagaaaagaattattcaagaattggcaatattcaagcgcattaaccattcttctgatcagggaatttcctcttatacaaaattgaaaggttgtaaagtcttacaccatactgccaaactcccagcagatctgcgactttctatttcagtaatagacagtagtgatgaagctactattcgtctggcaaacatgttgaaaatagaacagttaaagaccactagctgcttaaagcttgttttaaaagatattgaaaatgcattttattcacatgaagaggtaacacagcttatgttatgggtccttgagaatctatcttctcttaaaaatgagaatccaaatgtgcttgagtggttaacaccattaaaattcatccagatatcacaggaacagatggtatcagctggtgaactctttgaccctgatatagaagtactaaaggatctcttttgtaatgaagaaggaacctatttcccaccctcagtttttacctcaccagatattcttcactccttaagacagattggtttaaaaaacgaagccagtctcaaagaaaaggatgttgtgcaagtggcaaaaaaaattgaagccttacaggtcggtgcttgtcctgatcaagatgttcttctgaagaaagccaaaaccctcttactggttttaaataagaatcacacactgttgcaatcatctgaaggaaagatgacattgaagaaaataaaatgggttccagcctgcaaggaaaggcctccaaattatccaggctctttggtctggaaaggagatctctgtaatctctgtgcaccaccagatatgtgtgatgtaggccatgcaattctcattggctcctcacttcctcttgttgaaagtatccatgtaaacctggaaaaagcattagggatcttcacaaaacctagccttagtgctgtcttaaaacactttaaaattgttgttgattggtattcttcaaaaacctttagtgatgaagactactatcaattccagcatattttgcttgagatttacggattcatgcatgatcatctaaatgaagggaaagattcttttagagccttaaaatttccatgggtttggactggcaaaaagttttgtccacttgcccaggctgtgattaaaccaatccatgatcttgaccttcagccttatttgcataatgtacctaaaaccatggcaaaattccaccaactatttaaggtctgtggttcaatagaggagttgacatcagatcatatttccatggttattcagaagatatatctcaaaagtgaccaagatctcagtgaacaagaaagcaaacaaaatcttcatcttatgttgaatattatcagatggctgtatagcaatcagattccagcaagccccaacacaccagttcctatacatcatagcaaaaatccttctaaacttatcatgaagccaattcacgaatgctgttattgtgacattaaagttgatgaccttaatgacttacttgaagattctgtggaaccaatcattttggtgcatgaggacatacccatgaaaactgcagaatggctaaaagttccatgccttagtacaagactgataaatcctgaaaacatgggatttgagcagtcaggacaaagagagccacttactgtaagaattaaaaatattctggaagaatacccttcagtgtcagatatttttaaagaactacttcaaaacgctgatgatgcaaatgcaacagaatgcagtttcttgattgatatgagaagaaatatggacataagagagaatctcctagacccagggatggcagcttgtcatggacctgctttgtggtcattcaacaattctcaattctcagattcagattttgtgaacataactaggttaggagaatctttaaaaaggggagaagttgacaaagttggaaaatttggtcttggatttaattctgtgtaccatatcactgacattcccatcattatgagtcgggaattcatgataatgttcgatccaaacataaatcatatcagtaaacacattaaagacaaatccaatcctgggatcaaaattaattggagtaaacaacagaaaagacttagaaaatttcctaatcagttcaaaccatttatagatgtatttggctgtcagttacctttgactgtagaagcaccttacagctataatggaacccttttccgactgtcctttagaactcaacaggaagcaaaagtgagtgaagttagtagtacgtgctacaatacagcagatatttattctcttgtggatgaatttagtctctgtggacacaggcttatcattttcactcagagtgtaaagtcaatgtatttgaagtacttgaaaattgaggaaaccaaccccagtttagcacaagatacagtaataattaaaaaaaaatcctgctcttccaaagcattgaacacacctgtcttaagtgttttaaaagaggctgctaagctcatgaagacttgcagcagcagtaataaaaagcttcccagtgatgaaccaaagtcatcttgcattcttcagatcacagtggaagaatttcaccatgtgttcagaaggattgctgatttacagtcgccactttttagaggtccagatgatgacccagctgctctctttgaaatggctaagtctggccaatcaaaaaagccatcagatgagttgtcacagaaaacagtagagtgtaccacgtggcttctgtgtacttgcatggacacaggagaggctctgaagttttccctgagtgagagtggaagaagactaggactggttccatgtggggcagtaggagttcagctgtcagaaatccaggaccagaagtggacagtgaaaccacacattggagaggtgttttgctatttacctttacgaataaaaacaggcttgccagttcatatcaatgggtgctttgctgttacatcaaataggaaagaaatctggaaaacagatacaaaaggacgatggaataccacgttcatgagacatgttattgtgaaagcttacttacaggtactgagtgtcttacgggacctggccactagtggggagctaatggattatacttactatgcagtatggcccgatcctgatttagttcatgatgatttttctgtaatttgccaaggattttatgaagatatagctcatggaaaagggaaagaactgaccaaagtcttctctgatggatctacttgggtttccatgaagaacgtaagatttctagatgactctatacttaaaagaagagatgttggttcagcagccttcaagatatttttgaaatacctcaagaagactgggtccaaaaacctttgtgctgttgaacttccttcttcggtaaaattaggatttgaagaagctggctgcaaacagatactacttgaaaacacattttcagagaaacagtttttttctgaagtgttttttccaaatattcaagaaattgaagcagaacttagagatcctttaatgatctttgttctaaatgaaaaagttgatgagttctcgggagttcttcgtgttactccatgtattccttgttccttggaggggcatcctttggttttgccatcaagattgatccaccccgaaggacgagttgcaaagttatttgatattaaagatgggagattcccttatggttctactcaggattatctcaatcctattattttgattaaactagttcagttaggtatggcaaaagatgatattttatgggatgatatgctagaacgtgcagtgtcagtagctgaaattaataaaagtgatcatgttgctgcatgcctaagaagtagtatcttattgagtcttatcgatgagaaactaaaaataagggatcctagagcaaaggattttgctgcaaaatatcaaacaatccgcttccttccatttctgacaaaaccagcaggtttttctttggactggaaaggcaacagttttaagcctgaaaccatgtttgcagcaactgacctttatacagctgaacatcaagatatagtttgtcttttgcaaccaattctaaatgaaaattcccattcttttagaggttgtggttcagtgtcattggctgttaaagagtttttgggattactcaagaagccaacagttgatctggttataaaccaattgaaagaagtagcaaaatcagttgatgatggaattacactgtaccaggagaatatcaccaatgcttgctacaaataccttcatgaagccttgatgcaaaatgaaatcactaagatgtcaattattgataagttaaaaccctttagcttcattctagttgagaatgcatatgttgactcagaaaaggtttcttttcatttaaattttgaggcggcaccatacctttatcagttgcctaataagtataaaaataatttccgcgaactttttgaaaccgtgggtgtgaggcagtcatgcactgttgaagattttgctcttgttttggaatctattgatcaagaaagaggaacaaagcaaataacagaagagaattttcagctttgccgacgaataatcagtgaaggaatatggagtctcattagagaaaagaaacaagaattttgtgagaaaaattatggcaagatattattgccagatactaatcttatgcttctccctgctaaatcgttatgctacaatgattgcccttggataaaagtaaaggataccactgtaaaatattgtcatgctgacatacccagggaagtagcagtaaaactaggagcagtcccaaagcgacacaaagccttagaaagatatgcatccaatgtctgttttacaacacttggcacagaatttgggcagaaagaaaaattgaccagcagaattaagagcatccttaatgcatatccttctgaaaaggaaatgttgaaagagcttcttcaaaatgctgatgatgcaaaggcgacagaaatctgttttgtgtttgatcctagacagcatccagttgatagaatatttgatgataagtgggccccattgcaagggccagcactttgtgtgtacaacaaccagccatttacagaagatgatgttagaggaattcagaatcttggaaaaggcacgaaagagggaaatccttataaaactggacagtatggaataggattcaattctgtgtatcatatcacagactgcccatcttttatttctggcaatgacatcctgtgtatttttgatcctcatgccagatatgcaccaggggccacatccattagtcccggacgcatgtttagagatttggatgcagattttaggacacagttctcagatgttctggatctttatctgggaacccattttaaactggataattgcacaatgttcagatttcctcttcgtaatgcagaaatggcaaaagtttcggaaatttcgtctgttccagcatcagacagaatggtccagaatcttttggacaaactgcgctcagatggggcagaacttctaatgtttcttaatcacatggaaaaaatttctatttgtgaaatagataagagtactggagctctaaatgtgctgtattcagtaaagggcaaaatcacagatggagacagattgaaaaggaaacaatttcatgcatctgtaattgatagtgttactaaaaagaggcagctcaaagacataccagttcaacaaataacctatactatggatactgaggactctgaaggaaatcttactacgtggctaatttgtaatagatcaggcttttcaagtatggagaaagtatctaaaagtgtcatatcagctcacaagaaccaagatattactcttttcccacgtggtggagtagctgcctgcattactcacaactataaaaaaccccatagggccttctgttttttgcctctttctttggagactgggctgccatttcatgtgaatggccactttgcactggattcagccagaaggaacctgtggcgtgatgataatggagttggtgttcgaagtgactggaataacagtttaatgacagcattaatagctcctgcatatgttgaattgctaatacagttaaaaaaacggtatttccctggttctgatccaacattatcagtgttacagaacacccctattcatgttgtaaaggacactttaaagaagtttttatcgtttttcccagttaaccgtcttgatctacagccagatttatattgtctagtgaaagcactttacaattgcattcacgaagacatgaaacgtcttttacctgttgtgcgggctccaaatattgatggctctgacttgcactctgcagttataattacttggatcaatatgtctacttctaataaaactagaccattttttgacaatttactacaggatgaattacaacaccttaaaaatgcagattataatatcaccacacgcaaaacagtagcagagaatgtctataggctgaaacatctccttttagaaattggtttcaacttggtttataactgtgatgaaactgctaatctttaccactgtcttatagatgcagatattcctgttagttatgtgacccctgctgatatcagatcttttttaatgacattttcctctcctgacactaattgccatattgggaagctgccttgtcgtctgcagcagactaatctaaaactttttcatagtttaaaacttttagttgattattgttttaaagatgcagaagaaaatgagattgaagttgagggattgccccttctcatcacactggacagtgttttgcaaacttttgatgcaaaacgacccaagtttctaacaacatatcatgaattgattccatcccgcaaagacttgtttatgaatacattatatttgaaatatagtaatattttattgaactgtaaagttgcaaaagtgtttgacatttccagctttgctgatttgttatcctctgtgttgcctcgagaatataagaccaaaagttgcacaaagtggaaagacaattttgcaagtgagtcttggcttaagaatgcatggcattttattagtgaatctgtaagtgtgaaagaagatcaggaagaaacaaaaccaacatttgacattgttgttgatactctaaaagactgggcattgcttccaggaacaaagtttactgtttcagccaaccagcttgtggttcctgaaggagatgttctgcttcctctcagccttatgcacattgcagtttttccaaatgcccagagtgataaagtttttcatgctctaatgaaagccggctgtattcagcttgctttgaacaaaatctgttccaaagacagtgcatttgttcctttgttgtcatgtcacacagcaaatatagagagccccacaagcatcttgaaggctctacattatatggtccaaacttcaacatttagagcagaaaaattagtagaaaatgattttgaggcacttttgatgtatttcaactgcaatttgaatcatttgatgtcccaagatgatataaaaattctaaagtcacttccgtgctataaatccatcagtggccgctatgtaagcattggaaaatttggaacatgctacgtacttacaaaaagtatcccttcagctgaagtggagaaatggacacaatcatcatcatctgcatttcttgaagaaaaaatacacttaaaagaactatatgaggtgattggttgtgtacctgtagatgatcttgaggtatatttgaaacacctcttaccaaaaattgaaaatctctcttatgatgcaaaattagagcacttgatctaccttaagaatagattatcaagtgctgaggaattatcagagattaaggaacaactttttgaaaaactggaaagtttattgataatccatgatgctaacagtagactaaagcaagcaaagcatttctatgatagaactgtgagagtttttgaagttatgcttcctgaaaaattgtttattcctaatgatttctttaagaaattggaacaacttataaaacccaaaaatcatgttacatttatgacatcctgggtggaattcttaagaaatattggactaaaatacatactttctcagcagcagttgttacagtttgctaaggaaatcagtgtgagggctaatacagaaaactggtccaaagaaacattgcaaaatacagttgatatccttctgcatcatatattccaagaacgaatggatttgttatctggaaattttctgaaagaactatctttaataccattcttatgtcctgagcgggcccccgcggaattcattagatttcatcctcaatatcaagaggtaaatggaacacttcctcttataaagttcaatggagcacaggtaaatccaaaattcaagcaatgtgatgtactccagctgttatggacatcctgccctattcttccagagaaagctacacccttaagcattaaagaacaagaaggtagtgaccttggtccacaagaacagcttgaacaagttttaaatatgcttaatgttaacctggatcctcctcttgataaggtaatcaataactgcagaaacatatgcaacataacgacgttggatgaagaaatggtaaaaactagagcaaaagtcttaaggagcatatatgaattcctcagtgcagaaaaaagggaatttcgttttcagttgcgaggggttgcttttgtgatggtagaagatggttggaaacttctgaagcctgaggaggtagtcataaacctagaatatgaatctgattttaaaccttatttgtacaagctacctttagaacttggcacatttcaccagttgttcaaacacttaggtactgaagatattatttcaactaagcaatatgttgaagtgttgagccgcatatttaaaaattctgagggcaaacaattagatcctaatgaaatgcgtacagttaagagagtagtttctggtctgttcaggagtctacagaatgattcagtcaaggtgaggagtgatctcgagaatgtacgagaccttgcgctttacctcccaagccaggatggtagattggtaaagtcaagcatcttagtgtttgacgatgcgccacattataaaagtagaatccaggggaatattggtgtgcaaatgttagttgatctcagccagtgctacttagggaaagaccatggatttcacactaagttgataatgctctttcctcaaaaacttagacctcgattattgagcagtatacttgaagaacaattagatgaagagactcccaaagtttgtcagtttggagcgttgtgttctcttcaaggaagattgcagttactcttgtcttctgaacagttcattacaggactgattagaattatgaagcatgaaaatgataatgcttttctggccaatgaagaaaaagccataagactttgcaaagccctaagagaaggattgaaagtatcctgctttgaaaagcttcaaacaacattaagagttaaaggttttaatcctattccccacagcagaagtgaaacttttgcttttttgaagcgatttggtaatgcagtcatcttgctctacattcaacattcagacagtaaagacattaatttcctgttagcactggcaatgactcttaaatcagcaactgacaatttgatttctgacacttcatatttaattgctatgctaggatgcaatgatatttacaggattggtgagaaacttgacagtttaggagtgaaatatgactcttcggagccatcaaaactggaacttccaatgcctggcacaccaattcctgctgaaattcattacactctgcttatggacccaatgaatgttttttacccgggagaatatgttgggtaccttgttgatgctgaaggtggtgatatctatggatcataccagccaacatacacatatgcaattattgtacaagaagttgaaagagaagatgctgacaattctagttttctaggaaagatatatcagatagatattggttatagtgaatataaaatagttagctctcttgatctgtataagttttcaagacctgaggaaagctctcaaagcagggacagtgctccttctacaccaaccagccccactgagttcctcacccctggcctgagaagcattcctcctcttttctctggtagagagagccacaagacttcttccaaacatcagtcccccaaaaagcttaaggttaattctttaccagaaatcttaaaagaagtgacatctgtggtggagcaagcatggaagcttccagaatcggaacgaaaaaagattattaggcggttgtatttgaaatggcatcctgacaaaaatccagagaaccatgacattgccaatgaagtttttaaacatttgcagaatgaaatcaacagattagaaaaacaggcttttctagatcaaaatgcagacagggcctccagacgaacattttcaacctcagcatcccgatttcagtcagacaaatactcatttcagagattctatacttcatggaatcaagaagcaacgagccataaatctgaaagacagcaacagaacaaagaaaaatgccccccttcagccggacagacttactctcaaaggttctttgttcctcccactttcaagtcggttggcaatccagtggaagcacgcagatggctaagacaagccagagcaaacttctcagctgccaggaatgaccttcataaaaatgccaatgagtgggtgtgctttaaatgttacctttctaccaagttagctttgattgcagctgactatgctgtgaggggaaagtctgataaagatgtaaaaccaactgcacttgctcagaaaatagaggaatatagtcagcaacttgaaggactgacaaatgatgttcacacattggaagcttatggtgtagacagtttaaaaacaagataccctgatttgcttccctttcctcagatcccaaatgacaggttcacttctgaggttgctatgagggtgatggaatgtactgcctgtatcataataaaacttgaaaattttatgcaacaaaaagtgtgaagatatttaacgaaaaaaaaggtagatcttgaatgtgttgtagcacgaataaattgctgtacttcattaagcttcattgccaattagctaggaattgttaagcacattgcagattgttcttggagaattctggagttgttatgaacatgaataccaacggaaaaccttaactgaatctaaaagaaaactattttgaagatggtggtgagctgcaaaatagctggatggatttgaatgattgggatgatacatcattgaactgcactttatataaccaaagcttagcagtttgttagataagagtctatgtatgtctctggttaggatgaagttaattttatgtttttaacatggtatttttgaaggagctaatgaaacactggacatataattggtttaaacataaggggaattaagtctttgtagtctgtcatttttttaagtggatcctcttggatgcgttattttctcatcagctggctctgatcatgaatttgttgtaattttatgttgtactcagtgcatttaagaaatggtagagtattttaatcctattacttgactaagagtgtgaaggtagtactttttagagtgcactgagtgcactttacatctttatttaaatttttttttaacatcttatgtttacaggcttcctgtttgatgaagatagcaacggaaaactcaaaatggtggcagttcttattaccagttgttagtattgtttctggaaactgcttgccaagacaacatttattaactgttagaacacttgctttatgtttgtgtgtacatattttccacaaatgttataatttatatagtgtggttgaacaggatgcaatcttttgttgtctaaaggtgctgcagttaaaaaaaaaacaaccttttctttcaatatggcatgtagtggagtttttttaactttaaaaacatcaaaaattgttaaaatcattgtgttatctagtagtttataattatcggcttatatttccccatgaatgatcagaactgacatttaattcatgtttgtctcgccatgcttctttactttaacatatttcttttgcagaatgtaaaaggtaatgataattagtttatataagtgtactggctgtaaatgatgctaaatatactttatgcaattaagggcttacagaacatgttgaaactttttttacttttattgggaataaggaatgtttgcacctccacattttattgcttctggatgtgaaatcatgtaattatttctgctgttatataaagtgccatacttttaataaaggaaaatgtacatatgaaatcaaaaaaaaaaaaaaaa

SEQ ID NO: 938 - protein, 4432 aa, Homo sapiens
MAPYQGPALYVYNNAVFTPEDWHGIQEIARSRKKDDPLKVGRFGIGFNSVYHITDVPCIFSGDQIGMLDPHQTLFGPHESGQCWNLKDDSKEISELSDQFAPFVGIFGSTKETFINGNFPGTFFRFPLRLQPSQLSSNLYNKQKVLELFESFRADADTVLLFLKSVQDVSLYVREADGTEKLVFRVTSSESKALKHERPNSIKILGTAISNYCKKTPSNNITCVTYHVNIVLEEESTKDAQKTSWLVCNSVGGRGISSKLDSLADELKFVPIIGIAMPLSSRDDEAKGATSDFSGKAFCFLPLPPGEESSTGLPVHISGFFGLTDNRRSIKWRELDQWRDPAALWNEFLVMNVVPKAYATLILDSIKRLEMEKSSDFPLSVDVIYKLWPEASKVKVHWQPVLEPLFSELLQNAVIYSISCDWVRLEQVYFSELDENLEYTKTVLNYLQSSGKQIAKVPGNVDAAVQLTAASGTTPVRKVTPAWVRQVLRKCAHLGCAEEKLHLLEFVLSDQAYSELLGLELLPLQNGNFVPFSSSVSDQDVIYITSAEYPRSLFPSLEGRFILDNLKPHLVAALKEAAQTRGRPCTQLQLLNPERFARLIKEVMNTFWPGRELIVQWYPFDENRNHPSVSWLKMVWKNLYIHFSEDLTLFDEMPLIPRTILEEGQTCVELIRLRIPSLVILDDESEAQLPEFLADIVQKLGGFVLKKLDASIQHPLIKKYIHSPLPSAVLQIMEKMPLQKLCNQITSLLPTHKDALRKFLASLTDSSEKEKRIIQELAIFKRINHSSDQGISSYTKLKGCKVLHHTAKLPADLRLSISVIDSSDEATIRLANMLKIEQLKTTSCLKLVLKDIENAFYSHEEVTQLMLWVLENLSSLKNENPNVLEWLTPLKFIQISQEQMVSAGELFDPDIEVLKDLFCNEEGTYFPPSVFTSPDILHSLRQIGLKNEASLKEKDVVQVAKKIEALQVGACPDQDVLLKKAKTLLLVLNKNHTLLQSSEGKMTLKKIKWVPACKERPPNYPGSLVWKGDLCNLCAPPDMCDVGHAILIGSSLPLVESIHVNLEKALGIFTKPSLSAVLKHFKIVVDWYSSKTFSDEDYYQFQHILLEIYGFMHDHLNEGKDSFRALKFPWVWTGKKFCPLAQAVIKPIHDLDLQPYLHNVPKTMAKFHQLFKVCGSIEELTSDHISMVIQKIYLKSDQDLSEQESKQNLHLMLNIIRWLYSNQIPASPNTPVPIHHSKNPSKLIMKPIHECCYCDIKVDDLNDLLEDSVEPIILVHEDIPMKTAEWLKVPCLSTRLINPENMGFEQSGQREPLTVRIKNILEEYPSVSDIFKELLQNADDANATECSFLIDMRRNMDIRENLLDPGMAACHGPALWSFNNSQFSDSDFVNITRLGESLKRGEVDKVGKFGLGFNSVYHITDIPIIMSREFMIMFDPNINHISKHIKDKSNPGIKINWSKQQKRLRKFPNQFKPFIDVFGCQLPLTVEAPYSYNGTLFRLSFRTQQEAKVSEVSSTCYNTADIYSLVDEFSLCGHRLIIFTQSVKSMYLKYLKIEETNPSLAQDTVIIKKKSCSSKALNTPVLSVLKEAAKLMKTCSSSNKKLPSDEPKSSCILQITVEEFHHVFRRIADLQSPLFRGPDDDPAALFEMAKSGQSKKPSDELSQKTVECTTWLLCTCMDTGEALKFSLSESGRRLGLVPCGAVGVQLSEIQDQKWTVKPHIGEVFCYLPLRIKTGLPVHINGCFAVTSNRKEIWKTDTKGRWNTTFMRHVIVKAYLQVLSVLRDLATSGELMDYTYYAVWPDPDLVHDDFSVICQGFYEDIAHGKGKELTKVFSDGSTWVSMKNVRFLDDSILKRRDVGSAAFKIFLKYLKKTGSKNLCAVELPSSVKLGFEEAGCKQILLENTFSEKQFFSEVFFPNIQEIEAELRDPLMIFVLNEKVDEFSGVLRVTPCIPCSLEGHPLVLPSRLIHPEGRVAKLFDIKDGRFPYGSTQDYLNPIILIKLVQLGMAKDDILWDDMLERAVSVAEINKSDHVAACLRSSILLSLIDEKLKIRDPRAKDFAAKYQTIRFLPFLTKPAGFSLDWKGNSFKPETMFAATDLYTAEHQDIVCLLQPILNENSHSFRGCGSVSLAVKEFLGLLKKPTVDLVINQLKEVAKSVDDGITLYQENITNACYKYLHEALMQNEITKMSIIDKLKPFSFILVENAYVDSEKVSFHLNFEAAPYLYQLPNKYKNNFRELFETVGVRQSCTVEDFALVLESIDQERGTKQITEENFQLCRRIISEGIWSLIREKKQEFCEKNYGKILLPDTNLMLLPAKSLCYNDCPWIKVKDTTVKYCHADIPREVAVKLGAVPKRHKALERYASNVCFTTLGTEFGQKEKLTSRIKSILNAYPSEKEMLKELLQNADDAKATEICFVFDPRQHPVDRIFDDKWAPLQGPALCVYNNQPFTEDDVRGIQNLGKGTKEGNPYKTGQYGIGFNSVYHITDCPSFISGNDILCIFDPHARYAPGATSISPGRMFRDLDADFRTQFSDVLDLYLGTHFKLDNCTMFRFPLRNAEMAKVSEISSVPASDRMVQNLLDKLRSDGAELLMFLNHMEKISICEIDKSTGALNVLYSVKGKITDGDRLKRKQFHASVIDSVTKKRQLKDIPVQQITYTMDTEDSEGNLTTWLICNRSGFSSMEKVSKSVISAHKNQDITLFPRGGVAACITHNYKKPHRAFCFLPLSLETGLPFHVNGHFALDSARRNLWRDDNGVGVRSDWNNSLMTALIAPAYVELLIQLKKRYFPGSDPTLSVLQNTPIHVVKDTLKKFLSFFPVNRLDLQPDLYCLVKALYNCIHEDMKRLLPVVRAPNIDGSDLHSAVIITWINMSTSNKTRPFFDNLLQDELQHLKNADYNITTRKTVAENVYRLKHLLLEIGFNLVYNCDETANLYHCLIDADIPVSYVTPADIRSFLMTFSSPDTNCHIGKLPCRLQQTNLKLFHSLKLLVDYCFKDAEENEIEVEGLPLLITLDSVLQTFDAKRPKFLTTYHELIPSRKDLFMNTLYLKYSNILLNCKVAKVFDISSFADLLSSVLPREYKTKSCTKWKDNFASESWLKNAWHFISESVSVKEDQEETKPTFDIVVDTLKDWALLPGTKFTVSANQLVVPEGDVLLPLSLMHIAVFPNAQSDKVFHALMKAGCIQLALNKICSKDSAFVPLLSCHTANIESPTSILKALHYMVQTSTFRAEKLVENDFEALLMYFNCNLNHLMSQDDIKILKSLPCYKSISGRYVSIGKFGTCYVLTKSIPSAEVEKWTQSSSSAFLEEKIHLKELYEVIGCVPVDDLEVYLKHLLPKIENLSYDAKLEHLIYLKNRLSSAEELSEIKEQLFEKLESLLIIHDANSRLKQAKHFYDRTVRVFEVMLPEKLFIPNDFFKKLEQLIKPKNHVTFMTSWVEFLRNIGLKYILSQQQLLQFAKEISVRANTENWSKETLQNTVDILLHHIFQERMDLLSGNFLKELSLIPFLCPERAPAEFIRFHPQYQEVNGTLPLIKFNGAQVNPKFKQCDVLQLLWTSCPILPEKATPLSIKEQEGSDLGPQEQLEQVLNMLNVNLDPPLDKVINNCRNICNITTLDEEMVKTRAKVLRSIYEFLSAEKREFRFQLRGVAFVMVEDGWKLLKPEEVVINLEYESDFKPYLYKLPLELGTFHQLFKHLGTEDIISTKQYVEVLSRIFKNSEGKQLDPNEMRTVKRVVSGLFRSLQNDSVKVRSDLENVRDLALYLPSQDGRLVKSSILVFDDAPHYKSRIQGNIGVQMLVDLSQCYLGKDHGFHTKLIMLFPQKLRPRLLSSILEEQLDEETPKVCQFGALCSLQGRLQLLLSSEQFITGLIRIMKHENDNAFLANEEKAIRLCKALREGLKVSCFEKLQTTLRVKGFNPIPHSRSETFAFLKRFGNAVILLYIQHSDSKDINFLLALAMTLKSATDNLISDTSYLIAMLGCNDIYRIGEKLDSLGVKYDSSEPSKLELPMPGTPIPAEIHYTLLMDPMNVFYPGEYVGYLVDAEGGDIYGSYQPTYTYAIIVQEVEREDADNSSFLGKIYQIDIGYSEYKIVSSLDLYKFSRPEESSQSRDSAPSTPTSPTEFLTPGLRSIPPLFSGRESHKTSSKHQSPKKLKVNSLPEILKEVTSVVEQAWKLPESERKKIIRRLYLKWHPDKNPENHDIANEVFKHLQNEINRLEKQAFLDQNADRASRRTFSTSASRFQSDKYSFQRFYTSWNQEATSHKSERQQQNKEKCPPSAGQTYSQRFFVPPTFKSVGNPVEARRWLRQARANFSAARNDLHKNANEWVCFKCYLSTKLALIAADYAVRGKSDKDVKPTALAQKIEEYSQQLEGLTNDVHTLEAYGVDSLKTRYPDLLPFPQIPNDRFTSEVAMRVMECTACIIIKLENFMQQKV

SEQ ID NO: 939 - DNA, 1408 bp, Homo sapiens
cgggaacgccgctcttcgcctctcagcggcggcttgtcctttgttccggacgcccgctcctcagccctgcgtcctggggtcgctgctgcatcccgcacgcctccaccggctgcagacccatggccgagcgcggggaactcgacttgaccggcgccaaacagaacacaggagtgtggctagtcaaggttcctaaatatttgtcacagcaatgggctaaagcctctggaagaggtgaagttgggaaactgcggattgccaagactcaaggaaggactgaggtgtcatttactttgaatgaggatcttgcaaatattcatgatattggtggaaaaccagcttcagtcagtgctcctagagaacatccatttgtcttgcaaagtgttggaggacagacattaacagtatttactgagagctcatcagataagctgtcattggaaggaatagtggtacaaagagctgaatgccgaccagctgccagtgaaaactacatgcgattaaaaagattgcaaatagaagagtcttccaaaccagtgaggctatcacaacagctggacaaagttgtaacaaccaattacaaacctgttgctaatcatcaatacaatatcgaatatgaaaggaaaaagaaagaagacggaaagcgagctcgagctgataaacaacatgttttagacatgctattttcagcctttgagaaacatcaatactataatcttaaggacttggtggacatcacaaaacaacctgtggtgtacctgaaggaaatcttaaaagaaattggtgttcagaatgtaaaagggatccacaaaaacacatgggagctgaagccagagtacagacactatcaaggagaagaaaagagtgactaagaagactcctagccagcatgctagtgaaaggctagcagcgatgctatgcaaaaggcgctgatactggaaggcttgaacaccgtatgtttaataggggttaagtgacagtactttgatttctctcggtaaattttttaaacctgtaaggcttgtaaagtttcttaactgtttttttgaggagaaagaacagatttatttatagacttaacttgtattaaaccagattattcacagtaggaataggggttggaggattaagagggtttttcttaaatattagcttttaatgtgtacaattaggaaatttttttaagtgaggactctctacccttgccgtatctaaggagctgaggtaatacagatccaaggagaattgtatagcaagaaaaaaacagtcaactacagaaactcttaaaaggaataaaaacccaaagttccttattttgaaattgtcaaagaacaaacggtgtttttcttttaaacaggtgatcacgtttcttttcatactcaacgttaataaaaggagagagtttgtagtg

SEQ ID NO: 940 - protein, 249 aa, Homo sapiens
MAERGELDLTGAKQNTGVWLVKVPKYLSQQWAKASGRGEVGKLRIAKTQGRTEVSFTLNEDLANIHDIGGKPASVSAPREHPFVLQSVGGQTLTVFTESSSDKLSLEGIVVQRAECRPAASENYMRLKRLQIEESSKPVRLSQQLDKVVTTNYKPVANHQYNIEYERKKKEDGKRARADKQHVLDMLFSAFEKHQYYNLKDLVDITKQPVVYLKEILKEIGVQNVKGIHKNTWELKPEYRHYQGEEKSD

SEQ ID NO: 941 - DNA, 2133 bp, Homo sapiens
tttccacaagaccttctggatccagctgaatgtggaggcctttaagagaacttccagctcctgtaaaaacccagaccagaggactactgaccaacatttcaggctgatcctccagacctcgaagttactctccttactctcctgactcttaattacatcacacctgtgtcgacactctctgggaaaagactgaagaaataatcttttcaagaagcagaaagctcctgcatacataggctgatacgccacctactgcaaaaccgagctgacagcgcaggcgatgctgccagcgtttccattccatcaccaggctggggctgaataaaggcgtgcttgtgtggtagtgtctctttttaaaaaatctcaaagccaagaagaacaagctgaaatagcatcttcaaaaaatggagcgtaaaataaacagaagagaaaaagaaaaggagtatgaagggaaacacaacagcctggaagatactgatcaaggaaagaactgcaaatccacactgatgaccctcaacgttggtggatatttatacattactcaaaaacaaacactgaccaagtacccagacactttccttgaaggtatagtaaatggaaaaatcctctgcccgtttgatgctgatggtcattatttcatagacagggatggtctcctcttcaggcatgtcctaaacttcctacgaaatggagaacttctattgcccgaagggtttcgagaaaatcaacttcttgcacaagaagcagaattctttcagctcaagggactggcagaggaagtgaaatccaggtgggagaaagaacagctaacacccagagagactactttcttggaaataacagataaccacgatcgttcacaaggattaagaatcttctgtaatgctcctgatttcatatcaaaaataaagtctcgcattgttctggtgtccaaaagcaggctggatggatttccagaggagttttcaatatcgtcaaatatcatccaatttaaatacttcataaagtctgaaaatggcactcgacttgtactaaaggaagacaacacctttgtctgtaccttggaaactcttaagtttgaggctatcatgatggctttaaagtgtggctttagactgctgaccagcctggattgttccaaagggtcaattgttcacagcgatgcacttcattttatcaagtaattacctgtgtcacgaacaaaggcaacaagcatgcagccagcaagcttcggaaaaccacagcatcaaagacatcccaaataacatgcccagctagctctgtactacagagccctgctactaatcaattactgtgagctaacggtatgtaaattctatcgctaaagatgtccttcctctggggtgttcctactgatcagactcttccacctaaaatgaaaacagtaaccttctatatactgtaaataaagactgaaagcttttgctatttatttgtccttaagctgtctttcaattcagattgtcttgggtatttgcacaaaaaagaaagcatgtacattatctatcgttcatttaagtaaatggtaataaaatattttaaggggctattaatatttaaaatccttttctactatggcaaaaatctacagagaaactgaactggcaaaattaactacctggagcaaaacagatgtgcagatctaactaaaacagagctatagtgaaacaaaatgagattgtaagaagacattaaagctattgatttgatttttccatagcaagcaccaaaagcttatattcacagttcctgtgtttcatattagacttatagctgaattggtattttgctgaaaattcctagaaaactgcttgatgacaataaaaagtaaataaaagcactgctaccttctttgattgtattaatgattataataaaaagttacaggtcactttaaaagcaaacagtaccacttgatgattttgcataaaattatgcattgatgtcaaccggcaggctacaggaaccctggctggtcctggaagtgacaaaaaccagcaaattcaattctttgcaggctgagttcccacaaagcatgggtaacttagtctcaatagagtatctgttattagaataataaaggagttcattttcagaaaaaaaaaaaaaaaa

SEQ ID NO: 942 - protein, 259 aa, Homo sapiens
MERKINRREKEKEYEGKHNSLEDTDQGKNCKSTLMTLNVGGYLYITQKQTLTKYPDTFLEGIVNGKILCPFDADGHYFIDRDGLLFRHVLNFLRNGELLLPEGFRENQLLAQEAEFFQLKGLAEEVKSRWEKEQLTPRETTFLEITDNHDRSQGLRIFCNAPDFISKIKSRIVLVSKSRLDGFPEEFSISSNIIQFKYFIKSENGTRLVLKEDNTFVCTLETLKFEAIMMALKCGFRLLTSLDCSKGSIVHSDALHFIK

SEQ ID NO: 943 - DNA, 3364 bp, Homo sapiens
ggggggggggcgctagggccgagatcatgtctgactgggagaggtttccttggcagcagaggacgctaggtttgggatgaaagaagctgggcagatgcaaaatctggagagcgcgagggccgggcggtcagtcagcacccagactggcagcatgaccggtcagataccaaggctttctaaagtcaaccttttcactctgctcagcctctggatggagctctttccagcagaagcccagcggcaaaaatctcagaaaaatgaagagggaaagcatggacccttaggagataatgaagagaggaccagagtatctactgacaaaagacaggtaaagagaactggtcttgtggtggtgaaaaacatgaaaattgttggtctccactgttctagtgaagatttacatgccgggcagattgctcttattaaacatgggtcaaggctgaaaaactgtgatctttatttttccagaaaaccatgttctgcttgtttgaaaatgattgtaaatgctggagttaaccgaatttcatactggcctgctgatccagaaataagtttgcttacggaggcttctagttctgaagatgcaaagttagatgccaaagcagtggaaagattgaagtcaaacagtcgggcccatgtgtgtgtcttacttcaacctttggtgtgttatatggtgcagtttgtagaggagacctcttacaaatgtgactttattcaaaaaattacaaaaacattgccggatgctaacactgacttttattatgaatgtaaacaagaaagaataaaagaatatgaaatgttatttttggtttcaaatgaagaaatgcataagcaaatactgatgactataggtttggagaacctgtgtgaaaatccatactttagcaatctaaggcaaaacatgaaagaccttatcctacttttggccacagtagcttccagtgtgccgaactttaaacacttcggattttaccgtagcaatccagaacagattaatgaaattcacaatcaaagtttgccacaggaaattgcaaggcactgcatggttcaggccaggttattggcatatcgaactgaggatcataaaacaggagttggggcagtcatttgggcagaagggaaatctagaagttgtgatggaacaggtgccatgtactttgtaggatgtggttacaatgcttttcctgttggatctgagtatgctgacttcccacacatggatgacaagcagaaagacagagaaataaggaaattcagatacatcatacatgcggaacagaatgccttgacatttaggtgtcaagaaataaaaccagaagaaagaagcatgatttttgtgacaaagtgcccatgtgatgagtgtgtacctttaattaaaggtgcaggcataaaacaaatctatgcaggagatgtagatgttggaaaaaagaaggcagacatctcttacatgaggttcggggagcttgaaggtgttagcaaatttacgtggcagctgaatccatcaggagcttatggtcttgaacaaaatgagcctgaaaggagagaaaatggtgtgttgagacctgtcccacagaaggaagagcagcaccaggacaagaagctgcgcctcggaatccactaagaaggcctgtctacactgcaggggaacctcaagaacttttcattgcacttctaaaattcagccttgttcattcagaaaataaggatggattttgtgaataattgaaaagattttttaaggaagctaatttatttctaggatacaaatggtgttaataagaatatttgtcttttagatttatgtgtgggttttccataatgtagtagtgtgttattttattacacgaaatgagggagcaataacttcaaccaatgtaatcaccaacagggactgatttctatttatcttgactttatattagccaatttgaaagggtctgcttcacaagaggtcatgcctctgcagggaatcacacaccttttgagaaatattaattcttttgaattacaagagtgacagttagtaaactgctccagggaaataagtgtcatcttttaagagtcagtgtatagcaaaccaaaagatcacatttatacccaaagctttctagtaatcagaatttacttaattagaattgactcataaaaataaagttagtggactttgtctccatttttaaagtatattttgtaaatgttaattctgtggtcctgtttatcacagactttgggtagcaataggaagagagtgttattctgagacagtgtcgctgcttgatatcactgactcttgaaatcactaacagtgaacctcaaatttggttatgatgttaacagagaagaaatatttgagtctggaatattgaaactagctttcctagaattccattaataaatgctgctcccccatatagtcttcccttctgtataattaacataggttgtctcatggctttgatcttcaaaaggaagagccttttaaaaacatttgccaacctcaagaataaatactgaaagtcttgaaagtatggtcatttcagctattccagattgctgtctgtgatttctcacatttttatttgctgagaaacattcagaaaattattccaaaaatgaaggtacattttctgttctctcctaggttagagaggggtggcctggggtgcttcatgagaaatgtcttcctggatctgcggtggtcaggtttgcctctgcttttgttccctgcctttccgccacatcacacggcctcactgggcttcctaccagtttctcagaattacacgcacgaccatccaaacattggctccatgccagggctgtgactgcagcctgtgtaggaccatggggagttcagagtcatcatacaaggcagccaagaactgccataaacactacacagatggagggcatgggataggacaggagaggaggtgatgtacacttagaggtaactaaggctagtttgaaaaccgtgaattaagatattcttatcagtataaaaacactgagattgcttacctcccaaattgctttattgtattaactctcatgcttcagctcttggatttgttgtttctaactaacatgtcatgtacaccaaacattttataaatcaatcagtaaatattttgtaagacccaaaatcctggcatattgccaggtctgtggatttgcctgttgggtgttgggatgggatatcagaggaagaagcatacaagtgggaaaaactgtgattagaaagggaaaaataggcatttccacagtactattaagagaggcatgataatgccattttttttcttctgtacaactggtcagatttcaataaataatcattgatggtaaaaaaaaaaaaaaaaaa

SEQ ID NO: 944 - protein, 514 aa, Homo sapiens
MKEAGQMQNLESARAGRSVSTQTGSMTGQIPRLSKVNLFTLLSLWMELFPAEAQRQKSQKNEEGKHGPLGDNEERTRVSTDKRQVKRTGLVVVKNMKIVGLHCSSEDLHAGQIALIKHGSRLKNCDLYFSRKPCSACLKMIVNAGVNRISYWPADPEISLLTEASSSEDAKLDAKAVERLKSNSRAHVCVLLQPLVCYMVQFVEETSYKCDFIQKITKTLPDANTDFYYECKQERIKEYEMLFLVSNEEMHKQILMTIGLENLCENPYFSNLRQNMKDLILLLATVASSVPNFKHFGFYRSNPEQINEIHNQSLPQEIARHCMVQARLLAYRTEDHKTGVGAVIWAEGKSRSCDGTGAMYFVGCGYNAFPVGSEYADFPHMDDKQKDREIRKFRYIIHAEQNALTFRCQEIKPEERSMIFVTKCPCDECVPLIKGAGIKQIYAGDVDVGKKKADISYMRFGELEGVSKFTWQLNPSGAYGLEQNEPERRENGVLRPVPQKEEQHQDKKLRLGIH

SEQ ID NO: 945 - DNA, 3691 bp, Homo sapiens
gtgacgttacaggactgaggagggaggaagtaaaagggagctgtgactgtggtacgtatctgaaagcaagtgttagagagggagtggagaacgcataagcaagctggtttgaccagaaacagaactgcctgtgacagattaagagacaagcaaggcttggaatctgagagcaagcaaagagagtggaaatttacagctgccctatgtgagtgttcaagtgatcattttctggtaacgttttccagtggtaactgttactcttcaaaaagagggacagaaagtcaagacctaattgtggaaactcttttctctgccacgcttggtaataggaggcaacctctattaaatggacgataaaggctacttcatctaaagtgctttgagctcaagaaagagctgtcttcagcacctcaccatgtgtctacattttgttgcttagaaaagcctaggcatttctgtaacatttgcattccatattggaagaagagatttctacacatgaaaaaaatgcctttgtttagtaaatcacacaaaaatccagcagaaattgtgaaaatcctgaaagacaatttggccattttggaaaagcaagacaaaaagacagacaaggcttcagaagaagtgtctaaatcactgcaagcaatgaaagaaattctgtgtggtacaaacgagaaagaacccccaacagaagcagtggctcagctagcacaagaactctacagcagtggcctgctagtgacactgatagctgacctgcagctgatagactttgagggaaaaaaagatgtgacccagatatttaacaacatcttgagaagacagataggcactcggagtcctactgtggagtatattagtgctcatcctcatatcctgtttatgctcctcaaaggatatgaagccccacagattgccttacgttgtgggattatgctgagagaatgtattcgacatgaaccacttgccaaaatcatcctcttttctaatcaattcagagatttctttaagtacgtggagttgtcaacatttgatattgcttcagatgcctttgctactttcaaggatttactaaccagacataaagtgttggtagcagacttcttagaacaaaattacgacactatttttgaagactatgagaaattgcttcagtctgagaattatgttactaagagacagtctttaaagctgctaggggagctgatcctggaccgtcacaactttgccatcatgacaaagtatatcagcaagccggagaacctgaaactcatgatgaacctccttcgggataaaagtcccaacatccagtttgaagcctttcatgtttttaaggtgtttgtggccagtcctcacaaaacacagcctattgtggagatcctgttaaaaaatcagcccaaactcattgagtttctgagcagcttccaaaaagaaaggacggatgatgagcagttcgctgacgagaagaactacttgattaaacagatccgagacttgaagaaaacggccccttgaagagctccccggcccctgtcacagtcagtcgtctcatttgtccagtttgtacagtgtgtcatttcagaaagtcatcattcttgggaagactttggaggtgcctattttttctgctgtaattgttctgggtagatggagtataaacatttgaatggaaaaaaattaacctagaataatatattcattttagtcaagtctgtgattatttatgtgaaatgagaaccattgtatcagatgttgataaaagcaattttaacttgcagatgtgagcccctgggcacaatgagccgctaaatgggagctcaattgacaggcatcaccaagtcttcaaggaggactgagttctcaggggagaactgggaatggggccagggtgcaaaaatgctttgcccatctgtaggtagacacacagatcgctcagggcactgagagatcccagaaggtaacgttaatgttttcagtcattgtgtgtcctttgttgctgccaatgtctttggactgtaatcagtgcatccacacctcccaggatccagtgctccctctcagctcagtctcccctctctccctgtcctgcattccatcccagctcctcagcatggcctcagtgggcgcacccatgcctcccgcagtccaggtgagcaggggagcaactgagcaggaagaggatggatcaacaagggtcacggggaataggggacccacggggtgtgacctgcttgctagagaactgtgaacatgtggctctggatagagtgactgctgctccatattagcttccagagggtgagtgagggacagaatatttccttcataatggtcatgggtgaatgctttctgctgtaagtgtcttttagagtaggaatcagcatagtgggatgcccagcaggcacaaaccatgggtccagggagtctcagcggggaacttctatcagtatcaataaccattggaaggagaaatgattcatgtgtgaaaaaattctcagatccatcaataaatttttttcagagccattgtatcagatgttgataaaagcaatttttttctaataagctgtcattctataattgcccatcacagtctttagtgaacacatagaaagcctatacagttttggtcctgaatagtctcttgtgactaggatgattgaggtgttaattcctcttccttataaaaaggcttggaatcaaaaatattttaaaaggccgtggtttcgtttcagacatcaaccatctaaaacgggattttaaagcgatattttacaagaatgaaaggcacaattgttgatctgtattttttacacttcagtttctaaatcatgaatcgttgccttccacaggaaccctcccttatacattacttgagtgttgtgtagtttttcttcagccaggtatttctctgcctagagaggggaagagaaatgtgttctccaggactgatcccctttgtagattttgtacctgaagagttacctggcagggcaccacccttggctaggcccaggtgtgtgtttctttcttgcctggcatggaccccgaggcaggtgatgtggggcctggcgcacctccccgctttggcagctgtggcctccctggccagtgcccttgcaggaggccggccggcagcctgatgacccgtactctttagtcactgacgtcagattatttttataacgttccctgacagttcagagtcccttcgaattgcacttttctggtttcgcttatttaattaaaagagatgagtgtaagtataaaaaatgaaggtgaaataaccattggaattgtatttggttacttaatactgttccacaacatcttgggacgtctgttttcctttggagagtgaggccttgttattattcttttctgataaagaaaacattttatttcctttgggcttgcattagctctttcctagcaacccattatcccagctcagtacctttcaaacagaaaactagagtctggggttttgttgtgatctgaatttgtaagttattaatgtgaaagggggagcaggaagctccccctttgcacaaagggggatttgtttgcacaaagttcactgtaaatactgtgagaattgaattctgaaaaggtcatatttagtgatttcaaaagcacacatttaaatgaagactgactaaataaaaggtaccacacaaaaaaaaaaaaaaaa

SEQ ID NO: 946 - protein, 337 aa, Homo sapiens
MKKMPLFSKSHKNPAEIVKILKDNLAILEKQDKKTDKASEEVSKSLQAMKEILCGTNEKEPPTEAVAQLAQELYSSGLLVTLIADLQLIDFEGKKDVTQIFNNILRRQIGTRSPTVEYISAHPHILFMLLKGYEAPQIALRCGIMLRECIRHEPLAKIILFSNQFRDFFKYVELSTFDIASDAFATFKDLLTRHKVLVADFLEQNYDTIFEDYEKLLQSENYVTKRQSLKLLGELILDRHNFAIMTKYISKPENLKLMMNLLRDKSPNIQFEAFHVFKVFVASPHKTQPIVEILLKNQPKLIEFLSSFQKERTDDEQFADEKNYLIKQIRDLKKTAP

SEQ ID NO: 947 - DNA, 1952 bp, Homo sapiens
gcctctggctgctctgttaacgtgtcccgcgagcgaggcgcgtcgcaaaaggtcgcggcggaacttccctgcgcttttcagaccatactctttacggtactaggcactgctgagctgggagatgtcggcggcgtgttgggaggaaccgtggggtcttcccggcggctttgcgaagcgggtcctggtgaccggcggtgctggtttcattgcatcacatatgattgtctctttagtggaagattatccaaactatatgatcataaatctagacaagctggattactgtgcaagcttgaagaatcttgaaaccatttctaacaaacagaactacaaatttatacagggtgacatatgtgattctcactttgtgaaactgctttttgaaacagagaaaatagatatagtactacattttgccgcacaaacacatgtagatctttcattcgtacgtgcctttgagtttacctatgttaatgtttatggcactcacgttttggtaagtgctgctcatgaagccagagtggagaagtttatttatgtcagcacagatgaagtatatggtggcagtcttgataaggaatttgatgaatcttcacccaaacaacctacaaatccttatgcatcatctaaagcagctgctgaatgttttgtacagtcttactgggaacaatataagtttccagttgtcatcacaagaagcagtaatgtttatggaccacatcaatatccagaaaaggttattccaaaatttatatctttgctacagcacaacaggaaatgttgcattcatgggtcagggcttcaaacaagaaacttcctttatgctactgatgttgtagaagcatttctcactgtcctcaaaaaagggaaaccaggtgaaatttataacatcggaaccaattttgaaatgtcagttgtccagcttgccaaagaactaatacaactgatcaaagagaccaattcagagtctgaaatggaaaattgggttgattatgttaatgatagacccaccaatgacatgagatacccaatgaagtcagaaaaaatacatggcttaggatggagacctaaagtgccttggaaagaaggaataaagaaaacaattgaatggtacagagagaattttcacaactggaagaatgtggaaaaggcattagaaccctttccggtataatcaccatttatatagtcgagacagttgtcaaagaagaaagttatcctacctcgccaagtggtatgaaattaagtgaccaaatgaagtgcactcttttcttttggaattagattcatgactttctgtataaaattcaaatgcagaatgcctcaatctttgggagagtttcagtactggcatagaatttaaatgtcaaaattctttctgaaaccctttctcctagaaactaggaaataataggtgtagaagactctccctaagggtagccaggaagaagtctcctgattcggacaaccatgaggggtagtggtgctagggagaaggcaaccttcactggttttgaactcagtgcctaagaaagtctctgaaatgttcgtttttaggcaatataggatgtcttaggccctaattcaccatttcttttttaagatctgatatgctatcattgccttaataatggaacaaaatagaagcatatctaacactttttaaattgataattttgtaaaattgattacgttgaatgctttttaagagaagtgtgtaaagtttttatattttcacaattaacgtatgtaaaaccttgtatcagaaatttatcatgtttactgtttaaaatgattgtatttataaaattgtcaatatcttaatgtatttaatgtagaatattgctttttaaaataatgtttttattttgctgtagaaaaataaaaaaaaatttgattataaaaaaaaaaaaaaaaaaaaaaaaaaaaaaaaaaaaaaaaaaaaaaaaaaa

SEQ ID NO: 948 - protein, 350 aa, Homo sapiens
MSAACWEEPWGLPGGFAKRVLVTGGAGFIASHMIVSLVEDYPNYMIINLDKLDYCASLKNLETISNKQNYKFIQGDICDSHFVKLLFETEKIDIVLHFAAQTHVDLSFVRAFEFTYVNVYGTHVLVSAAHEARVEKFIYVSTDEVYGGSLDKEFDESSPKQPTNPYASSKAAAECFVQSYWEQYKFPVVITRSSNVYGPHQYPEKVIPKFISLLQHNRKCCIHGSGLQTRNFLYATDVVEAFLTVLKKGKPGEIYNIGTNFEMSVVQLAKELIQLIKETNSESEMENWVDYVNDRPTNDMRYPMKSEKIHGLGWRPKVPWKEGIKKTIEWYRENFHNWKNVEKALEPFPV

SEQ ID NO: 949 - DNA, 3922 bp, Homo sapiens
ctcccccagctgccgacgtggggcgggcagccgccggcggctgggagccgaggcgtcggtgcagacctggagacgggcatgggggggctgcggctgctggctgtggccctcacgtgctgctggtggccgcagggcagccagggtaagaccctgcggggcagcttcagcagcaccgcggcccaggacgcccagggccagcgcatcggccacttcgagttccatggtgaccatgctcttctgtgtgtcagaatcaacaacatagcagtagctgttggaaaagaagctaaactctacctgttccaagcccaggaatggctaaagctacagcaaagcagtcatggttatagctgtagtgaaaaattatccaaagctcagttgacaatgaccatgaaccagaccgaacataatctgacagtgtcccagattccgtctccacaaacgtggcatgtgttttatgcagacaagtatacatgccaagatgacaaggagaattctcaggtggaagatatcccatttgaaatggtgttactaaacccagatgccgaagggaatccatttgatcattttagtgctggagaatctgggttacatgagttctttttcctcctagtcctagtgtactttgtgattgcttgcatttatgctcaatcattgtggcaggctattaagaaaggcggacccatgcacatgattttaaaggttctgacaactgcattgctgttacaagctggttcagctttagctaattacattcatttctccagttactccaaagatggaataggggtaccatttatgggaagtttggcagaattttttgacatcgcttcccaaattcagatgttatacttacttttgagtctatgcatgggttggacaatagtcagaatgaagaagtctcaaagcagacctctccagtgggattctacgcctgcatccactggcattgcagtattcattgtcatgacacagagtgttttgctactttgggaacagtttgaagatatcagtcatcatagctaccattcacaccacaacttagcagggatcctcctaattgttctaagaatttgcctagcattgtcattaggctgtggactctatcagatcatcacagtggagagaagtacactcaaaagggagttctacatcacatttgccaaaggctgtatcttgtggtttttatgccatccagttcttgcatgcatttctgtcatttttagcgactaccaaagagacaaggttattacaataggtgttatcctttgccagtctgtttccatggttattctctacagactctttctgtctcacagtctatactgggaagtttcttcactttcttcagtaacactaccactgaccatatcatctggacacaaaagtcgccctcatttctgatacttgatttttgttgagaggaaaagtgaattggttaaaagagtgcaataaggatccaaatacagtgacttttttttcatacatttagtatgaaaacttgaacagcgaaagcagagcatgttatttatataactgcatttaagcagtaccaagactgaaaaaaaaggtaataaatgaaatgttttgaaatatacttaaacaacaaactttgaagaaagtgttgttataaaattattgaagcgatttctatgtggaaataaatgtgaaaaataactatgatattttggtaaaatattcaccacttataatgcctcatcttaatagctaactcaggtttaatagtcttataaaaagtaatcagttaaatgattacttgcttataaatatctaaactagtccagttatgaaatcagtgtaatacattgatttttaaaactgctgctttttatgctttaaggaaaatgtatttcatatttgagtttaaaggaattgaaattacttcaggaaatgaatataaaataggttcacagttaaatgaataagcttttgtttatttgtgggtggagttattctccaattttttctgccatttttggctctagttcaggttttagcttgattagcaaaggtttttgacaaacagtttatgaaaaaataaaacttaaatacattacacgggttgtaaggacaaaggattttaaaatctgagcacttaggtgaagggacaagcaggtttatgtgtttaaacagaaagaagggaaaaggtactatgtgatatggtactgaaattttgatcccaatagaattcatttctcttacgttgaatccccaatcataattaagccgtatacacagattaaattaacagaagcatttcacataaatgttggtttcagtcatcaactacccatgaattcctgcccaaggatacttaatcaggattaaattttctatgaataattgaaaaacaaaacactcactggatttgttataatccgtgttggcactggattctaagtagttgccatcttgaatcctttgtaataaagccatacttttgtgtgtgtgtgtgatgccccagtattgagtatgctagctaaaaaatatcaagtgcctgattaaagaattgctaaatggttgtcaatactcgctgtataaaatgagtattcccattaatagtcactgattggaaattattctgttgctgtttgtcaagctgttcaggccttttcctttttacttctggcttattttaaaaatattttttatctatttactgtgtgtttaagcaagcaacagtgcactgatctggtagttaaattttttaattaaatagttaaaataatgtagtgcaacttaaaaatatctatggctttgtttttgtttttcttttgtacctagtctcattggaaatgactagtattctgcctcattttcagggcagaatatgtgtttgtgacccaaaatgacaaagttaccaagttcaacctgctcattaaatcatctctctattagttctttgtaaatcacttagtacattagagctacaggttaagactagaaagtctgagttatgttttaggtatacatgatcgtctgagtggtcataaccttttcttttatcatgtctcgctaataaccccagctattgtctgttgtgttcagctgagatgcaaaaaagaaattaagcaaaaaagaaaaagatgaagacttttcatgaattttgtgaacttgccaaaaggggaagggaaaaatctttgtgttacttcactcaaagaacataagtaactgcaattaacatatatgaaatttattactctgcttgcatttatgaaactaaccagttttttaaactttaattcttaaatttatggttggaaatgctgataatttattttgttatttaagagctgttgttaagtggaggaaagtagttgttaataaatgtataaaactgttcttgactagtaatcagggacaaaatttatagttcataagtcatgacacagtattcgctctttttctgaatgtttacatagagattcatcactgcagattacagaaagttaagtgtatactacaaactctaattaaagataaaaatcttttctacttttctttgtcagataatgcttttttatgtgtttttacattttttgaaagaagataaatggttcatccagagctttattaagaagcatttcttttcttcccttaaaaaatagatgcttatttttattgacatgtgtataataagatgggtgcctactgtgatgcattttaccaggcattttaccttcattattactcatctctattgtgataaccaggctcccatttaactgagtataagagagaataaatgatttctctaaggtcatcaaactatttagtttttccactttaccttcatgatttaaggaacatgtattagctgtgttttagtgagaatgaattgctatccatcataatttttgctgttgatttgaacattaaaactggaattgtgctaaaatcagaa

SEQ ID NO: 950 - protein, 440 aa, Homo sapiens
MGGLRLLAVALTCCWWPQGSQGKTLRGSFSSTAAQDAQGQRIGHFEFHGDHALLCVRINNIAVAVGKEAKLYLFQAQEWLKLQQSSHGYSCSEKLSKAQLTMTMNQTEHNLTVSQIPSPQTWHVFYADKYTCQDDKENSQVEDIPFEMVLLNPDAEGNPFDHFSAGESGLHEFFFLLVLVYFVIACIYAQSLWQAIKKGGPMHMILKVLTTALLLQAGSALANYIHFSSYSKDGIGVPFMGSLAEFFDIASQIQMLYLLLSLCMGWTIVRMKKSQSRPLQWDSTPASTGIAVFIVMTQSVLLLWEQFEDISHHSYHSHHNLAGILLIVLRICLALSLGCGLYQIITVERSTLKREFYITFAKGCILWFLCHPVLACISVIFSDYQRDKVITIGVILCQSVSMVILYRLFLSHSLYWEVSSLSSVTLPLTISSGHKSRPHF

SEQ ID NO: 951 - DNA, 5843 bp, Homo sapiens
gagcggacaggcgtggcggccggagccccagcatccctgcttgaggtccaggagcggagcccgcggccaccgccgcctgatcagcgcgaccccggcccgcgcccgccccgcccggcaagatgctgcccgtgtaccaggaggtgaagcccaacccgctgcaggacgcgaacctctgctcacgcgtgttcttctggtggctcaatcccttgtttaaaattggccataaacggagattagaggaagatgatatgtattcagtgctgccagaagaccgctcacagcaccttggagaggagttgcaagggttctgggataaagaagttttaagagctgagaatgacgcacagaagccttctttaacaagagcaatcataaagtgttactggaaatcttatttagttttgggaatttttacgttaattgaggaaagtgccaaagtaatccagcccatatttttgggaaaaattattaattattttgaaaattatgatcccatggattctgtggctttgaacacagcgtacgcctatgccacggtgctgactttttgcacgctcattttggctatactgcatcacttatatttttatcacgttcagtgtgctgggatgaggttacgagtagccatgtgccatatgatttatcggaaggcacttcgtcttagtaacatggccatggggaagacaaccacaggccagatagtcaatctgctgtccaatgatgtgaacaagtttgatcaggtgacagtgttcttacacttcctgtgggcaggaccactgcaggcgattgcagtgactgccctactctggatggagataggaatatcgtgccttgctgggatggcagttctaatcattctcctgcccttgcaaagctgttttgggaagttgttctcatcactgaggagtaaaactgcaactttcacggatgccaggatcaggaccatgaatgaagttataactggtataaggataataaaaatgtacgcctgggaaaagtcattttcaaatcttattaccaatttgagaaagaaggagatttccaagattctgagaagttcctgcctcagagggatgaatttggcttcatttttcagtgcaagcaaaatcatcgtgtttgtgaccttcaccacctacgtgctcctcggcagtgtgatcacagccagccgcgtgttcgtggcagtgacgctgtatggggctgtgcggctgacggttaccctcttcttcccctcagccattgagagggtgtcagaggcaatcgtcagcatccgaagaatccagacctttttgctacttgatgagatatcacagcgcaaccgtcagctgccgtcagatggtaaaaagatggtgcatgtgcaggattttactgctttttgggataaggcatcagagaccccaactctacaaggcctttcctttactgtcagacctggcgaattgttagctgtggtcggccccgtgggagcagggaagtcatcactgttaagtgccgtgctcggggaattggccccaagtcacgggctggtcagcgtgcatggaagaattgcctatgtgtctcagcagccctgggtgttctcgggaactctgaggagtaatattttatttgggaagaaatacgaaaaggaacgatatgaaaaagtcataaaggcttgtgctctgaaaaaggatttacagctgttggaggatggtgatctgactgtgataggagatcggggaaccacgctgagtggagggcagaaagcacgggtaaaccttgcaagagcagtgtatcaagatgctgacatctatctcctggacgatcctctcagtgcagtagatgcggaagttagcagacacttgttcgaactgtgtatttgtcaaattttgcatgagaagatcacaattttagtgactcatcagttgcagtacctcaaagctgcaagtcagattctgatattgaaagatggtaaaatggtgcagaaggggacttacactgagttcctaaaatctggtatagattttggctcccttttaaagaaggataatgaggaaagtgaacaacctccagttccaggaactcccacactaaggaatcgtaccttctcagagtcttcggtttggtctcaacaatcttctagaccctccttgaaagatggtgctctggagagccaagatacagagaatgtcccagttacactatcagaggagaaccgttctgaaggaaaagttggttttcaggcctataagaattacttcagagctggtgctcactggattgtcttcattttccttattctcctaaacactgcagctcaggttgcctatgtgcttcaagattggtggctttcatactgggcaaacaaacaaagtatgctaaatgtcactgtaaatggaggaggaaatgtaaccgagaagctagatcttaactggtacttaggaatttattcaggtttaactgtagctaccgttctttttggcatagcaagatctctattggtattctacgtccttgttaactcttcacaaactttgcacaacaaaatgtttgagtcaattctgaaagctccggtattattctttgatagaaatccaataggaagaattttaaatcgtttctccaaagacattggacacttggatgatttgctgccgctgacgtttttagatttcatccagacattgctacaagtggttggtgtggtctctgtggctgtggccgtgattccttggatcgcaatacccttggttccccttggaatcattttcatttttcttcggcgatattttttggaaacgtcaagagatgtgaagcgcctggaatctacaactcggagtccagtgttttcccacttatcatcttctctccaggggctctggaccatccgggcatacaaagcagaagagaggtgtcaggaactgtttgatgcacaccaggatttacattcagaggcttggttcttgtttttgacaacgtcccgctggtttgccgtccgtctggatgccatctgtgccatgtttgtcatcatcgttgcctttgggtccctgattctggcaaaaactctggatgccgggcaggttggtttggcactgtcctatgccctcacgctcatggggatgtttcagtggtgtgttcgacaaagtgctgaagttgagaatatgatgatctcagtagaaagggtcattgaatacacagaccttgaaaaagaagcaccttgggaatatcagaaacgcccaccaccagcctggccccatgaaggagtgataatctttgacaatgtgaacttcatgtacagtccaggtgggcctctggtactgaagcatctgacagcactcattaaatcacaagaaaaggttggcattgtgggaagaaccggagctggaaaaagttccctcatctcagccctttttagattgtcagaacccgaaggtaaaatttggattgataagatcttgacaactgaaattggacttcacgatttaaggaagaagatgtcaatcatacctcaggaacctgttttgttcactggaacaatgaggaaaaacctggatccctttaatgagcacacggatgaggaactgtggaatgccttacaagaggtacaacttaaagaaaccattgaagatcttcctggtaaaatggatactgaattagcagaatcaggatccaattttagtgttggacaaagacaactggtgtgccttgccagggcaattctcaggaaaaatcagatattgattattgatgaagcgacggcaaatgtggatccaagaactgatgagttaatacaaaaaaaaatccgggagaaatttgcccactgcaccgtgctaaccattgcacacagattgaacaccattattgacagcgacaagataatggttttagattcaggaagactgaaagaatatgatgagccgtatgttttgctgcaaaataaagagagcctattttacaagatggtgcaacaactgggcaaggcagaagccgctgccctcactgaaacagcaaaacaggtatacttcaaaagaaattatccacatattggtcacactgaccacatggttacaaacacttccaatggacagccctcgaccttaactattttcgagacagcactgtgaatccaaccaaaatgtcaagtccgttccgaaggcattttccactagtttttggactatgtaaaccacattgtacttttttttactttggcaacaaatatttatacatacaagatgctagttcatttgaatatttctcccaacttatccaaggatctccagctctaacaaaatggtttatttttatttaaatgtcaatagttgttttttaaaatccaaatcagaggtgcaggccaccagttaaatgccgtctatcaggttttgtgccttaagagactacagagtcaaagctcatttttaaaggagtaggacaaagttgtcacaggtttttgttgttgtttttattgcccccaaaattacatgttaatttccatttatatcagggattctatttacttgaagactgtgaagttgccattttgtctcattgttttctttgacataactaggatccattatttcccctgaaggcttcttgttagaaaatagtacagttacaaccaataggaacaacaaaaagaaaaagtttgtgacattgtagtagggagtgtgtaccccttactccccatcaaaaaaaaaaatggatacatggttaaaggatagaagggcaatattttatcatatgttctaaaagagaaggaagagaaaatactactttctcaaaatggaagcccttaaaggtgctttgatactgaaggacacaaatgtgaccgtccatcctcctttagagttgcatgacttggacacggtaactgttgcagttttagactcagcattgtgacacttcccaagaaggccaaacctctaaccgacattcctgaaatacgtggcattattcttttttggatttctcatttatggaaggctaaccctctgttgactgtaagccttttggtttgggctgtattgaaatcctttctaaattgcatgaataggctctgctaacgtgatgagacaaactgaaaattattgcaagcattgactataattatgcagtacgttctcaggatgcatccaggggttcattttcatgagcctgtccaggttagtttactcctgaccactaatagcattgtcatttgggctttctgttgaatgaatcaacaaaccacaatacttcctgggaccttttgtactttatttgaactatgagtctttaatttttcctgatgatggtggctgtaatatgttgagttcagtttactaaaggttttactattatggtttgaagtggagtctcatgacctctcagaataaggtgtcacctccctgaaattgcatatatgtatatagacatgcacacgtgtgcatttgtttgtatacatatatttgtccttcgtatagcaagttttttgctcatcagcagagagcaacagatgttttattgagtgaagccttaaaaagcacacaccacacacagctaactgccaaaatacattgaccgtagtagctgttcaactcctagtacttagaaatacacgtatggttaatgttcagtccaacaaaccacacacagtaaatgtttattaatagtcatggttcgtattttaggtgactgaaattgcatcagtgatcataatgaggtttgttaaaacgatagctatattcaaaatgtctatatgtttatttggacttttgaggttaaagacagtcatataaacgtcctgtttctgttttaatgttatcatagaattttttaatgaaactaaattcaattgaaataaatgatagttttcatctccattcaga

SEQ ID NO: 952 - protein, 1325 aa, Homo sapiens
MLPVYQEVKPNPLQDANLCSRVFFWWLNPLFKIGHKRRLEEDDMYSVLPEDRSQHLGEELQGFWDKEVLRAENDAQKPSLTRAIIKCYWKSYLVLGIFTLIEESAKVIQPIFLGKIINYFENYDPMDSVALNTAYAYATVLTFCTLILAILHHLYFYHVQCAGMRLRVAMCHMIYRKALRLSNMAMGKTTTGQIVNLLSNDVNKFDQVTVFLHFLWAGPLQAIAVTALLWMEIGISCLAGMAVLIILLPLQSCFGKLFSSLRSKTATFTDARIRTMNEVITGIRIIKMYAWEKSFSNLITNLRKKEISKILRSSCLRGMNLASFFSASKIIVFVTFTTYVLLGSVITASRVFVAVTLYGAVRLTVTLFFPSAIERVSEAIVSIRRIQTFLLLDEISQRNRQLPSDGKKMVHVQDFTAFWDKASETPTLQGLSFTVRPGELLAVVGPVGAGKSSLLSAVLGELAPSHGLVSVHGRIAYVSQQPWVFSGTLRSNILFGKKYEKERYEKVIKACALKKDLQLLEDGDLTVIGDRGTTLSGGQKARVNLARAVYQDADIYLLDDPLSAVDAEVSRHLFELCICQILHEKITILVTHQLQYLKAASQILILKDGKMVQKGTYTEFLKSGIDFGSLLKKDNEESEQPPVPGTPTLRNRTFSESSVWSQQSSRPSLKDGALESQDTENVPVTLSEENRSEGKVGFQAYKNYFRAGAHWIVFIFLILLNTAAQVAYVLQDWWLSYWANKQSMLNVTVNGGGNVTEKLDLNWYLGIYSGLTVATVLFGIARSLLVFYVLVNSSQTLHNKMFESILKAPVLFFDRNPIGRILNRFSKDIGHLDDLLPLTFLDFIQTLLQVVGVVSVAVAVIPWIAIPLVPLGIIFIFLRRYFLETSRDVKRLESTTRSPVFSHLSSSLQGLWTIRAYKAEERCQELFDAHQDLHSEAWFLFLTTSRWFAVRLDAICAMFVIIVAFGSLILAKTLDAGQVGLALSYALTLMGMFQWCVRQSAEVENMMISVERVIEYTDLEKEAPWEYQKRPPPAWPHEGVIIFDNVNFMYSPGGPLVLKHLTALIKSQEKVGIVGRTGAGKSSLISALFRLSEPEGKIWIDKILTTEIGLHDLRKKMSIIPQEPVLFTGTMRKNLDPFNEHTDEELWNALQEVQLKETIEDLPGKMDTELAESGSNFSVGQRQLVCLARAILRKNQILIIDEATANVDPRTDELIQKKIREKFAHCTVLTIAHRLNTIIDSDKIMVLDSGRLKEYDEPYVLLQNKESLFYKMVQQLGKAEAAALTETAKQVYFKRNYPHIGHTDHMVTNTSNGQPSTLTIFETAL

SEQ ID NO: 953 - DNA, 3149 bp, Homo sapiens
cgcttccgggagagtccgcgtctcccgcaccttcctctctatcaaacgccgtctctgtggtagccggggccccgcccctcctcggactctacccagtactgaactaggggcagctgggctccagagtccctcgggtctcaggtcatggcggtcgcggggcccgcgcccggagctggcgccaggcccaggttagatctgcaatttctccagcggttcctgcagatactgaaggttttgtttccttcttggtcatcacaaaatgccttgatgttcctgacccttttgtgcctgaccctactggagcaatttgtgatctaccaggttggcttgatccccagtcagtactatggggtcctgggaaacaaagacttggaagggtttaagactctgacattcctggctgtcatgctcattgttctgaactccacgctgaagagctttgatcagttcacctgcaacctgctgtatgtgagctggaggaaggacctcactgagcaccttcaccgcctctacttccggggccgtgcgtactacaccctcaacgtgctgcgggatgacatcgataacccggaccagcgcatcagccaggacgtggagcgattctgccggcagctcagcagcatggccagcaagctcatcatctccccgttcaccctcgtctactacacttaccagtgcttccaaagcacaggctggctcgggcctgtgagcatcttcgggtatttcatcctggggaccgtggtgaacaaaactttgatgggccccattgtgatgaagctggtgcatcaggagaagctggagggagattttaggttcaagcacatgcagattcgggtgaatgcggagcctgctgctttctacagagctgggcatgtggagcacatgaggacagaccgcaggctgcagagactccttcagacccagagggagctgatgtccaaggagctctggctgtacatcggcatcaacacctttgactatctgggcagcatcctgagttacgttgtcatcgcaatccccattttcagcggggtctatggagacctgagtcccgcagagcttagcaccctggtcagcaagaatgcctttgtgtgcatctacctcatcagctgcttcacccagctcatcgacctgtccacgacgctctcagatgtggctggctacacgcacagaattgggcagcttcgggagacgcttctggacatgtccctgaagtcacaggactgcgagatcctgggcgagagcgagtggggcttggacacacccccagggtggccagcggcagagccagcagacacagcatttctccttgagcgggtctccatctctgccccctcctctgacaaacccctaatcaaggatctgagcctaaagatctccgagggacagagcctgctcatcacaggcaacacgggcactggcaagacctccttgctccgggttctgggtggcctctggacgagtacacggggctcagtgcagatgctgacggactttgggccccatggggtgctattcctgccacaaaagccattcttcactgacgggacccttcgggagcaggtgatatatcccctgaaggaggtctaccccgactcaggttctgccgatgatgagaggatcttgaggttcttggaattggcaggcctgtccaacttggtggcaaggacagagggcctggaccagcaggtggactggaactggtatgatgttctgtccccgggggagatgcaacggctctcctttgcccgactcttctacctgcagccgaagtacgcagtgcttgatgaagccaccagtgccctgacagaggaagtggagagcgagctctatcgcatcggccagcagctggggatgacgttcatcagtgtgggacatcggcagagccttgagaagtttcattccttggttctgaaactctgtggaggaggaagatgggagctgatgagaatcaaagtggaatgaagctctggcttttggaaggagagccacactgtggcgggtcggcggccctcaggagagaccaggaggactgacagcgaagatcgagctcaggttcgccacatagatcccgtgcaggagccacatgggtcctgtgcaggacccctagcagtggtgggctgagcccaggtctaggtttctgtgggggacactgaatctcccagtgttcagtctcccaggactctgctgcctcagccagagcctccatatgcttgaagtgctgattacctacaaatgatttcagatcatgtttgctaaagagaaatctggaagtgtgagatctgtaagaaatgaaagaaatgactcttggagtcaagagatctggaaatcttttaatcagttaaattgtgcagcaatagatttttaactttaactgaccatttaagttttttaataagttttttacaaagaaaagttaaacattaaaaagaattacagctttctgtcttctctatcatggaatgatcttttttattgaatctccagatttgtatttgacagcttggtgggaagggaagcacactctgctgttctggaatcttatgcccagggtttttcacttctccccacatctccctttccacttgccagtgttgtgtagttagaacctgaaccactaacttccaggggcctttggtctgccctaccttaacccaaatgaaagtaaatccctttccccttagccaaaataaggttgggttttctaaaaaaatagtctatattagggaacaacaacagcaaattagacaaaacccagaaagcacaaagcatgaggtggagttactgtgcccaaagtcctcactcagaccagtgcccctccagttcagttgtctatgtattaccttccttaccttcataatttttgccaggcttctgtacttctagtacttgagttacttaatatttttaaaaacaaaccttttaagtttaaatggatttttaagtgaaattttacacttaacatagatggaaagtaactaaaaataaatacaagaaaaaccatcggtgttattaacttacggctagatgctgttgcctgcatagactctgggcctgaggcttgttcattttgtaaaaaagagaggtgaggagttagacggactggcactcaactgagatttttctccttaataaaatcagaaagatgg

SEQ ID NO: 954 - protein, 606 aa, Homo sapiens
MAVAGPAPGAGARPRLDLQFLQRFLQILKVLFPSWSSQNALMFLTLLCLTLLEQFVIYQVGLIPSQYYGVLGNKDLEGFKTLTFLAVMLIVLNSTLKSFDQFTCNLLYVSWRKDLTEHLHRLYFRGRAYYTLNVLRDDIDNPDQRISQDVERFCRQLSSMASKLIISPFTLVYYTYQCFQSTGWLGPVSIFGYFILGTVVNKTLMGPIVMKLVHQEKLEGDFRFKHMQIRVNAEPAAFYRAGHVEHMRTDRRLQRLLQTQRELMSKELWLYIGINTFDYLGSILSYVVIAIPIFSGVYGDLSPAELSTLVSKNAFVCIYLISCFTQLIDLSTTLSDVAGYTHRIGQLRETLLDMSLKSQDCEILGESEWGLDTPPGWPAAEPADTAFLLERVSISAPSSDKPLIKDLSLKISEGQSLLITGNTGTGKTSLLRVLGGLWTSTRGSVQMLTDFGPHGVLFLPQKPFFTDGTLREQVIYPLKEVYPDSGSADDERILRFLELAGLSNLVARTEGLDQQVDWNWYDVLSPGEMQRLSFARLFYLQPKYAVLDEATSALTEEVESELYRIGQQLGMTFISVGHRQSLEKFHSLVLKLCGGGRWELMRIKVE

SEQ ID NO: 955 - DNA, 3464 bp, Homo sapiens
caccggccagttggctgtagacggtccatgctcaatggtcctctacagatatgaaactggttctggagtgagacgagctcggctggggacgctacttgagaaggcctttccccacagggtgacttaaatgtcccaggctggaaggtggagcgagaagtggatgcccccagggctctgggtcacactccaggatgacttctcggaaccagctggtgcagaaggtgctgcaggagctgcaggaagcagtggagtgcgaaggcctggagggtctcataggtgcttccttggaggccaagcaggtcctgtcttccttcactctccccacctgccgggagggaggccctggcctccaggtgctggaagtggactcggtggccctgagcctgtatccagaagatgctccacggaacatgctgccgctggtgtgcaagggggagggcagcctgctgttcgaggcggccagcatgctgctgtggggtgacgcaggcctcagcctggagctgcgggcccgcaccgtggtagagatgctgctgcacagacactactacctccagggcatgatcgactccaaagtgatgctgcaggccgtgcgctactccctatgctctgaggagtcccctgagatgaccagcttgccccccgccacgctggaggccatcttcgatgccgacgtcaaggcctcctgtttccccagcagcttctccaacgtgtggcacttgtatgctctcgcctctgtcctccagcggaacatctactccatctaccccatgcgcaacctcaagatccggccctacttcaaccgtgtcatccggccccgccgctgcgaccacgtgccctccacgctgcacatcatgtgggctggccagcccctcaccagccacttcttccgccaccagtactttgcccctgtggtggggctggaagaggtggaggctgaaggtgcccctggcgtggccccagctcttccagccctggccccactctcatcgccggccaagaccctggagctgctcaaccgtgaacctggcctcagctactctcacctctgtgagcgctacagcgtcaccaaaagcaccttctaccgctggcggcggcagtcccaggagcaccggcagaaggttgctgcccgcttctccgccaagcacttcctgcaggacagcttccaccgggggggcgtcgtgccacttcagcagttcctccagcggttcccggagatctcccgctcaacctactatgcctggaagcatgagctgctgggctctggcacctgcccggccttgccccccagggaggtgctgggcatggaggagctagagaagctgccggaggagcaggtggctgaggaggagctggagtgctccgcactggcggtgtcaagccctggaatggtcttaatgcagcgggccaagttgtacctggagcattgcatctccctgaacacactggtaccctatcgctgcttcaaacgcaggttccctggcatctcacggtccacttattataattggcggcgaaaggccctccggaggaaccccagcttcaagccggcaccagccctctctgctgctgggactccccagctagcatctgttggggaaggggctgtaattccttggaagagtgaggcggaagagggggcagggaatgccacaggtgaggaccctcccgcccccggggagctcctgccactaaggatgcccctgtcccgttggcagaggcgtctgcgcagggctgcccgcaggcaggtgctgagtgggcatctccctttctgccgcttccgcctccgctaccccagcctgtcaccttctgccttttgggtctggaagagtcttgctcggggttggcccagaggcctgtccaaacttcaggtgccggtccccaccttgggcaaaggggggcaggaggctgaggagaagcaggagaaggaggctggcagggatgtgacagctgtgatggccccacctgtgggggcttcttcagaagatgtagagggagggccttccagagagggggccctgcaggagggggccacagcccagggccagccccacagtgggcccttgctgagccaacctgtggtggcagcagcgggtggcagggatggccggatgctggtgatggacatgatcgctaccacgaagttcaaggcccaggccaagctgttcttgcagaagcgcttccagtccaagagctttccctcctacaaggagttcagtgccctctttcccctcactgcccgctccacatactacatgtggaagcgagccctctatgacggcctgaccctggtagatggctgacagggaggtacaaaaggggctgggaagaagggggaccagtttggagagggtcagggacctgagctgaccccaggcttggccaggatgtcctttgctctgggtcccacagtgtctaccctaagtccaagggtatatttgtgttattttctggctccaggacagagaatgccagaaatcagccatctggtctcccgtaggaaactgtgggaccagagatatcctctttcgttgtttgctggtcatatttttactgttatgatttagtttttggttttgatttgagtgggttggttggcccccttgctggagttggaagccgtatgtatgtcagggggtttagaggggggttggttagctagagctgctttcagcttttcctggagacaaaaggagtgttatagcatgatcatcggtcccactgggcagaacgttatcttcagtttcttttgggggttggcatcctctttactcagttgtttcccaaaggaacattaggctcgaatatgggggccaggtgtggtggcttatgcctgtaatcctagcgctttgggaggccaaggcaggaggatcacttgaggctaggagttagagaccaccctgggcaatgtagtgagacctcatctcttagaaaaaaaaaaagaaagaaaatcaaatgtagagctgatcagcagcttgtgcctggcatccccaagggagaaggtgccaggtcagcaggagcagcagcagggatgtatagaaagaaccacagctggcctctaaaggatggcactgaggcaccggagatcttgaggcactggagatcactgaggggctggcctgtcccctgcaaggagtgtgggaccaggtggggcaaggctgggagatgcaggctctgtttgcagattatggcccagagtctctgcttgtgggtgcttgatccacctgctgggaccctgcagtcctcggccagcctggctgtcagttggggattccacctttctgctgagcgtcttctcggagctggaggcccatcttcagtgagagatcacaaagcggccaggcaggtgggagactgaatttgccttgttcgagagtaacgtttgaaaaccaaagaaataaagtgatgcagtgcccacaaaaaaaaaaaaaaaaaaaaaaaaaaaaaaaaaaaaaaaaaaaaaaaaa

SEQ ID NO: 956 - protein, 702 aa, Homo sapiens
MTSRNQLVQKVLQELQEAVECEGLEGLIGASLEAKQVLSSFTLPTCREGGPGLQVLEVDSVALSLYPEDAPRNMLPLVCKGEGSLLFEAASMLLWGDAGLSLELRARTVVEMLLHRHYYLQGMIDSKVMLQAVRYSLCSEESPEMTSLPPATLEAIFDADVKASCFPSSFSNVWHLYALASVLQRNIYSIYPMRNLKIRPYFNRVIRPRRCDHVPSTLHIMWAGQPLTSHFFRHQYFAPVVGLEEVEAEGAPGVAPALPALAPLSSPAKTLELLNREPGLSYSHLCERYSVTKSTFYRWRRQSQEHRQKVAARFSAKHFLQDSFHRGGVVPLQQFLQRFPEISRSTYYAWKHELLGSGTCPALPPREVLGMEELEKLPEEQVAEEELECSALAVSSPGMVLMQRAKLYLEHCISLNTLVPYRCFKRRFPGISRSTYYNWRRKALRRNPSFKPAPALSAAGTPQLASVGEGAVIPWKSEAEEGAGNATGEDPPAPGELLPLRMPLSRWQRRLRRAARRQVLSGHLPFCRFRLRYPSLSPSAFWVWKSLARGWPRGLSKLQVPVPTLGKGGQEAEEKQEKEAGRDVTAVMAPPVGASSEDVEGGPSREGALQEGATAQGQPHSGPLLSQPVVAAAGGRDGRMLVMDMIATTKFKAQAKLFLQKRFQSKSFPSYKEFSALFPLTARSTYYMWKRALYDGLTLVDG

SEQ ID NO: 957 - DNA, 5333 bp, Homo sapiens
ctgtcactgcagcctggcggcctgagcgccgagcctggggctggggccgcggtgctgaggacgcaaatcagccccgtagctgggtggagcctccgggcctgacgtggatcttcactggagaagtgactcagggatcctcccaggatgtctgcctcaccagacaacctgagtacagggggaaggttacagaacatgacagtggatgaatgcctccagtctcggaacaccgtcctccaggggcagccctttgggggtgtccccaccgtgctgtgcctcaacatcgccctgtgggtgctcgtccttgtggtttactccttcctccggaaagctgcgtgggactatgggcgcctggctctgctgatacacaatgacagcctgacctcgctgatctatggggagcagagcgagaagacatctccctcggagacttccttggagatggaacgcagagacaagggattctgttcctggttcttcaacagcataacaatgaaggacgaggatctgattaacaagtgtggggacgacgcgcgcatctacatcgtgttccagtaccacctcatcatctttgtgctcatcatctgtatcccctccctgggcatcattttgcccatcaactatactggatctgttctggactggagcagtcactttgctcggaccaccattgtcaatgtctccacagagagcaagctcctgtggctgcatagcctgctgtccttcttctacttcatcaccaacttcatgttcatggctcatcactgcctggggtttgcgcccaggaatagccaaaaggtcacaaggacactaatgatcacctatgtgcccaaggacattgaagacccagaactcatcattaagcattttcacgaggcctatccaggcagtgtcgtgacaagagtccacttctgctacgacgtcaggaacctgatcgacttggacgatcagaggcgccatgccatgcggggccggcttttctatacagccaaggccaagaagactgggaaggtgatgatcaggatccacccctgtgcccgcctgtgcttctgcaagtgctggacctgcttcaaggaggtggatgcagagcagtattacagcgagctagaggagcagctaacggacgagttcaacgccgagctcaaccgcgtgccgctcaagcggctggacctgatctttgtcaccttccaggactccaggatggccaagcgtgtccgtaaggattacaagtatgtccagtgtggtgtgcaaccccagcagtcctcagtgaccaccatcgtcaaatcatattactggagggtcactatggccccacaccccaaagacattatttggaaacacctgtctgtccgccgcttcttttggtgggcccgctttatcgcaatcaacaccttcctcttcttcctcttcttctttctcaccacgcctgccatcatcatgaacactatcgacatgtacaacgtcacccgccccatcgagaagctgcagaacccaattgtgacccagttcttcccctctgtgatgctctggggcttcacagtgatactgcctctgattgtctacttctccgccttcctcgaggcccactggaccagatcaagtcagaatctggtcatggtgcacaagtgctacatctttctggtgttcatggtagtcattctgccctctatgggactgaccagtttggatgtctttctccgctggctctttgacatctactatctagagcaagcatccatcaggttccagtgtgtgttcctgccagacaacggcgccttctttgtcaactacgtgatcacggcagctttacttggcacaggcatggagctgctgcgtctggggtcactcttctgctacagcacccgcctcttcttctctagatcagagccagagagagtcaacatcagaaagaaccaggccatagacttccagtttgggcgtgagtatgcgtggatgatgaacgtgttcagcgtggtgatggcgtacagcatcacttgccccatcattgtgccttttgggttgctctacctgtgcatgaagcacttgacggatcgctataacatgtactactcctttgcacccaccaaactgaacgagcagatccacatggctgccgtctcccaggccatctttgcgccactcttgggtctgttctggatgctgttcttctccatcctgcggttgggttctctccacgccatcaccatcttttccctgtccaccctcctcattgccatggtgattgcctttgttggcatttttctggggaagcttcggatggttgccgactacgagcccgaggaggaggagatccagacagtgtttgacatggagccaagcagcacctcctccacgcccacctccctcctgtatgtggccaccgtgctgcaagaaccggagttgaatctgacccccgcctcctccccagccaggcacacctatggcaccatgaacaaccagccggaagagggagaagaagagagtggtctgaggggctttgcgagggagctagactcggcccagttccaggaagggctggaactggagggccagaaccagtaccactgaccgggacctgaggcctccactggcgacttgttgaggggtcaggggagggcctggcaaggggaggcaggagggtggcctggacctccccactacctcctgcagactttgagaagcctacagtggagacatccaccaccccagccatgggccatacgggggtcctgacctgctgcccggctggaactggggctgctcggcagtgctgaaggagcctgggaagggatgggaggatacaggcaagcacatgtcttgagagaggtggctggagccccggcacagagactgaacgctggggtcccttcctgggaccaagatggagaaggtgttcctaagggaggagacagaaggaggctgccgaaggctctgtggggtcatcaccactctgcatcagctgcccttaaaaggagcttctgctgctgctcctcctcccagccccggcccattcctcccctgcagtctgaggaggcaaaggtatgtgcacggggcacattgacaggacacggaggaccacctcatcacagggttccctgcatggggatctgtaaagagaaagtttctgcacccaccagagcaagagccaactgaaagcgtagacctgagaagaggtaactcagccccttcctgctcctctgccctcatcagatgtccccaggagcagcagggcagaggcccttctttctattcttacaagggtagctagagcgtgatcactcagggctcatcaaatgagactcgtgtgcatttttcagaaggaaaccttggttagtccttgctgggtaacacaaagtggggtgagacgacagaagccgaattcatggaaggggggtcttctccccaaaactctgtgtggtgggaaaccagctatacctccccaagccccagggcctaaagagaagacccccgaagccaaagatgtggccacttaaaagcgtctcctgcctcctacccaactgagtgcctgggcccccagcttggccaagatgggcagtacgttagggtaagaaccccatgcttcaaacttaaggactgaccatcacctgcgtcccaagtaggacccttcctcccttctcggggctgcccctgcaccctgccttgaagaccacccaagcggcctccagtgtgggcctggtccagacattgcagatgcttcaaccgtgatgtcgccccaggcctgccaggggtgtggtggaggggaaggccacgtgctccagggagaagccctttctggagaagcaaggctgtcctcccagggctgccactaccagagacctgggggagctgaattccgaacagtgatggtgacactcagcacctttgccacagccggggggaaccggcttctgcctctgggatgggctctcatcagggccaccgtgcagcccagccagggaggacatgagaagggccagtgggggcctcaatgaaccagaacaagccaagctgaatggggtctgtgtgctccagggccctcttcagccccctcccccaaaggtctgggtccctgccaccaacctactgaaggccggcccccggctcacctcacctgagcacctgcaccaggccccaggcacatggctgccctgaactcagatcacctagaccttgtccctgccccacctttgccccatcctagccccagaagctccaagcttcaccgcaggtgagaaattgtgctcaatgggcagaaactgctatacccccagggcatggcccacattttggcatgagggtgtctttccagagagcttgggttggctggagagaggctgtctttcccattccttgtccagctaggaataaaggggaaatggtcctagcctggcccctacacacccaggtcccacaggccccctccccactggaatttcaccaaccaacaaggggaaagtacgctgttacagcatagcggtcaggcccagcaggagcttggcacatgatggggaggtggccagctccaggccctgcccgaccccatcatgtgtatttggtgtatggggtgtgggggtcacaccagaagctggcctggggtctcttctttgctggacacagctccctggcccctgcccccagcccctgcagcccctgccggactgtggaagccacatatgggaaaagtcctggcagacaatgtggcgggatgactgggggcttctccctctgaacctgggtccagtgtagcctggctctgagagaaggtggtgagcatgtggagaaggttccatagtccactcttaggggaaccagcaaagcctcatggcagttggctccatctggacctcccatggtcactacaggatggtggagcagggggcatcttttagcctccccccgccaccacatccaggccctctcaggcacctcctgcctcagcccacacctgcctcacccattgcccccctccccccacctactgccatcccactcctctgccagccacttcccagccgccccaccccactccatccaccaaatcacctcctgacttaatcctttctggaaggagctgccgcccaggaaccggtattgcctagagcctccaggaggggccctcctcaggcctccagtggccccatgcccacctgcctgaccctccactgcccctggaagcaaagtgcctatcagcagcgttgcgtcctctggggcccccggtcgggggggagggggtgtgggctaaccttggccaccaccacaaaaggaatgtgccagaatgctgaaccttcttgttaatgctatgaccgtgccttgaataaacaagtcctcccaacctc

SEQ ID NO: 958 - protein, 806 aa, Homo sapiens
MSASPDNLSTGGRLQNMTVDECLQSRNTVLQGQPFGGVPTVLCLNIALWVLVLVVYSFLRKAAWDYGRLALLIHNDSLTSLIYGEQSEKTSPSETSLEMERRDKGFCSWFFNSITMKDEDLINKCGDDARIYIVFQYHLIIFVLIICIPSLGIILPINYTGSVLDWSSHFARTTIVNVSTESKLLWLHSLLSFFYFITNFMFMAHHCLGFAPRNSQKVTRTLMITYVPKDIEDPELIIKHFHEAYPGSVVTRVHFCYDVRNLIDLDDQRRHAMRGRLFYTAKAKKTGKVMIRIHPCARLCFCKCWTCFKEVDAEQYYSELEEQLTDEFNAELNRVPLKRLDLIFVTFQDSRMAKRVRKDYKYVQCGVQPQQSSVTTIVKSYYWRVTMAPHPKDIIWKHLSVRRFFWWARFIAINTFLFFLFFFLTTPAIIMNTIDMYNVTRPIEKLQNPIVTQFFPSVMLWGFTVILPLIVYFSAFLEAHWTRSSQNLVMVHKCYIFLVFMVVILPSMGLTSLDVFLRWLFDIYYLEQASIRFQCVFLPDNGAFFVNYVITAALLGTGMELLRLGSLFCYSTRLFFSRSEPERVNIRKNQAIDFQFGREYAWMMNVFSVVMAYSITCPIIVPFGLLYLCMKHLTDRYNMYYSFAPTKLNEQIHMAAVSQAIFAPLLGLFWMLFFSILRLGSLHAITIFSLSTLLIAMVIAFVGIFLGKLRMVADYEPEEEEIQTVFDMEPSSTSSTPTSLLYVATVLQEPELNLTPASSPARHTYGTMNNQPEEGEEESGLRGFARELDSAQFQEGLELEGQNQYH

SEQ ID NO: 959 - DNA, 1885 bp, Homo sapiens
ttcccaggccaccatagcggctggcggagggagcgcgcgccttgctggcctggagggggcgggggccgtggcggctttaaagcgcccagcccaggcgtcgcggggtggggcggctctggcggctgcggggcgcagggcgcagcggccaagcggggtccccggaagcacagctggggtgtctccacctacgactggccgcgcgccttttctctcccgcgccagggaaggagcggctgcggcccccgccgggcggaggcacggggggcgtacgaggggcggaggggaccgcgtcgcggaggagatggcgcggcacgtgcggtgacggcacccgagccctgagggtcccagccccgcgctccgcgtccccgggacagcatggagcgcccggagcccgagctgatccggcagagctggcgggcagtgagccgcagcccgctggagcacggcaccgtcctgtttgccaggctgtttgccctggagcctgacctgctgcccctcttccagtacaactgccgccagttctccagcccagaggactgtctctcctcgcctgagttcctggaccacatcaggaaggtgatgctcgtgattgatgctgcagtgaccaatgtggaagacctgtcctcactggaggagtaccttgccagcctgggcaggaagcaccgggcagtgggtgtgaagctcagctccttctcgacagtgggtgagtctctgctctacatgctggagaagtgtctgggccctgccttcacaccagccacacgggctgcctggagccaactctacggggccgtagtgcaggccatgagtcgaggctgggatggcgagtaagaggcgaccccgcccggcagcccccatccatctgtgtctgtctgttggcctgtatctgttgtagcccaggctccccaagcttccctgcatcttggtccttgtccccttggccacactggagaggtgatggggcagggctgggtctcagtatcctagagtccagctgcagaaggagtggcttttcctccaggaaggggcttctgggtgtcccctcatccccagtagcctctttcttgcgtttctttttaccttttttggcactccctctgaccccgcgatgagtgttttggtggcagaggtgggatgagctggaaaggtatggaggtgggagaggatggggctcttctgtctgtcctgcttcttcaggtgagtgcaggccaaggcgggggtgagatggctgagcttccagcgccttctgtcctgcctgcccagtcccttcactgctttcctgccccaagatggcttgcttttcacaaataaagagaaagagcagctttagccttcttggtggaatcccaggcagtgggagcagaatcagaactgccagggaagggaagggggacctgggtctcaatgggtctcatttgagtctcgcgggctgtgcagatgccctgacagagtcggtttcctttggcggcattccctttccctcattcagcacttctgctgggaactccctgactattccgctgctgcaggaacccagctagctggccaggtggggaggggctggggaccggccaggaaggaggggtgacttcatcccagagagacccgagttcccccagcccttcatcaccaacccgctcctgcaggagtgagtcttacctcccctggccctcctttctggctcagcctgcagcgactgtgaggccacagctcctcagattcactgcccgctgtgtgccagtactcaggcagctggagagaagagaaggcagcagcagaggcccccgccctcaccccagccatctgcacttgtaccatttgctctgtgctgactgtggtcctataaattcatgagaaataaactggttctgtgtgcaaaaaaaaa

SEQ ID NO: 960 - protein, 151 aa, Homo sapiens
MERPEPELIRQSWRAVSRSPLEHGTVLFARLFALEPDLLPLFQYNCRQFSSPEDCLSSPEFLDHIRKVMLVIDAAVTNVEDLSSLEEYLASLGRKHRAVGVKLSSFSTVGESLLYMLEKCLGPAFTPATRAAWSQLYGAVVQAMSRGWDGE

SEQ ID NO: 961 - DNA, 4881 bp, Homo sapiens
gccgcctcctagcggcccgggccgcgaccacgctgcccgccccgccccgagcccggggccccgcgctccgctgcagtgaagggcgttgcatttcccggggtaccccgagctgccctcttgtgactccttggcggggcggctggtcagacaaagtgtgcctccgggccggagggcgacccagaggagggggaagatgccgccggccacgggcggaggcctggcagagtccgagctgcgtccccggaggggccgctgtggcccccaggctgctagggccgcaggccgggacgtggccgctgaggctgtggcgcgaagccccaaacggcctgcttggggctcacggcgcttcgaggcggtcggctggtgggccctgctggccttggtgacgctgctgtccttcgccacccgcttccaccgcttggacgagccgccgcacatctgttgggatgagactcactttggaaaaatgggaagttactatatcaaccgtacatttttctttgatgtgcacccgcccctgggaaagatgctgataggtcttgctggctacctgagtggatatgatggtacctttttgttccagaagcctggggataaatatgagcatcacagctacatgggaatgagaggattctgtgcattccttggctcctggctggtcccctttgcctacctcactgtactggatctgtccaagtccctctcggcagcactgctcacagctgccctcctcacctttgacacgggatgcctcactctgtcccagtacatcctccttgaccccatcctgatgttcttcatcatggctgccatgctgagcatggtcaagtacaactcttgcgccgacaggcccttctctgccccctggtggttctggctcagcctgactggcgttagtcttgctggtgctttaggggtcaagtttgttggcctctttatcatccttcaagtggggctgaacaccattgcagacctttggtacctgttcggagacctcagtctttcattggtgactgtgggaaaacacctgactgctcgtgtcctgtgcctcatagtgctgcccctggctctctatacagccacctttgctgttcacttcatggtgctgagtaaaagtggccctggtgacggtttcttcagttctgccttccaggcccggctttcagggaacaacctgcacaatgcttccatccctgaacacctggcctacggctctgtgatcactgtgaagaacctccggatggccatcggctatctgcactcccacaggcacctctaccccgagggcattggtgcccgtcagcagcaggtcaccacctatttgcacaaggactacaacaacctgtggattatcaagaaacataacacaaactcagatcccctagacccttccttcccagtggagtttgtaagacatggagacattattcgactagaacacaaagaaacttcccggaacttgcacagtcactatcatgaggcccccatgacccggaagcactatcaggtcaccggctatggcataaatggaacaggggactcaaatgatttctggcggattgaggtcgtaaacaggaaatttggaaaccggatcaaagtgctgagaagtcgaattcgcttcatccatttggtcacaggttgtgtcctgggctcctcgggaaaggttctgcccaagtggggctgggagcagttggaagttacttgcaccccatacctgaaagaaaccctcaactccatctggaatgtggaggaccatatcaatcccaagttgccaaacatcagcctggatgtgctacagcccagttttcctgagatcttgctggaatcccacatggtcatgatccgggggaacagtggcctcaaacccaaggacaatgagttcacgtccaaaccctggcactggcctatcaactatcagggcctacgcttctcaggggtcaatgacacagatttccgagtctatctgcttggcaacccggtggtttggtggctgaatctgttgagcatcgccctctacctcctctcagggagcatcattgctgtagccatgcagagaggggcacggctgccagcggaggttgcagggttgtcccaggtcctgcttcgaggaggcggccaggtcctgctcggctggacactccattacttcccgtttttcctgatgggccgggtcctctacttccaccactacttcccagccatgctcttctcaagcatgttgacaggcattctgtgggacaccctcctgcggctctgtgcctggggcttggcctcatggcccctggcgaggggcatacatgtggcgggaatcctgagcctgctcctgggaactgcctacagcttctacctcttccaccctctggcttacgggatggttggtcccctggcccaggacccccaaagtccaatggcaggactaaggtggctggactcatgggacttttgaggccactgcaaagattccagcctgggtccaggaacttcccaggagagccagctgggaagcagtactggaccatccggccatgaggaagctgcctaaggagcccgaagaattctgctgctcaccaggacccagctctgggagtgcagctggaatggaacccagcattggagagagccgggagagagccgcagctccgtccacagcaccacggagaggacagcgcctcttgggctgctccctcgtgcacagcgcaggggaggatgggtgccagagggtgggagtgggtgcgcgtgtgtgtatgtgagggcatgttgtccatatccctgtggaatacagaccgtgtaactggacagctgagtgtcataaactctaaaatagtccaggctatagtaatattttctggtatttttttctgttggatttctttggttttggtttgtaagatccatcaaaaattctcagacctctgagagggccttgagggcagagaatactgacctcaccttgggatgtcaccaaaggcagagcagatgggactgtcaaagttgtgctgccctccctcccacaaacaaatgaatccagcgtggaggaaggcgcgccgccccgagctggagggcctggctcccaccatgccccccagtggctgcaggtagctggacttcctgcctgtgacgcacagagagcagcggactccggagcgtcagcctgccttagcccttggttcctcgttttttgggattgtcacactgtgacactcgggaggaacgatgtcctatcctgggctgctcagtgttcccaggccctgtgtgccagaggccaggtctctccaagtgcatctagcctggcctggagggcaaggcagatgcattctcctggctgctgggagagcccatgggaaccttgcttagcgcccaaggtagatgagagacagggcagggaatctgcgtggtgctgggatgtggggactctggcctctccagactaatgttcctgtcacctgctgagctttcccagtgtcacttctgcagtcctcctctgctcacccctccctcactccgtgggcaattccctttctctctgtcactgcttcagcagtgaagacccatggcacctagaaatgcatgccagcttcctgcgtctaccactctgcagctcaaacaagaagctcagagctgccccttccacttcctccccaaaagggatgaagaaaaccctgtggtagaaccaaaccacccaaggccagcccttaagcctgcctccaccttcctggtgcatgacaaaatatttcttttgtctcagaggactttgatgcttcaatatttaatgatgaatccgccacactccattttccctcctctgaagctcccaacaactctgacagggtcagatctctttaaagcatcttcaggaggcggttgccacggagactggatattggtcccagggacaggctgtgctacctactgggtggtggggagggaagcttctggccatgcttgggcattcagaccaaccatcattaatgttaatagaggaaatgcagcaacgtcaaaagcaaggcaggttggttaattagatctggggcccgatgacctccctttcccactgctacagcccttttgacttcccccagcaggaagcgctgtctgtgcggctgagtctgggccacttgcttaattgcatttctggcagggaaggagaggagggatggagaagctctgctcgctgcttccacctcaccgtgtgtcctcccctcccctcccttcctctcctccccacaggcggaattgctttcttctgagccgggtgggctctcctgcagggagaatgcaggggtctgtgcttggctcttagcaaagcaggtggcccacagtgacctccaggaggtggctgattttcctttgtgccttcttatttctcagtaggaacttggaagggaagagctctgaaggagccagaggggcagccaccttgcatgagggtgaggaaggagaagcccagccagcctctacccatccctccctcccaattaggctgcactggggccgaacgcttccctgggctcccactgccttctaaggagccaaggagaattccctgcccactttctgttcctccatgcccaaactggcagatgcttctctgggagcaaggccacatgggctgatgcagctttgagtgctcaggttctgttttctggaagttgctggagaagggctgtcagggtgcttctatgaatatgggcttcagctgtagcacttggcagaaacgtgatgtgtcccacaaactgctggtggaggaagaagatgttcgtcagccaattcaacctccagccagcttcttgagcctatttggtttaaaaaaaaaaagtcttctaatcagaagccactgattttataataaataacacttgttttgaaaaaaaaaaaaaaaaa

SEQ ID NO: 962 - protein, 750 aa, Homo sapiens
MPPATGGGLAESELRPRRGRCGPQAARAAGRDVAAEAVARSPKRPAWGSRRFEAVGWWALLALVTLLSFATRFHRLDEPPHICWDETHFGKMGSYYINRTFFFDVHPPLGKMLIGLAGYLSGYDGTFLFQKPGDKYEHHSYMGMRGFCAFLGSWLVPFAYLTVLDLSKSLSAALLTAALLTFDTGCLTLSQYILLDPILMFFIMAAMLSMVKYNSCADRPFSAPWWFWLSLTGVSLAGALGVKFVGLFIILQVGLNTIADLWYLFGDLSLSLVTVGKHLTARVLCLIVLPLALYTATFAVHFMVLSKSGPGDGFFSSAFQARLSGNNLHNASIPEHLAYGSVITVKNLRMAIGYLHSHRHLYPEGIGARQQQVTTYLHKDYNNLWIIKKHNTNSDPLDPSFPVEFVRHGDIIRLEHKETSRNLHSHYHEAPMTRKHYQVTGYGINGTGDSNDFWRIEVVNRKFGNRIKVLRSRIRFIHLVTGCVLGSSGKVLPKWGWEQLEVTCTPYLKETLNSIWNVEDHINPKLPNISLDVLQPSFPEILLESHMVMIRGNSGLKPKDNEFTSKPWHWPINYQGLRFSGVNDTDFRVYLLGNPVVWWLNLLSIALYLLSGSIIAVAMQRGARLPAEVAGLSQVLLRGGGQVLLGWTLHYFPFFLMGRVLYFHHYFPAMLFSSMLTGILWDTLLRLCAWGLASWPLARGIHVAGILSLLLGTAYSFYLFHPLAYGMVGPLAQDPQSPMAGLRWLDSWDF

SEQ ID NO: 963 - DNA, 1448 bp, Homo sapiens
ccgggagggttgggccagaggaggcggtcctggtagggagtgcgtagcagggtggagtcgctgtccggtcgcgcttcacttctgctccgccctccctgctccccataacagacccctccctccactaaggcttccaaacgtcgccccaagcctcccaatttctcgcagcccttcatgctcttctcttggccctagcaggagtggtcaccagcagtccctgtcccttggcaccaggagtccctgtagcctggctaggtaaggaaagggagttgcatctccaaataaggaagatccagttgtggccacccaattcctcctcttcgaaagacactttctgcccatcacctgctttctgtgccaggaccatctttactttctccacaaaagcccatcctctattcctatttccgaagctcctgctcatggagagttcgaattgctctggccttgaaaggcatcgactacgagacggtgcccatcaatctcataaaggatgggggccaacagttttctaaggacttccaggcactgaatcctatgaagcaggtgccaaccctgaagattgatggaatcaccattcaccagtcactggccatcattgagtatctagaggagatgcgtcccactccgcgacttctgcctcaggacccaaagaagagggccagcgtgcgtatgatttctgacctcatcgctggtggcatccagcccctgcagaacctgtctgtcctgaagcaagtgggagaggagatgcagctgacctgggcccagaacgccatcacttgtggctttaacgccctggagcagatcctacagagcacagcgggcatatactgtgtaggagacgaggtgaccatggctgatctgtgcttggtgcctcaggtggcaaatgctgaaagattcaaggtggatctcaccccctaccctaccatcagctccatcaacaagaggctgctggtcttggaggccttccaggtgtctcacccctgccggcagccagatacacccactgagctgagggcctagctcccaaatcctgccccgttggcacagggccacaggagcagaagctgggtgggctgaagaggcctggaaacgagagtcttaattgaggagatgggagactcgaactctagccctggatctgccttcctgctgaaacttgttccacctcagtcccctcatctgtcacacgcatgtggggtggagtagggagatgcggggagcagggtgggcaggaatactgttatctatgtgacggggcagtcgtgaggctgagatgagaatgcggattaaaatgcctggcgtgctcaccgtaacaccacggggaaggctgtgtgccttttctcatccgcttttgttgtgtgtgactccaaagaatgcccgcgctgaaatttggcgtgaattaaactgaagcccaggcctctaaaaaaaaaaaaaaaaaaaaaaaa

SEQ ID NO: 964 - protein, 161 aa, Homo sapiens
MKQVPTLKIDGITIHQSLAIIEYLEEMRPTPRLLPQDPKKRASVRMISDLIAGGIQPLQNLSVLKQVGEEMQLTWAQNAITCGFNALEQILQSTAGIYCVGDEVTMADLCLVPQVANAERFKVDLTPYPTISSINKRLLVLEAFQVSHPCRQPDTPTELRA

SEQ ID NO: 965 - DNA, 1231 bp, Homo sapiens
gccagaggcgaccggaaggatctttctagtccagcccctcgctttacccggacgaaagacacgggcctgattcgtcgagtctcactgagccttagtcgtcggcaggtcccaggcgcgaagtttctcggcctggaggagggggtcgcgcgaagtgccagatgcaggcggggaagcccatcctctattcctatttccgaagctcctgctcatggagagttcgaattgctctggccttgaaaggcatcgactacgagacggtgcccatcaatctcataaaggatgggggccaacagttttctaaggacttccaggcactgaatcctatgaagcaggtgccaaccctgaagattgatggaatcaccattcaccagtcactggccatcattgagtatctagaggagatgcgtcccactccgcgacttctgcctcaggacccaaagaagagggccagcgtgcgtatgatttctgacctcatcgctggtggcatccagcccctgcagaacctgtctgtcctgaagcaagtgggagaggagatgcagctgacctgggcccagaacgccatcacttgtggctttaacgccctggagcagatcctacagagcacagcgggcatatactgtgtaggagacgaggtgaccatggctgatctgtgcttggtgcctcaggtggcaaatgctgaaagattcaaggtggatctcaccccctaccctaccatcagctccatcaacaagaggctgctggtcttggaggccttccaggtgtctcacccctgccggcagccagatacacccactgagctgagggcctagctcccaaatcctgccccgttggcacagggccacaggagcagaagctgggtgggctgaagaggcctggaaacgagagtcttaattgaggagatgggagactcgaactctagccctggatctgccttcctgctgaaacttgttccacctcagtcccctcatctgtcacacgcatgtggggtggagtagggagatgcggggagcagggtgggcaggaatactgttatctatgtgacggggcagtcgtgaggctgagatgagaatgcggattaaaatgcctggcgtgctcaccgtaacaccacggggaaggctgtgtgccttttctcatccgcttttgttgtgtgtgactccaaagaatgcccgcgctgaaatttggcgtgaattaaactgaagcccaggcctctaaaaaaaaaaaaaaaaaaaaa

SEQ ID NO: 966 - protein, 216 aa, Homo sapiens
MQAGKPILYSYFRSSCSWRVRIALALKGIDYETVPINLIKDGGQQFSKDFQALNPMKQVPTLKIDGITIHQSLAIIEYLEEMRPTPRLLPQDPKKRASVRMISDLIAGGIQPLQNLSVLKQVGEEMQLTWAQNAITCGFNALEQILQSTAGIYCVGDEVTMADLCLVPQVANAERFKVDLTPYPTISSINKRLLVLEAFQVSHPCRQPDTPTELRA

SEQ ID NO: 967 - DNA, 1145 bp, Homo sapiens
gccagaggcgaccggaaggatctttctagtccagcccctcgctttacccggacgaaagacacgggcctgattcgtcgagtctcactgagccttagtcgtcggcaggtcccaggcgcgaagtttctcggcctggaggagggggtcgcgcgaagtgccagatgcaggcggggaagcccatcctctattcctatttccgaagctcctgctcatggagagttcgaattgctctggccttgaaaggcatcgactacaagacggtgcccatcaatctcataaaggatgggggccaacagttttctaaggacttccaggcactgaatcctatgaagcaggtgccaaccctgaagattgatggaatcaccattcaccagtcaaacctgtctgtcctgaagcaagtgggagaggagatgcagctgacctgggcccagaacgccatcacttgtggctttaacgccctggagcagatcctacagagcacagcgggcatatactgtgtaggagacgaggtgaccatggctgatctgtgcttggtgcctcaggtggcaaatgctgaaagattcaaggtggatctcaccccctaccctaccatcagctccatcaacaagaggctgctggtcttggaggccttccaggtgtctcacccctgccggcagccagatacacccactgagctgagggcctagctcccaaatcctgccccgttggcacagggccacaggagcagaagctgggtgggctgaagaggcctggaaacgagagtcttaattgaggagatgggagactcgaactctagccctggatctgccttcctgctgaaacttgttccacctcagtcccctcatctgtcacacgcatgtggggtggagtagggagatgcggggagcagggtgggcaggaatactgttatctatgtgacggggcagtcgtgaggctgagatgagaatgcggattaaaatgcctggcgtgctcaccgtaacaccacggggaaggctgtgtgccttttctcatccgcttttgttgtgtgtgactccaaagaatgcccgcgctgaaatttggcgtgaattaaactgaagcccaggcctctaaaaaaaaaaaaaaaaaaaaaaaaaaaaaaaaaaaaaaaaaaaaaaaaaaaaaaaaaaaaa

SEQ ID NO: 968 - protein, 174 aa, Homo sapiens
MQAGKPILYSYFRSSCSWRVRIALALKGIDYKTVPINLIKDGGQQFSKDFQALNPMKQVPTLKIDGITIHQSNLSVLKQVGEEMQLTWAQNAITCGFNALEQILQSTAGIYCVGDEVTMADLCLVPQVANAERFKVDLTPYPTISSINKRLLVLEAFQVSHPCRQPDTPTELRA

SEQ ID NO: 969 - DNA, 7185 bp, Homo sapiens
agttgtacgttcgaaacctgtcgccgtcacttgcgcgtttggcattatccattgtcaccgcggaggaacgagcgctcgagatatcatcagtgcccgcaaatctccgcgccaaggcgctgagctactcctttccgaggtgcgcctctggtcctccgtccctggtgcccagcagcggcgaggcggcatctccgctcccgccgccgtgtccaccgagccctgggatcagggtggcagttctcaacgatgggcaggagggacctcggcggcgacccctaaaacaataccatgccccgggatccccgctgctgccgcgccagcgtcttccctttccacctccctgaccctgtcggattcggatgagcccattgcaaggagaagacgcagccgtcagattgcagattgagcttaaccaagaagttcgtaggctaatcaaggctggcttgacctacaaaagaagaagagagttctgcctgcccacttgggcttgtgttgacacggctgataacttgccatcacctgttgccagtgtggaaaaattctccctgttgaattttttgcacatggaggacagcagcaaagagggcaacacaggctgataagaccagagacagcagggagattattttaccatacgccctcaggacgttccctctagctggagttctggacttcaacagaaccccatccagtcattttgattttgctgtttattttttttttctttttctttttcccaccacattgtattttatttccgtacttcagaaatgggcctacagaccacaaagtggcccagccatggggcttttttcctgaagtcttggcttatcatttccctggggctctactcacaggtgtccaaactcctggcctgccctagtgtgtgccgctgcgacaggaactttgtctactgtaatgagcgaagcttgacctcagtgcctcttgggatcccggagggcgtaaccgtactctacctccacaacaaccaaattaataatgctggatttcctgcagaactgcacaatgtacagtcggtgcacacggtctacctgtatggcaaccaactggacgaattccccatgaaccttcccaagaatgtcagagttctccatttgcaggaaaacaatattcagaccatttcacgggctgctcttgcccagctcttgaagcttgaagagctgcacctggatgacaactccatatccacagtgggggtggaagacggggccttccgggaggctattagcctcaaattgttgtttttgtctaagaatcacctgagcagtgtgcctgttgggcttcctgtggacttgcaagagctgagagtggatgaaaatcgaattgctgtcatatccgacatggccttccagaatctcacgagcttggagcgtcttattgtggacgggaacctcctgaccaacaagggtatcgccgagggcaccttcagccatctcaccaagctcaaggaattttcaattgtacgtaattcgctgtcccaccctcctcccgatctcccaggtacgcatctgatcaggctctatttgcaggacaaccagataaaccacattcctttgacagccttctcaaatctgcgtaagctggaacggctggatatatccaacaaccaactgcggatgctgactcaaggggtttttgataatctctccaacctgaagcagctcactgctcggaataacccttggttttgtgactgcagtattaaatgggtcacagaatggctcaaatatatcccttcatctctcaacgtgcggggtttcatgtgccaaggtcctgaacaagtccgggggatggccgtcagggaattaaatatgaatcttttgtcctgtcccaccacgacccccggcctgcctctcttcaccccagccccaagtacagcttctccgaccactcagcctcccaccctctctattccaaaccctagcagaagctacacgcctccaactcctaccacatcgaaacttcccacgattcctgactgggatggcagagaaagagtgaccccacctatttctgaacggatccagctctctatccattttgtgaatgatacttccattcaagtcagctggctctctctcttcaccgtgatggcatacaaactcacatgggtgaaaatgggccacagtttagtagggggcatcgttcaggagcgcatagtcagcggtgagaagcaacacctgagcctggttaacttagagccccgatccacctatcggatttgtttagtgccactggatgcttttaactaccgcgcggtagaagacaccatttgttcagaggccaccacccatgcctcctatctgaacaacggcagcaacacagcgtccagccatgagcagacgacgtcccacagcatgggctccccctttctgctggcgggcttgatcgggggcgcggtgatatttgtgctggtggtcttgctcagcgtcttttgctggcatatgcacaaaaaggggcgctacacctcccagaagtggaaatacaaccggggccggcggaaagatgattattgcgaggcaggcaccaagaaggacaactccatcctggagatgacagaaaccagttttcagatcgtctccttaaataacgatcaactccttaaaggagatttcagactgcagcccatttacaccccaaatgggggcattaattacacagactgccatatccccaacaacatgcgatactgcaacagcagcgtgccagacctggagcactgccatacgtgacagccagaggcccagcgttatcaaggcggacaattagactcttgagaacacactcgtgtgtgcacataaagacacgcagattacatttgataaatgttacacagatgcatttgtgcatttgaatactctgtaatttatacggtgtactatataatgggatttaaaaaaagtgctatcttttctatttcaagttaattacaaacagttttgtaactctttgctttttaaatcttaaaaaaaaaaaagttgctgaagtactgtacagggttgtacaatgagaacccaatgccaaggcaaaaagaacgagtgatttttccttaggatacacatcaaccactttgctgttgaagctgtcagaataaattcctggtggtcagatgaaagggcagattaaatggactcatcagggtaagaggaataatatgggtaaaacaagaaatggcccgatagtttcacactattcctatacctccaggtccggaagacaggtaaaaaattctataatgtaagaatggaggtagttaccctgatttgaccctgtgtgggaaatgctgaaagcaccaggaggaagccggttcccgtgagataagttaacccggcctgacagaatcaagaaaattgagatgagatttgaaaggacccgaaaatgcaggggttggctttctgactgggaacttaaaaatcactcttcatgcttccctggtcctatgtgataacagagttagagacttgagtctgatttcagtcatcttcagggaccagtctgatgttgtagcaagaagactccctttaaaagtgttactgttcaaatcatatatcaggttgaatcacattcaacagagatatattctagaatacttttttagaagaggctaataaagggaagaattatattgaatggaattatttttgataatgagaattatttgggtagattcactgaggctatgtcaacatgatatttagaccaacaggtgatcaatgtttggaaaatacaacaatgacttatttaaaaattacccttcctgctatttagacaaaaacaactgatcagtggttctgttatgtcagctgactttgttagtatcatgttgaaatagcttgaagtaatatcttttatccccttgcaaattcttgtcttccaatcatctcccatatattttcataattagttgtttatgacacctttgtttttctccctctgttcagtatttcaaggaaaattatggatgccagtcttggctgcacaagatatccattacgtacttatacattttaaaatgagtactaattttcactgctaataattctgtaaggacacatcaaagctggccaaaataatgaattttttttaaaaagcaatacctggtttccaccttggactgactttgatcctgttccacttttgaaattttatttgttccttttccatcgtggatgttcctctactttggcaattgtggagggctaatcaatcttatgttagcaggacaacccatgaaaaacaagtcagagagtgaaggctttttcccctaatcctggcagagcagggcgtagaaaagagaggatgtccgtgcttaattctagatacttttgagacaacaccttcagaaaacacataatttaatctttgccatccttagatagagaagggctatagatcacatacgttatcaaaaactactcccttggaaaaaatatctttcgaaaatcaaatttaaacatttcactctgtgctgcatatttcttttaccattgaccattattatagggacccatgaagtaaatgtcacaatcatcttactagctctctctctctcagcaaaataaaactgtgatgtgtcttctttgtaaaagtttaggtataaaatgctatgcaactttttctttatagtaagagctttattttctttaataatatagcccaacttatatgttttaatctcccttgtccctcagaataagcagaaaatataactgcagctgtatgtcgtagacacaagaattgaaactgtgcagtcagtagagctgaacttagctatgaattaatttaaattaattctaaagtgactctggtttccattttagtctattagctagagggttttggctgttgctttttttaaagttaggtccacacagtgaagggaaaagagtctgtgaaggtgatcagtgtagcagtaagacatctaaaatcaagacaatgacatgggggctttgtgtacttagctggataattcccttctactgtcctcttccccttggctgtgtagataaaattgtgcattcaaatgatggtactttgacttttgagggtttttatttctgttattcacaaaatactcattctcatttatgtatattgtatgtttaacccccagtgggatttctggctgctgaaaccactttgggccaggaagaacaaggatgaagaggttcctgtcatttcttatggggttcacagaattatttggggcttaaatggtacaatggagacagtcatgtgcaatgcttaagatggtctgacagggtcccttttgctggaggtgttcctgaagagattgaacctagtaacaggctttattttcaccttgtgtacaacatggcaaagactgctaagattaaaatccgtctcccatttgttacagcctcacctgcaccaggatagaaagcacgtgatggaatctgtgatgtctaatgtgtcttatgaaaattgccaaacaactgtccctggggattctgctttgattggcatttttagtcatgggaatgtatatttgctgatatatctgctctgtgtttgggcctctcttgctgtcattatgatgtattttgagatgattagtcaagagtcaaggttgcgagtacaggccaagaccatgggaaaaaaagccatgctcactggccaataaagagcttgatgctgcctggccaaatgaggtgactcagatagaatctgatcccattcagagcttggtaaatgtcactgtacagaagacattgaaaaggaagaggcatagtcatgatcaaaaggatatattgacagttatctatagccagggtagttgttaatacctgcttgtttggggagatatgtttgattatagagagactctgggccaccctcaaacaccgtcagatgcattagcagcccactgcatgggacaatcgcaggcagatacgaggaatgtatcccctgcctattttccttgtgtaacaaatggaaaacattctcccctgtgagaaataatgcaatttctaattatctggatgttcgttgaaaatatattagacattctccctgaggttaaaaacaaaaagtacgtgaccagtctggtaagaagtattaatgaagtagctaatattacagcttcattttctactagcacctatcataatggtcttagtcatttcacacaaatcagaacttccttccccaccagggaggacaacatcttcatgctgtgattgaagcatccattcagaacacgaggcaatattgcagtccacagggaatggatgcttcacttgatctccggaccttggctgcagaggccatcgcagcttttgaaaagtgaaggggttaattcccattggtgtctttgcttatagcatttttctctaacctataacaaggagacattacattttactttagaacatgagaatagcagttttgctcatgacttaccattccagctgcatgggaaagcaaagcagaaaacagtgccccaaatggaaaaaagatactcacacagaacaaaacagttcttggtcttgttcttggtcttgtcaaaccttgcctgatgctctttctaaagtcaaaatatgaatgctaagaaggcataacctacatccttctctgatttcttcagcagggtcaaaagacagttactagcaatggggaatgcttgtcactgtggagaaagagttttgtatatgtctgataccgttgttataacaaaacaaatttttttactatagttttttgttttctacctgcacacccaccagaagagcacaaagcaaggccattgcaacaggcatttaaaaattattatcaaacatgcacatgcttgtacacacacacacacacacacacaaacaggggcatttgtaaaggtgtccctggaatgtaagatttataatgtttaaggcaaggtgaaggcattgccaagtgtgtgtcgctcataggactagtgtatattcactgaaagttaacctgatgatttgttattgtttgaaccatatgctgatttgcttctggtttctgtttagtgtgttctctctgataaggggctgaaagattctgcatcacacatcctctgagacctaccatgtcgcacactttgttaatgacaaacttcactctacactatacagtaccttgttgatatattcagtaaagtcttattttaaaagaaaaccaaaaaaa

SEQ ID NO: 970 - protein, 660 aa, Homo sapiens
MGLQTTKWPSHGAFFLKSWLIISLGLYSQVSKLLACPSVCRCDRNFVYCNERSLTSVPLGIPEGVTVLYLHNNQINNAGFPAELHNVQSVHTVYLYGNQLDEFPMNLPKNVRVLHLQENNIQTISRAALAQLLKLEELHLDDNSISTVGVEDGAFREAISLKLLFLSKNHLSSVPVGLPVDLQELRVDENRIAVISDMAFQNLTSLERLIVDGNLLTNKGIAEGTFSHLTKLKEFSIVRNSLSHPPPDLPGTHLIRLYLQDNQINHIPLTAFSNLRKLERLDISNNQLRMLTQGVFDNLSNLKQLTARNNPWFCDCSIKWVTEWLKYIPSSLNVRGFMCQGPEQVRGMAVRELNMNLLSCPTTTPGLPLFTPAPSTASPTTQPPTLSIPNPSRSYTPPTPTTSKLPTIPDWDGRERVTPPISERIQLSIHFVNDTSIQVSWLSLFTVMAYKLTWVKMGHSLVGGIVQERIVSGEKQHLSLVNLEPRSTYRICLVPLDAFNYRAVEDTICSEATTHASYLNNGSNTASSHEQTTSHSMGSPFLLAGLIGGAVIFVLVVLLSVFCWHMHKKGRYTSQKWKYNRGRRKDDYCEAGTKKDNSILEMTETSFQIVSLNNDQLLKGDFRLQPIYTPNGGINYTDCHIPNNMRYCNSSVPDLEHCHT

SEQ ID NO: 971 - DNA, 1851 bp, Homo sapiens
atcatttgcatgtctagctggagaataaaaataatatatcatttgcatgtcttagtaatgaagtcatgggtgtcgtggcatgagatcagctggagggagaggagagattaaagtgaggagagagctacaaccaagtaagcaagtgtcagggctcaccaaccatgcaaggacagggcaggagaagaggaacctgcaaagacatattttgttccaaaatggcatcttacctttatggagtactctttgctgttggcctctgtgctccaatctactgtgtgtccccggccaatgcccccagtgcatacccccgcccttcctccacaaagagcacccctgcctcacaggtgtattccctcaacaccgactttgccttccgcctataccgcaggctggttttggagaccccgagtcagaacatcttcttctcccctgtgagtgtctccacttccctggccatgctctcccttggggcccactcagtcaccaagacccagattctccagggcctgggcttcaacctcacacacacaccagagtctgccatccaccagggcttccagcacctggttcactcactgactgttcccagcaaagacctgaccttgaagatgggaagtgccctcttcgtcaagaaggagctgcagctgcaggcaaatttcttgggcaatgtcaagaggctgtatgaagcagaagtcttttctacagatttctccaacccctccattgcccaggcgaggatcaacagccatgtgaaaaagaagacccaagggaaggttgtagacataatccaaggccttgaccttctgacggccatggttctggtgaaccacattttctttaaagccaagtgggagaagccctttcaccctgaatatacaagaaagaacttcccattcctggtgggcgagcaggtcactgtgcatgtccccatgatgcaccagaaagagcagttcgcttttggggtggatacagagctgaactgctttgtgctgcagatggattacaagggagatgccgtggccttctttgtcctccctagcaagggcaagatgaggcaactggaacaggccttgtcagccagaacactgagaaagtggagccactcactccagaaaaggtggatagaggtgttcatccccagattttccatttctgcctcctacaatctggaaaccatcctcccgaagatgggcatccaaaatgtctttgacaaaaatgctgatttttctggaattgcaaagagagactccctgcaggtttctaaagcaacccacaaggctgtgctggatgtcagtgaagagggcactgaggccacagcagctaccaccaccaagttcatagtccgatcgaaggatggcccctcttacttcactgtctccttcaataggaccttcctgatgatgattacaaataaagccacagacggtattctctttctagggaaagtggaaaatcccactaaatcctaggtgggaaatggcctgttaactgatggcacattgctaatgcacaagaaataacaaaccacatccctctttctgttctgagggtgcatttgaccccagtggagctggattcgctggcagggatgccacttccaaggctcaatcaccaaaccatcaacagggaccccagtcacaagccaacacccattaaccccagtcagtgcccttttccacaaattctcccaggtaactagcttcatgggatgttgctgggttaccatatttccattccttggggctcccaggaatggaaatacgccaacccaggttaggcacctctattgcagaattacaataacacattcaataaaactaaaatatgaattcatctgtcaaaaaaaaaaaa

SEQ ID NO: 972 - protein, 435 aa, Homo sapiens
MQGQGRRRGTCKDIFCSKMASYLYGVLFAVGLCAPIYCVSPANAPSAYPRPSSTKSTPASQVYSLNTDFAFRLYRRLVLETPSQNIFFSPVSVSTSLAMLSLGAHSVTKTQILQGLGFNLTHTPESAIHQGFQHLVHSLTVPSKDLTLKMGSALFVKKELQLQANFLGNVKRLYEAEVFSTDFSNPSIAQARINSHVKKKTQGKVVDIIQGLDLLTAMVLVNHIFFKAKWEKPFHPEYTRKNFPFLVGEQVTVHVPMMHQKEQFAFGVDTELNCFVLQMDYKGDAVAFFVLPSKGKMRQLEQALSARTLRKWSHSLQKRWIEVFIPRFSISASYNLETILPKMGIQNVFDKNADFSGIAKRDSLQVSKATHKAVLDVSEEGTEATAATTTKFIVRSKDGPSYFTVSFNRTFLMMITNKATDGILFLGKVENPTKS

SEQ ID NO: 973 - DNA, 2087 bp, Homo sapiens
ctcccaggtgcctggcagagagtcctcaccagccccctgccggatgtctggctggcatctgaggggactgaacatggcaagaagcaaaacagcagcacaagaaaccagtttcttcatctgaaaccgagcaggctctactccagaacagaacccacagtcccaggcgctgggccttcttcttaagttgggaaatcactcatccccaggagaaaaaaagagcaaaagcttccagtactggggatgtggggagaggttttttaaaaatatcagcccaatatatgggaaaatatgggatgcaggcatccccaggtgtcaagcgtccagatccgtagacacactgggacgatggtgatcagtatcactccctctgactcatcggccctacagagaagacaccatgctggtgcacagtcggtgccaaacccgcgtttgtaaatgaataagtgttgctgccctggtggaagcccagctcatgtggaggaagccagcttgcagagagagcaagaacagagccagcacacacattggagcaaaggcaagggcagatggaaagttctggcggcatcatgccaaggctcccatccgaggcctccctgaaccccactctctcggcgccaccttggatgctgcgggctggtacattccccacttgcaaaactctgtggggctgggttcctctcttttctttccaaatatcccaggaagtggatggttttatccaaattcagcagacgagtaaaaagagtcttcgggaggtgcaatagctttctaggaatgaggatattcttcaaggaaaatgaaccccacactaggcctggccatttttctggctgttctcctcacggtgaaaggtcttctaaagccgagcttctcaccaaggaattataaagctttgagcgaggtccaaggatggaagcaaaggatggcagccaaggagcttgcaaggcagaacatggacttaggctttaagctgctcaagaagctggccttttacaaccctggcaggaacatcttcctatcccccttgagcatctctacagctttctccatgctgtgcctgggtgcccaggacagcaccctggacgagatcaagcaggggttcaacttcagaaagatgccagaaaaagatcttcatgagggcttccattacatcatccacgagctgacccagaagacccaggacctcaaactgagcattgggaacacgctgttcattgaccagaggctgcagccacagcgtaagtttttggaagatgccaagaacttttacagtgccgaaaccatccttaccaactttcagaatttggaaatggctcagaagcagatcaatgactttatcagtcaaaaaacccatgggaaaattaacaacctgatcgagaatatagaccccggcactgtgatgcttcttgcaaattatattttctttcgagccaggtggaaacatgagtttgatccaaatgtaactaaagaggaagatttctttctggagaaaaacagttcagtcaaggtgcccatgatgttccgtagtggcatataccaagttggctatgacgataagctctcttgcaccatcctggaaataccctaccagaaaaatatcacagccatcttcatccttcctgatgagggcaagctgaagcacttggagaagggattgcaggtggacactttctccagatggaaaacattactgtcacgcagggtcgtagacgtgtctgtacccagactccacatgacgggcaccttcgacctgaagaagactctctcctacataggtgtctccaaaatctttgaggaacatggtgatctcaccaagatcgcccctcatcgcagcctgaaagtgggcgaggctgtgcacaaggctgagctgaagatggatgagaggggtacggaaggggccgctggcaccggagcacagactctgcccatggagacaccactcgtcgtcaagatagacaaaccctatctgctgctgatttacagcgagaaaataccttccgtgctcttcctgggaaagattgttaaccctattggaaaataaaggagaattcctgcttgccaaaaaaaaaaaaaaaaaaaaaaaaaaa

SEQ ID NO: 974 - protein, 414 aa, Homo sapiens
MNPTLGLAIFLAVLLTVKGLLKPSFSPRNYKALSEVQGWKQRMAAKELARQNMDLGFKLLKKLAFYNPGRNIFLSPLSISTAFSMLCLGAQDSTLDEIKQGFNFRKMPEKDLHEGFHYIIHELTQKTQDLKLSIGNTLFIDQRLQPQRKFLEDAKNFYSAETILTNFQNLEMAQKQINDFISQKTHGKINNLIENIDPGTVMLLANYIFFRARWKHEFDPNVTKEEDFFLEKNSSVKVPMMFRSGIYQVGYDDKLSCTILEIPYQKNITAIFILPDEGKLKHLEKGLQVDTFSRWKTLLSRRVVDVSVPRLHMTGTFDLKKTLSYIGVSKIFEEHGDLTKIAPHRSLKVGEAVHKAELKMDERGTEGAAGTGAQTLPMETPLVVKIDKPYLLLIYSEKIPSVLFLGKIVNPIGK

SEQ ID NO: 975 - DNA, 3780 bp, Homo sapiens
acatgtccttaaccttggcacaacaaatctctaaatcgattgagacctgtctcagatacttcttggtttacaagatggaggctgaaattaaagagaaagatcctcactcaactcacagaggagcagaatgggaagaggacttagtgagaattccctgaacacaggagaaaaccgaagcccagagagtggatggccaagtccaaggtcacacagccaagtgcatccgagcagcgcaggatccaggtttcctgccccagtgctctttctgcagcccatgccacctgttttcatgctatctcagttcaccttccagctacacacctgcaatcagaaacagaaagtctgagagtgtgtgtggagccaaagaggggacagcagtggtgaggccagtttcatgtcttgtgatttattttctccctttctttttggactttaatcttaagtggacagcaatttggaacagtgtcagcaccttgttggattgtgctgtttgggagaggtgacacagagtattttaaaagagcaggttaagaacttttcacaaggaatcaattgagagaaaataaaatagaaacagactgtcccacatttgggctgagcaccaaacacatttttttttttttttttgagactgagtcttgctctgtcactcaggctggaatgcagtggcgcgatctcggctcactgcagccttcacctcccgggttcaagtgattcttctgcctcagcctcccaagtagctgggattacaggtgcccaccaccatgccaggctaatttttgtatttttagtagagacgaggtttcaccatgttggccaggctggtcttgaactcctgaccaagtgatccacctgcttcggcctcccaaagtgctgggattacaggcacgagccaccgcacctggcctcaaacaagctttttaattgcattcagaagtgcaccaactaggcacagacctctggcatggagacagaatgggaggttcttggtgtctggcctggtcttgcagaaatcagggagttgtggggaccaggcagccactgtgcatcagataggagtttcagcagcaggcaacagaaagcctgccaatgtagctgaaataagaagggcttatttttatccctgaacagaagcttccagcactggttcatcagatcagggcactgagctggcatccccatttatacagttttcctttccttcacctttgtaagatgcctggcacagctctgagcatcaaatatctgtgccatgtgggagcacacgaggggacaagtggggaatagggtctcctctgtcctctgtccccaggctggcttctctcgtggtagaaggacccccacagcaccaggcctcataactaccctgctggtaaactgcaggtgctgtcacggcttcctgccttcgtatatgaaatgttccttggcagctggactgctgtttgtttaccgcacgcacagctctgctgcctcttggttacaccagtgagctattgctccatgacaagccacaccgaaatgtagcaagcacttattgttgcccacatgtgtcaagtcagttgagtgtttctgccaaccggggcctggcttggcccaccttggctgagcttgctctggtgctagggtcagctagacaggtcggcaggagaccagctgctctagaagagcctggacaggatgaattggttctccttccacgtgcatcttgcatccctccagccaaggatttgaacccaggtctcgtctgactccaaatgcaccaagaggatggagcccagagtgacacagaggaagaggcccctggatggatgcatggggaagatcacgggaattacaagtgacatcctgaagtatgatcacaaatgtttcaaattaagccttcctgctaagtttccagaggtgtgtggctcggacgaagtgtttccagaccctgatctactgcatgtcctgcctgttgctggttctttgcagcagtccattgaccaatgctgtctacagcttgagagcctctgcaggccagggctgctctgtgcacatcctacgttactattcaaactgcacagcagcatgaaaaacaggcccttcttttctctcatttacacatatgtgaagaagacacagcaagtgagaaaacgtgaccgaaagccacgcggacaggtggccgcagggccaaacccaacttccgtgatgtgatctggctacagtttggagcccacatatttcaatagttatccccaggcctggcacgtcaaagaggctccagaaatgtttgctgagtgagtgatgaatcagcaatttctgattttctcctaaacttagagaataagtggcttgtctgcagtcacccagggcgtccctgacagaggtacaagtaaagcccagatctctgcatctctggttcaaggccttttgtactacacaccgctgtctctttgtcatcattaaaagcaaggctcaagggacatgttttctagccttagttccccatctacaaaatgggcctcatggaatggaatgtctccacttcactccagcatcaacaagtggggaattctgatggattcaattcgacttctttccatgggcgtgttctaagcagcctctttgttccagaagctgccctcagccagagttggataagccaatcctcactccccagcctcctctggatagggatgaagaccccactggggttggaagtgcagaggcagacaggtgtatggagtcacctgtaaattgattcaagtgagccaggaaagcagcaaaggaaagagaaacctgagtgacgacgtggtggaggaacagggctggaaagaggctgctggctgtctggcttcgcagctctggcctcctaatcagcctcgctcttgtctctggtgttctctggctcttgtccatctgtctgtgtttctttttgccagctattgactaatctttgctgaagctgagctagaattctggtgtttataagcaggtaactagctgagcactagttgataactttggagttagtggataaccacagggctgggctactaagctttttcagttgaaaaataaataaataaataaataaacaccacacccagctaatttttgtatttttagtagagacagggtttcaccgtgttagccaggatggactccatctcctgacctcgtgatccgcctacctcggcctcccaaagtgctgggattacaggcgtgagccaccacgcccggtcacctttgtcctgttttctacaggttagaagcaaggcacaagtcatacctacattcaaggagaggggaccatgcaaaggataaactgcagagagacaacagatttacatcccagacacattcacactgggccaagagcagctgccattgcagattcgagtcacgtccttttttccttccttctccttcttggagttacaacagaagctggggaggtgagagtgcagaaaggacgtggatgaagcagagaggcacgtgcctgtctcattcgcctctggatctgctgcatccaggactgtgccagcacaaagtgggagcccgataaatatttattgaagaaatgaaaggtgacaaaaggcagaaggagggagaccccaaaaagagcagcacaggaagctgccccctcaaacactaaaggctcctggagctattcacagtgctggggaacaaccagaggaggaggaggacagagggagagaatactttttttaaaaatcccaaacaaaaccaaattctatacatgtatatctcgagtgagtaaatgtgtaacactcagca

SEQ ID NO: 976 - protein, 141 aa, Homo sapiens
MEPRVTQRKRPLDGCMGKITGITSDILKYDHKCFKLSLPAKFPEVCGSDEVFPDPDLLHVLPVAGSLQQSIDQCCLQLESLCRPGLLCAHPTLLFKLHSSMKNRPFFSLIYTYVKKTQQVRKRDRKPRGQVAAGPNPTSVM

SEQ ID NO: 977 - DNA, 4232 bp, Homo sapiens
acatgtccttaaccttggcacaacaaatctctaaatcgattgagacctgtctcagatacttcttggtttacaagatggaggctgaaattaaagagaaagatcctcactcaactcacagaggagcagaatgggaagaggacttagtgagaattccctgaacacaggagaaaaccgaagcccagagagtggatggccaagtccaaggtcacacagccaagtgcatccgagcagcgcaggatccaggtttcctgccccagtgctctttctgcagcccatgccacctgttttcatgctatctcagttcaccttccagctacacacctgcaatcagaaacagaaagtctgagagtgtgtgtggagccaaagaggggacagcagtggtgaggccagtttcatgtcttgtgatttattttctccctttctttttggactttaatcttaagtggacagcaatttggaacagtgtcagcaccttgttggattgtgctgtttgggagaggtgacacagagtattttaaaagagcaggttaagaacttttcacaaggaatcaattgagagaaaataaaatagaaacagactgtcccacatttgggctgagcaccaaacacatttttttttttttttttgagactgagtcttgctctgtcactcaggctggaatgcagtggcgcgatctcggctcactgcagccttcacctcccgggttcaagtgattcttctgcctcagcctcccaagtagctgggattacaggtgcccaccaccatgccaggctaatttttgtatttttagtagagacgaggtttcaccatgttggccaggctggtcttgaactcctgaccaagtgatccacctgcttcggcctcccaaagtgctgggattacaggcacgagccaccgcacctggcctcaaacaagctttttaattgcattcagaagtgcaccaactaggcacagacctctggcatggagacagaatgggaggttcttggtgtctggcctggtcttgcagaaatcagggagttgtggggaccaggcagccactgtgcatcagataggagtttcagcagcaggcaacagaaagcctgccaatgtagctgaaataagaagggcttatttttatccctgaacagaagcttccagcactggttcatcagatcagggcactgagctggcatccccatttatacagttttcctttccttcacctttgtaagatgcctggcacagctctgagcatcaaatatctgtgccatgtgggagcacacgaggggacaagtggggaatagggtctcctctgtcctctgtccccaggctggcttctctcgtggtagaaggacccccacagcaccaggcctcataactaccctgctggtaaactgcaggtgctgtcacggcttcctgccttcgtatatgaaatgttccttggcagctggactgctgtttgtttaccgcacgcacagctctgctgcctcttggttacaccagtgagctattgctccatgacaagccacaccgaaatgtagcaagcacttattgttgcccacatgtgtcaagtcagttgagtgtttctgccaaccggggcctggcttggcccaccttggctgagcttgctctggtgctagggtcagctagacaggtcggcaggagaccagctgctctagaagagcctggacaggatgaattggttctccttccacgtgcatcttgcatccctccagccaaggatttgaacccaggtctcgtctgactccaaatgcaccaagaggatggagcccagagtgacacagaggaagaggcccctggatggatgcatggggaagatcacgggaattacaagtgacatcctgaagtatgatcacaaatgtttcaaattaagccttcctgctaagtttccagaggtgtgtggctcggacgaagtgtttccagaccctgatctactgcatgtcctgcctgttgctggttctttgcagcagtccattgaccaatgctgtctacagcttgagagcctctgcaggccagggctgctctgtgcacatcctacgttactattcaaactgcacagcagcatgaaaaacaggcccttcttttctctcatttacacatatgtgaagaagacacagcaagtgagaaaacgtgaccgaaagccacgcggacaggtggccgcagggccaaacccaacttccgtgatgtgatctggctacagtttggagcccacatatttcaatagttatccccaggcctggcacgtcaaagaggctccagaaatgtttgctgagtgagtgatgaatcagcaatttctgattttctcctaaacttagagaataagtggcttgtctgcagtcacccagggcgtccctgacagaggtacaagtaaagcccagatctctgcatctctggttcaaggccttttgtactacacaccgctgtctctttgtcatcattaaaagcaaggctcaagggacatgttttctagccttagttccccatctacaaaatgggcctcatggaatggaatgtctccacttcactccagcatcaacaagtggggaattctgatggattcaattcgacttctttccatgggcgtgttctaagcagcctctttgttccagaagctgccctcagccagagttggataagccaatcctcactccccagcctcctctggatagggatgaagaccccactggggttggaagtgcagaggcagacaggtgtatggagtcacctgtaaattgattcaagtgagccaggaaagcagcaaaggaaagagaaacctgagtgacgacgtggtggaggaacagggctggaaagaggctgctggctgtctggcttcgcagctctggcctcctaatcagcctcgctcttgtctctggtgttctctggctcttgtccatctgtctgtgtttctttttgccagctattgactaatctttgctgaagctgagctagaattctggtgtttataagcaggtaactagctgagcactagttgataactttggagttagtggataaccacagggctgggctactaagctttttcagttgaaaaataaataaataaataaataaacaccacacccagctaatttttgtatttttagtagagacagggtttcaccgtgttagccaggatggactccatctcctgacctcgtgatccgcctacctcggcctcccaaagtgctgggattacaggcgtgagccaccacgcccggtcacctttgtcctgttttctacaggttagaagcaaggcacaagtcatacctacattcaaggagaggggaccatgcaaaggataaactgcagaaaggacgtggatgaagcagagaggcacgtgcctgtctcattcgcctctggatctgctgcatccaggactgtgccagcacaaagtgggagcccgataaatatttattgaagaaatgaaaggtgacaaaaggcagaaggagggagaccccaaaaagagttacactggaagaagagcccctccttccttcaagccaagtcatccccttgggctctcaccacttcagtttataccttgcctgtagtccagtctctccagcatcaattccatcagcacaaagacataatttaattccttctaccttaaaaaaaaaaaaaaaaaaaaaacagctctccctctcttagggtgagatgaagtggttggcaacaggccaatgctactttcagaggcgtttgaatcagagtgactccattttgaataggggttgagtaaaataaggctgagacctactgggctgcattcccatgagcttaggcattctaagtcacaggatgagacaggaggtcagcacaagatacacgtcacaaagaccttgctgataaaacagattgtgataagaaaagccagtcaaaacccaccaaaaccaagatggcgacaaaagtgatctctggttgtcctcactgctgattattcactaattataaaattaacatgataaaagacactcccaccagcaccgtgacagtttacaaatgacatggacacatcaggaagttaccctatatgtctaaaaggggaggagccctccattccaattgtccacccctttcctggaaaactcatgaataatccaccccttgtttagcatataatcaagaaataaccatgaaaatagccaaccagcagccctcagggctgctttgcctatggagtagccattctatattcctttactttcttaataaacttgctttcacttta

SEQ ID NO: 978 - protein, 141 aa, Homo sapiens; identical to SEQ ID NO: 976

SEQ ID NO: 979 - DNA, 3398 bp, Homo sapiens
acatgtccttaaccttggcacaacaaatctctaaatcgattgagacctgtctcagatacttcttggtttacaagatggaggctgaaattaaagagaaagatcctcactcaactcacagaggagcagaatgggaagaggacttagtgagaattccctgaacacaggagaaaaccgaagcccagagagtggatggccaagtccaaggtcacacagccaagtgcatccgagcagcgcaggatccaggtttcctgccccagtgctctttctgcagcccatgccacctgttttcatgctatctcagttcaccttccagctacacacctgcaatcagaaacagaaagtctgagagtgtgtgtggagccaaagaggggacagcagtggtgaggccagtttcatgtcttgtgatttattttctccctttctttttggactttaatcttaagtggacagcaatttggaacagtgtcagcaccttgttggattgtgctgtttgggagaggtgacacagagtattttaaaagagcaggttaagaacttttcacaaggaatcaattgagagaaaataaaatagaaacagactgtcccacatttgggctgagcaccaaacacatttttttttttttttttgagactgagtcttgctctgtcactcaggctggaatgcagtggcgcgatctcggctcactgcagccttcacctcccgggttcaagtgattcttctgcctcagcctcccaagtagctgggattacaggtgcccaccaccatgccaggctaatttttgtatttttagtagagacgaggtttcaccatgttggccaggctggtcttgaactcctgaccaagtgatccacctgcttcggcctcccaaagtgctgggattacaggcacgagccaccgcacctggcctcaaacaagctttttaattgcattcagaagtgcaccaactaggcacagacctctggcatggagacagaatgggaggttcttggtgtctggcctggtcttgcagaaatcagggagttgtggggaccaggcagccactgtgcatcagataggagtttcagcagcaggcaacagaaagcctgccaatgtagctgaaataagaagggcttatttttatccctgaacagaagcttccagcactggttcatcagatcagggcactgagctggcatccccatttatacagttttcctttccttcacctttgtaagatgcctggcacagctctgagcatcaaatatctgtgccatgtgggagcacacgaggggacaagtggggaatagggtctcctctgtcctctgtccccaggctggcttctctcgtggtagaaggacccccacagcaccaggcctcataactaccctgctggtaaactgcaggtgctgtcacggcttcctgccttcgtatatgaaatgttccttggcagctggactgctgtttgtttaccgcacgcacagctctgctgcctcttggttacaccagtgagctattgctccatgacaagccacaccgaaatgtagcaagcacttattgttgcccacatgtgtcaagtcagttgagtgtttctgccaaccggggcctggcttggcccaccttggctgagcttgctctggtgctagggtcagctagacaggtcggcaggagaccagctgctctagaagagcctggacaggatgaattggttctccttccacgtgcatcttgcatccctccagccaaggatttgaacccaggtctcgtctgactccaaatgcaccaagaggatggagcccagagtgacacagaggaagaggcccctggatggatgcatggggaagatcacgggaattacaagtgacatcctgaagtatgatcacaaatgtttcaaattaagccttcctgctaagtttccagaggtgtgtggctcggacgaagtgtttccagaccctgatctactgcatgtcctgcctgttgctggttctttgcagcagtccattgaccaatgctgtctacagcttgagagcctctgcaggccagggctgctctgtgcacatcctacgttactattcaaactgcacagcagcatgaaaaacaggcccttcttttctctcatttacacatatgtgaagaagacacagcaagtgagaaaacgtgaccgaaagccacgcggacaggtggccgcagggccaaacccaacttccgtgatgtgatctggctacagtttggagcccacatatttcaatagttatccccaggcctggcacgtcaaagaggctccagaaatgtttgctgagttagaagcaaggcacaagtcatacctacattcaaggagaggggaccatgcaaaggataaactgcagagagacaacagatttacatcccagacacattcacactgggccaagagcagctgccattgcagattcgagtcacgtccttttttccttccttctccttcttggagttacaacagaagctggggaggtgagagtgcagaaaggacgtggatgaagcagagaggcacgtgcctgtctcattcgcctctggatctgctgcatccaggactgtgccagcacaaagtgggagcccgataaatatttattgaagaaatgaaaggtgacaaaaggcagaaggagggagaccccaaaaagagttacactggaagaagagcccctccttccttcaagccaagtcatccccttgggctctcaccacttcagtttataccttgcctgtagtccagtctctccagcatcaattccatcagcacaaagacataatttaattccttctaccttaaaaaaaaaaaaaaaaaaaaaacagctctccctctcttagggtgagatgaagtggttggcaacaggccaatgctactttcagaggcgtttgaatcagagtgactccattttgaataggggttgagtaaaataaggctgagacctactgggctgcattcccatgagcttaggcattctaagtcacaggatgagacaggaggtcagcacaagatacacgtcacaaagaccttgctgataaaacagattgtgataagaaaagccagtcaaaacccaccaaaaccaagatggcgacaaaagtgatctctggttgtcctcactgctgattattcactaattataaaattaacatgataaaagacactcccaccagcaccgtgacagtttacaaatgacatggacacatcaggaagttaccctatatgtctaaaaggggaggagccctccattccaattgtccacccctttcctggaaaactcatgaataatccaccccttgtttagcatataatcaagaaataaccatgaaaatagccaaccagcagccctcagggctgctttgcctatggagtagccattctatattcctttactttcttaataaacttgctttcacttta

SEQ ID NO: 980 - protein, 141 aa, Homo sapiens; identical to SEQ ID NO: 976

SEQ ID NO: 981 - DNA, 3663 bp, Homo sapiens
acatgtccttaaccttggcacaacaaatctctaaatcgattgagacctgtctcagatacttcttggtttacaagatggaggctgaaattaaagagaaagatcctcactcaactcacagaggagcagaatgggaagaggacttagtgagaattccctgaacacaggagaaaaccgaagcccagagagtggatggccaagtccaaggtcacacagccaagtgcatccgagcagcgcaggatccaggtttcctgccccagtgctctttctgcagcccatgccacctgttttcatgctatctcagttcaccttccagctacacacctgcaatcagaaacagaaagtctgagagtgtgtgtggagccaaagaggggacagcagtggtgaggccagtttcatgtcttgtgatttattttctccctttctttttggactttaatcttaagtggacagcaatttggaacagtgtcagcaccttgttggattgtgctgtttgggagaggtgacacagagtattttaaaagagcaggttaagaacttttcacaaggaatcaattgagagaaaataaaatagaaacagactgtcccacatttgggctgagcaccaaacacatttttttttttttttttgagactgagtcttgctctgtcactcaggctggaatgcagtggcgcgatctcggctcactgcagccttcacctcccgggttcaagtgattcttctgcctcagcctcccaagtagctgggattacaggtgcccaccaccatgccaggctaatttttgtatttttagtagagacgaggtttcaccatgttggccaggctggtcttgaactcctgaccaagtgatccacctgcttcggcctcccaaagtgctgggattacaggcacgagccaccgcacctggcctcaaacaagctttttaattgcattcagaagtgcaccaactaggcacagacctctggcatggagacagaatgggaggttcttggtgtctggcctggtcttgcagaaatcagggagttgtggggaccaggcagccactgtgcatcagataggagtttcagcagcaggcaacagaaagcctgccaatgtagctgaaataagaagggcttatttttatccctgaacagaagcttccagcactggttcatcagatcagggcactgagctggcatccccatttatacagttttcctttccttcacctttgtaagatgcctggcacagctctgagcatcaaatatctgtgccatgtgggagcacacgaggggacaagtggggaatagggtctcctctgtcctctgtccccaggctggcttctctcgtggtagaaggacccccacagcaccaggcctcataactaccctgctggtaaactgcaggtgctgtcacggcttcctgccttcgtatatgaaatgttccttggcagctggactgctgtttgtttaccgcacgcacagctctgctgcctcttggttacaccagtgagctattgctccatgacaagccacaccgaaatgtagcaagcacttattgttgcccacatgtgtcaagtcagttgagtgtttctgccaaccggggcctggcttggcccaccttggctgagcttgctctggtgctagggtcagctagacaggtcggcaggagaccagctgctctagaagagcctggacaggatgaattggttctccttccacgtgcatcttgcatccctccagccaaggatttgaacccaggtctcgtctgactccaaatgcaccaagaggatggagcccagagtgacacagaggaagaggcccctggatggatgcatggggaaggttagaagcaaggcacaagtcatacctacattcaaggagaggggaccatgcaaaggataaactgcagagagacaacagatttacatcccagacacattcacactgggccaagagcagctgccattgcagattcgagtcacgtccttttttccttccttctccttcttggagttacaacagaagctggggaggtgagagtgcagaaaggacgtggatgaagcagagaggcacgtgcctgtctcattcgcctctggatctgctgcatccaggactgtgccagcacaaagtgggagcccgataaatatttattgaagaaatgaaaggtgacaaaaggcagaaggagggagaccccaaaaagagagatgggatcccactatattgcacaggctggtctcaaactcctgagctcaagcgatcctcctgccttggcctcccacggtgctgagactacaggtgtgagccaccactcccagcctgatttatattttataaagaggcaacgatggagtacacagctgagcaatctcttgcatttctggaccttgagcatcaggaagcttagggagggtgaaaactcagaagaaagctcagagttgagacctttgattttttgcccagagagtccagctaacacactttataacccaaaaggccttacaaatatttcagagcagaggcagcatttttgcactggataaacaaaggtacggtaatttcttcatagtttattttcattacaagtaattcttttcctgaagaaaaatttatatttcagatttatttcccctctcaaaggggaggggagttataatattctgtttccatagcaccattcctcaagatcaaacccaggcaggcatttttacagcacacacttccatatgtcattgctaatcctcgcaaccttgaggaaactgaggtgcaaaggggttgaggaatgtgttcaccatcccaaagccaacgaagtgccagaacccaaatccaagcttggctgtctcatccccaaggacgtactctttatgccgttccttatgacttttcatgcagcaggtgcaaggcagcaagaatttggctcttctgacatttatcaggcacctggtatgtgccaggcctactgtaaaccccaagatgacatggtccatgtctatccattcagcatcagagagactgttatcaggacttgaggcctgagacacagccctgaatcagatgcaggcctctggtgtttgcaaaggatgcgtgagtatgtgtatgtgtatgcgtgcattgtgtgtaggggtgtgtgtatgttgggggttgggggcagaaaatgctccctgaactgttggtattaaggcagatctttgatggagggactggggtgtggagacttgaaccctagtttcaaagtggggacctcgaacactagtatggccagcagacaggctggagttgctgaattgtcagctaggtctttaatccactccccttctctaaatcagggtggaattggactcagggctggttcagggctgaggtttccgggggatgaatgattccagacagtgggaaggggtgatggatgatgaacctggcaagtcacaggactatggacttggctgtatgttgcatgtatgtgtaagatctgagttgagacctttgatttttgcccagaaagtccagctaacatactatataagccagtgagaccagccagtgtctgttcattgcctctgccttgcccctatgcctgcccgcctcctatagcaggtccctatagcataatgaaaatgcgaacaaccttttctctggacactggggaatctagtctggtggataaagatggatggctgttaaacgatc

SEQ ID NO: 982 - protein, 105 aa, Homo sapiens
MDAWGRLEARHKSYLHSRRGDHAKDKLQRDNRFTSQTHSHWAKSSCHCRFESRPFFLPSPSWSYNRSWGGESAERTWMKQRGTCLSHSPLDLLHPGLCQHKVGAR

SEQ ID NO: 983 - DNA, 3307 bp, Homo sapiens
gtcaacagccacttcctccctggggcttaacaggcattccttgaagcctgccccgggcagttagtccttcccttttgtgtgaactctcggctgttttcgttgtctgcacacagagcagtggtctagggagcgaagggttttggaatggaccttttcctttcttagcttgctgtagggattgtgcttcagctaagtaaagtggaaaaacagaagtacaaaagcaacagccccagatctaagggcaccgtagctctggaatctggattttattccagattcaaccctcagcagggagttgaagtggtcagccctgtgctttacaaggctgattgggcagcacccatagtagaattgtcaatataaagtaattgaaaggatcagaatccagggttttcgttgtttttaagtttttaagttttaaaaacaaagttgtttttgttcgtttttaagtttacttctctttaatcggtctcactttattgaccaggctggtttcgaactcctgggcttaagtgatttctcctgtctcagcttctcaaagtgctgggattacaggcgtgagccgctgcacccagcccagaatccagttttaaagagtttattcaagccaaaagctgggaatggccatctgagaaacacagactctaggaaaatggggccagggccctgaagttaaaagttaaagtcttgcttacataggcagaaagcaaagacatttagtaaccttgtagaacattttcttgtataacttttcttgttttaactttcttgtttaacattttctatgcaaggctggtttatgagttacaacctataattaattataggttgttcccctgcctccaccttgttttcttttctctacagcttgttttcatttcctttccaatttaagaatgtgtttaacattctatcccagacaatgtgatggtcatgaagtctctgtcagagaggaaagagggagttaatctataatgaagatcaacagtgaagaggaaaggggtcttccctggaacgcttcagtcatatacgacattttacacaacaataatggacctgtgtaaggaggtatgtgtgggagaagattccagaaggtcttgagacactccagatgaaggttggtgtggggctgtgctgctggagcaccagagagtgaaaagaggttatctccctctgtgccaggccagagtgcagtggtgcaatcacggctcactgtagtctcaacctcctgggctcaagagatcctcccacttcagcctcccaagcagctaagactacagttattttattcttatgagcttgtgggctccatctaccaacctctgggcaaatgctcatctgacttccatagacacacagcaagcagacaaccacacaaagaggaagagggagaatatttaccagccatggaacatctgctctgtgcttatatctcatatgcattatctctaattatcaaaagaaggttagaagcaaggcacaagtcatacctacattcaaggagaggggaccatgcaaaggataaactgcagagagacaacagatttacatcccagacacattcacactgggccaagagcagctgccattgcagattcgagtcacgtccttttttccttccttctccttcttggagttacaacagaagctggggaggtgagagtgcagaaaggacgtggatgaagcagagaggcacgtgcctgtctcattcgcctctggatctgctgcatccaggactgtgccagcacaaagtgggagcccgataaatatttattgaagaaatgaaaggtgacaaaaggcagaaggagggagaccccaaaaagagagatgggatcccactatattgcacaggctggtctcaaactcctgagctcaagcgatcctcctgccttggcctcccacggtgctgagactacaggtgtgagccaccactcccagcctgatttatattttataaagaggcaacgatggagtacacagctgagcaatctcttgcatttctggaccttgagcatcaggaagcttagggagggtgaaaactcagaagaaagctcagagttgagacctttgattttttgcccagagagtccagctaacacactttataacccaaaaggccttacaaatatttcagagcagaggcagcatttttgcactggataaacaaaggtacggtaatttcttcatagtttattttcattacaagtaattcttttcctgaagaaaaatttatatttcagatttatttcccctctcaaaggggaggggagttataatattctgtttccatagcaccattcctcaagatcaaacccaggcaggcatttttacagcacacacttccatatgtcattgctaatcctcgcaaccttgaggaaactgaggtgcaaaggggttgaggaatgtgttcaccatcccaaagccaacgaagtgccagaacccaaatccaagcttggctgtctcatccccaaggacgtactctttatgccgttccttatgacttttcatgcagcaggtgcaaggcagcaagaatttggctcttctgacatttatcaggcacctggtatgtgccaggcctactgtaaaccccaagatgacatggtccatgtctatccattcagcatcagagagactgttatcaggacttgaggcctgagacacagccctgaatcagatgcaggcctctggtgtttgcaaaggatgcgtgagtatgtgtatgtgtatgcgtgcattgtgtgtaggggtgtgtgtatgttgggggttgggggcagaaaatgctccctgaactgttggtattaaggcagatctttgatggagggactggggtgtggagacttgaaccctagtttcaaagtggggacctcgaacactagtatggccagcagacaggctggagttgctgaattgtcagctaggtctttaatccactccccttctctaaatcagggtggaattggactcagggctggttcagggctgaggtttccgggggatgaatgattccagacagtgggaaggggtgatggatgatgaacctggcaagtcacaggactatggacttggctgtatgttgcatgtatgtgtaagatctgagttgagacctttgatttttgcccagaaagtccagctaacatactatataagccagtgagaccagccagtgtctgttcattgcctctgccttgcccctatgcctgcccgcctcctatagcaggtccctatagcataatgaaaatgcgaacaaccttttctctggacactggggaatctagtctggtggataaagatggatggctgttaaacgatc

SEQ ID NO: 984 - protein, 119 aa, Homo sapiens
MEHLLCAYISYALSLIIKRRLEARHKSYLHSRRGDHAKDKLQRDNRFTSQTHSHWAKSSCHCRFESRPFFLPSPSWSYNRSWGGESAERTWMKQRGTCLSHSPLDLLHPGLCQHKVGAR

SEQ ID NO: 985 - DNA, 2194 bp, Homo sapiens
gtcaacagccacttcctccctggggcttaacaggcattccttgaagcctgccccgggcagttagtccttcccttttgtgtgaactctcggctgttttcgttgtctgcacacagagcagtggtctagggagcgaagggttttggaatggaccttttcctttcttagcttgctgtagggattgtgcttcagctaagtaaagtggaaaaacagaagtacaaaagcaacagccccagatctaagggcaccgtagctctggaatctggattttattccagattcaaccctcagcagggagttgaagtggtcagccctgtgctttacaaggctgattgggcagcacccatagtagaattgtcaatataaagtaattgaaaggatcagaatccagggttttcgttgtttttaagtttttaagttttaaaaacaaagttgtttttgttcgtttttaagtttacttctctttaatcggtctcactttattgaccaggctggtttcgaactcctgggcttaagtgatttctcctgtctcagcttctcaaagtgctgggattacaggcgtgagccgctgcacccagcccagaatccagttttaaagagtttattcaagccaaaagctgggaatggccatctgagaaacacagactctaggaaaatggggccagggccctgaagttaaaagttaaagtcttgcttacataggcagaaagcaaagacatttagtaaccttgtagaacattttcttgtataacttttcttgttttaactttcttgtttaacattttctatgcaaggctggtttatgagttacaacctataattaattataggttgttcccctgcctccaccttgttttcttttctctacagcttgttttcatttcctttccaatttaagaatgtgtttaacattctatcccagacaatgtgatggtcatgaagtctctgtcagagaggaaagagggagttaatctataatgaagatcaacagtgaagaggaaaggggtcttccctggaacgcttcagtcatatacgacattttacacaacaataatggacctgtgtaaggaggtatgtgtgggagaagattccagaaggtcttgagacactccagatgaaggttggtgtggggctgtgctgctggagcaccagagagtgaaaagaggttatctccctctgtgccaggccagagtgcagtggtgcaatcacggctcactgtagtctcaacctcctgggctcaagagatcctcccacttcagcctcccaagcagctaagactacagacatgtccttaaccttggcacaacaaatctctaaatcgattgagacctgtctcagatacttcttggtttacaagatggaggctgaaattaaagagaaagatcctcactcaactcacagaggagcagaatgggaagaggacttagtgagaattccctgaacacaggagaaaaccgaagcccagagagtggatggccaagtccaaggtcacacagccaagtgcatccgagcagcgcaggatccaggtttcctgccccagtgctctttctgcagcccatgccacctgttttcatgctatctcagttcaccttccagctacacacctgcaatcagaaacagaaagtctgagagtgtgtgtggagccaaagaggggacagcagtggttagaagcaaggcacaagtcatacctacattcaaggagaggggaccatgcaaaggataaactgcagagagacaacagatttacatcccagacacattcacactgggccaagagcagctgccattgcagattcgagtcacgtccttttttccttccttctccttcttggagttacaacagaagctggggaggtgagagtgcagaaaggacgtggatgaagcagagaggcacgtgcctgtctcattcgcctctggatctgctgcatccaggactgtgccagcacaaagtgggagcccgataaatatttattgaagaaatgaaaggtgacaaaaggcagaaggagggagaccccaaaaagagcagcacaggaagctgccccctcaaacactaaaggctcctggagctattcacagtgctggggaacaaccagaggaggaggaggacagagggagagaatactttttttaaaaatcccaaacaaaaccaaattctatacatgtatatctcgagtgagtaaatgtgtaacactcagca

SEQ ID NO: 986 - protein, 163 aa, Homo sapiens
MAKSKVTQPSASEQRRIQVSCPSALSAAHATCFHAISVHLPATHLQSETESLRVCVEPKRGQQWLEARHKSYLHSRRGDHAKDKLQRDNRFTSQTHSHWAKSSCHCRFESRPFFLPSPSWSYNRSWGGESAERTWMKQRGTCLSHSPLDLLHPGLCQHKVGAR

SEQ ID NO: 987 - DNA, 1161 bp, Homo sapiens
acacgtgtgagcctagaggcgggtcccggttgcagacttgccatggcctccgaagcttctgtgcgtctaggggtgccccctggccgtctgtggatccagaggcctggcatctacgaagatgaggaggggagaacctgggtgactgtggtcgtgcggttcaatccctcgcgtagggaatgggccagggcctcccagggcagcagatatgaacccagcatcacagtgcacttgtggcagatggcagtgcatacccgggagctactctcctccggccagatgcccttctcccagctgcccgccgtgtggcagctctaccccgggaggaagtaccgagcagcggattccagtttctgggaaatagcagaccatggccagattgactctatggagcagctggtcctaacatatcagccggagaggaaagactgacactgggagtggctggccctgctggccctgcctcttctggcctggtgtctcctcatgccccctcagtgaggatcttcatgtacctgctcttctgtttgcacacccagcatagcctccttgcaggcagaaggcagtagggcccctgcacactcagtttctctcgttttccttagttatcagtcctgtcctgtcccactcaggtctgtacttagggcagctggcctggatgggcttcactggggccctgtctgtgtgctgagccagtttcccctgctggctgcaagctgtgggttctttctcctctgtgcccctcatgctgatcttctagatgccactcccaaatccccttcatacccaccaggatgtgtgcccagccaggcctccagcacccccagtgcagctcgtgattggaaactcaccatcggcaggcagtggttcggtttaagagatggcattagagggagcccagtctggatgtggacttggatgccctgtgggtatcagttctgctgacactttggcccgaaatagatccagtgctgagcaagcaatgtacaccagagcctcagtgagcccatctgcacagtggggagcatggagggatgggtttggcctgtgcttctgcttattcagtccttcagctcacggaagggatgctagtccgtgaaggtgacctcacagtactggttaattaaactttattgctcactgtccaaaaaaaaaaaaaaaaaa

SEQ ID NO: 988 - protein, 128 aa, Homo sapiens
MASEASVRLGVPPGRLWIQRPGIYEDEEGRTWVTVVVRFNPSRREWARASQGSRYEPSITVHLWQMAVHTRELLSSGQMPFSQLPAVWQLYPGRKYRAADSSFWEIADHGQIDSMEQLVLTYQPERKD

SEQ ID NO: 989 - DNA, 1754 bp, Homo sapiens
acacgtgtgagcctagaggcgggtcccggttgcagacttgccatggcctccgaagcttctgtgcgtctaggggtgccccctggccgtctgtggatccagaggcctggcatctacgaagatgaggaggggagaacctgggtgactgtggtcgtgcggttcaatccctcgcgtagggaatgggccagggcctcccagggcagcagatatgaacccagcatcacagtgcacttgtggcagatggcagtgcatacccgggagctactctcctccggccagatgcccttctcccagctgcccgccgtgtggcagctctaccccgggaggaagtaccgagcagcggattccagtttctgggaaatagcagaccatggccagattgactctatggagcagctggtcctaacatatcagccggagaggaaagactgacactgggagtggctggtatgttggggccctgtgcgtctcggtgtagggatcagacgaaagtgagaagacctctcctcttttcagaaagacggcgtggcctcctcctccctgctgtttgctgagatttttcttacatagccacctgtcacctctgttccccagccccttggatgtgatggtacacagtgggtgggcccccataataagttcctaaagcatgggatctcatcgaataagactcatcatttaatccttgtgagaattttgtgaggtgtacgtgttaatgtcccatttcacgacgaaaagacaagactctggggatgggaatgacttcctcgagaccatacagccaggaaatagcggtgaatctagtgatctcgggtccctagatttaaccatggcactgaggtgccgtgtgacggtggccttggaggacccagcactgacccatagagggctcctctcagatgggcagcagcttggagcaggcaggcagggcctggtccattggaggggctggcactggacttgcctttgaccccagcagcttggatggggtgccgggctcccccatagttcactgactgtctcctttggtcttctcgcaggccctgctggccctgcctcttctggcctggtgtctcctcatgccccctcagtgaggatcttcatgtacctgctcttctgtttgcacacccagcatagcctccttgcaggcagaaggcagtagggcccctgcacactcagtttctctcgttttccttagttatcagtcctgtcctgtcccactcaggtctgtacttagggcagctggcctggatgggcttcactggggccctgtctgtgtgctgagccagtttcccctgctggctgcaagctgtgggttctttctcctctgtgcccctcatgctgatcttctagatgccactcccaaatccccttcatacccaccaggatgtgtgcccagccaggcctccagcacccccagtgcagctcgtgattggaaactcaccatcggcaggcagtggttcggtttaagagatggcattagagggagcccagtctggatgtggacttggatgccctgtgggtatcagttctgctgacactttggcccgaaatagatccagtgctgagcaagcaatgtacaccagagcctcagtgagcccatctgcacagtggggagcatggagggatgggtttggcctgtgcttctgcttattcagtccttcagctcacggaagggatgctagtccgtgaaggtgacctcacagtactggttaattaaactttattgctcactgtccaaaaaaaaaaaaaaaaaa

SEQ ID NO: 990 - protein, 128 aa, Homo sapiens; identical to SEQ ID NO: 988

SEQ ID NO: 991 - DNA, 1410 bp, Homo sapiens
gtcctcccgccccgccgcttggtggcggccgcatgctgcccggatataaagggtcggccccacatcccagggaccagcgagcggccttgagaggctctggctcttgcttcttaggcggcccgaggacgccatggccgagtgcccgacactcggggaggcagtcaccgaccacccggaccgcctgtgggcctgggagaagttcgtgtatttggacgagaagcagcacgcctggctgcccttaaccatcgagataaaggataggttacagttacgggtgctcttgcgtcgggaagacgtcgtcctggggaggcctatgacccccacccagataggcccaagcctgctgcctatcatgtggcagctctaccctgatggacgataccgatcctcagactccagtttctggcgcttagtgtaccacatcaagattgacggcgtggaggacatgcttctcgagctgctgccagatgactgatgtatggtcttggcagcacctgtctcctttcaccccagggcctgagcctggccagcctacaatggggatgttgtgtttctgttcaccttcgtttactatgcctgtgtcttctccaccacgctggggtctgggaggaatggacagacagaggatgagctctacccagggcctgcaggacctgcctgtagcccactctgctcgccttagcactaccactcctgccaaggaggattccatttggcagagcttcttccaggtgcccagctatacctgtgcctcggcttttctcagctggatgatggtcttcagcctctttctgtcccttctgtccctcacagcactagtatttcatgttgcacacccactcagctccgtgaacttgtgagaacacagccgattcacctgagcaggacctctgaaaccctggaccagtggtctcacatggtgctacgcctgcatgtaaacacgcctgcaaacgctgcctgccggtaaacacgcctgcaaacgctgcctgcccgtaaacacgcctgcaaacgctgcctgcccacacaggttcacgtgcagctcaaggaaaggcctgaaaggagcccttatctgtgctcaggactcagaagcctctgggtcagtggtccacatcccgggacgcagcaggaggccaggccggcgagccctgtggatgagccctcagaacccttggcttgcccacgtggaaaagggatagaggttgggtttccccccttttatagatggtcacgcacctgggtgttacaaagttgtatgtggcatgaatactttttgtaatgattgattaaatgcaagatagtttatctaacttcgtgcggaatcagcttctatccttgacttagattctggtggagagaagtgagaataggcagcccccaaataaaaaatattcatggaaaaaaaaaaaaaaa

SEQ ID NO: 992 - protein, 114 aa, Homo sapiens
MAECPTLGEAVTDHPDRLWAWEKFVYLDEKQHAWLPLTIEIKDRLQLRVLLRREDVVLGRPMTPTQIGPSLLPIMWQLYPDGRYRSSDSSFWRLVYHIKIDGVEDMLLELLPDD

SEQ ID NO: 993 - DNA, 1847 bp, Homo sapiens
cagctttgcgatccagcagagagggctggagacgggacgaaggccacaacagacccggccctgccagcgggcggtggcgcctccagatcagagccctcgggaaggaggcctgggcgggcctggcccgttcacctgtgtgccctgcagttctgcccgaggctcaactctcaagggcctgggaggggtgctgccggccaagagggtccaggacctcactggactgtgccccacagggagatcccgaagagcctgtttctgtccctcggggagccaggagggaaccaggaccatgttccagtaaatgaggactgcagcaggagccgtgagccctgactcccggccagagacacgacgtcagaccagaaagaatgaggaggccgcgtggggcccgcgggtgtgcagggcagagagggaggacaacaggaagtgccccccctccatcctgaaacggagccggccggagcaccaccgcccagaggccaagccccagaggacctcgaggcgcgtgtggttccgagaacccccagcggtgaccgtccactacattgctgacaagaacgccacagccactgtcagggtgcccggccggcccaggccacacggcggctccctgctcctgcagctgtgtgtgtgcgtcctgctcgtgctggccctgggcctatactgcggccgggccaagcccgtggcaacggcactggaggacctgcgggcccggctcctcggccttgtcctgcacctgcggcacgtggccctcacctgctggcgcggcctcctgcggctctgacgggcaggacgggcaggacgggcagggcttccaggagagctcaagcactccgggggctccgagacagcctgagccctggccctgctgcttggtgaatcatgggggccaaaaggggctgctgcctgagggctaactaggaaaagggggaccccgtggcgtgagatcggacatggggggcacagcgggcggccccgccacactagtcagcacagccctcctgtctcctgtgttgggtccatgtgagattttattagaaagaggattcgactgctaacagttgaggctccccaggctcacccaaagacccctccctcgtcccagcaggaactcctgctgctgctagggcctggcccggccatcaccgtgtgcaccctcttgaggagggggacacactgcccgtgttcaaggggctgctcggaggaggcaaacccagccttttgcgattatggcttgtggggaatccagacctcgaaaccccacggggagggaagggtctggttgtcaaggtgggtccctttgatgtgaggtgccatcctctgagcccaggtctgacccccctacccagccccgtgagtctggagaggccccagggaaggacccctcatcaggggcggcttcaggtgtagaagccgaggggacagcaaggggcccagacacccccgaccttcagaacagccatctgtgcccagctctgcaggccaggcacacccagctgagcccggggccagccagcaccacccaccagctggggcctgtgggtcccggagaccgtctgtggttgtggctttgtcgccggattgcagagctgaagggagccctgtggatgacaaacaccaggggcctctccagaccctacgtggggggagggctgaacaaagcagggaggcccacggttagacaccaggcagaactgcccaggagagacacagggacaatcagaccagcgtcctcgaggttagcctgaggcgggtgggcacggccgaccatccacccggtggttcctgtttgtcccaccacttaactgggagacactgttttattaaaacacaccgtggcttccttc

SEQ ID NO: 994 - protein, 160 aa, Homo sapiens
MRTAAGAVSPDSRPETRRQTRKNEEAAWGPRVCRAEREDNRKCPPSILKRSRPEHHRPEAKPQRTSRRVWFREPPAVTVHYIADKNATATVRVPGRPRPHGGSLLLQLCVCVLLVLALGLYCGRAKPVATALEDLRARLLGLVLHLRHVALTCWRGLLRL

SEQ ID NO: 995 - DNA, 2200 bp, Homo sapiens
tgtaagcttaaggatctttactttcagtttagccagagtggaattagaacagggatatcattaacagccagccaggacagaagcgaaggcgtctcagaagcaacttggtggaccagcctcaggaaccccgggtcatgcctgcacttcccaccttcctgcctggggagaggcccaatcccctgagggaccctggagagcccacgaccagggccgccagcccctgcccagcacactgcaggcccagctgccccttcccagggcgatgtgtctgggctccggagacagcccagtccagggtgggtctatgtctgcatgcagccgaggatttccatcaccctggccatggggctgttccacacctgctcctgggatccagcagtgcagcccccaagaacagacccaaccggggccaagcctcaggttccagaagccacccctgcctcctgcccctccttcagggccctagatggctgtggcctggatcagggctgggcagagggtgaggcaggagccaccccaccttctgctggggacacagacaaggagctctccggactggaaagagtccccatgtccagtgggtcagggctggaaggggagacaggggaccccatcagcttagggggcctcggattctgtccaaaccccttccctcgaggacctggctgccagctggaaactcagctggtccccaaggccagagcccccttgagcttccagagcctcgatccccctggacttgacacccccgatgggcacctgccagcctcactcccgggacccaggatgatgcccccaccaggaccctccatgtggacccaggcacgtggcctccaggaggctggtgcccagccacccagagacacaagccagctgctgatggtggacagggtgggtcatgaactcagggagccaggggctcgcctctccccgggaaggtgggcgcagcagcagggagcacttggcagcactcgagccaagaaacggacagcccctcatcgagccccgggtggggaggccccccgcctccgcccccgccccagaacgagtcctctggaggtggaccctgggctttcctgaggggcagggtccacagccaagcagccccctacgccggggtcccaggttcacatcccagctcctccacttgcttctgcggggcctcagcacacagactctgcagaatgggaaggcagctccctcctctctcaggtggatgctgggcgtgggagcccatgggaggggcagaggggctgtccacacagcacccacggctcccatcacgcacacaatgctcacacgcacaggcgtgcacatgctcacatgcaacacacgcacattcacatgcacttacgcacatgctgcacacactgcagacacacctgcctagacactcacacctacacactcttcctcacactcacatgcatgcacactcatgtcacagggagtcacaccctcacactcacatcctcccaggcacactcacaatcaagccttcacacgcacaacagtcacaccctcacatgcagtcacacccacatgcacactcatgcacaatcacatcctcccaggcagtcactcgcacatgcagtcacacattcactcacaggcagtcacactctcatgcactcagtcacaccctcacatgcacactcatgcacactcatatcctcccatgcagtcacacactctcacatgcagtcacaccctctcgtgcacactcagtgacaccttcacatgcagtcacacctgcactgtcacacccacacatgcacactcagtcacatcctctcatgcactcatatacacaatcacaccctcccatgcacaaaggcactcacaatcacatcctcccatactcacccacacacagacccctgccatggctcctggcccagtcctctatgtggtacgtgtgcccccgaaatccccaaccagatgatgcccccgattctgtggagcccagattaccacttccctgaccctcagccaagcacagacaggacccacacacagtgaggtgaactcacaggcctcagaagcctccctgagcccggccacagggtctcccaggcctatggcacccacccaggagggggactcagctggggagggggccaacctggggccagaggctggaaggtgccgtgagctcctccccacacgcagcctctgcctggatggcagaattcatgca

SEQ ID NO: 996 - protein, 255 aa, Homo sapiens [sequence omitted]

SEQ ID NO: 997 - DNA, 1623 bp, Homo sapiens
gctctcgcccgggccggccatggcgctcaacaatttccttttcgctcagtgcgcctgctacttcttggccttcctgttcagcttcgtggtggtggtcccgctgtccgagaacggccacgacttccgcggccgctgcctgctcttcaccgagggcatgtggctgagcgccaacctcacggtgcaggagcgcgagcgcttcacggtgcaggagtggggcccgccggccgcctgccgcttcagcctgctcgccagcctcctgtctctgctgctggccgccgcgcacgcctggcgcacgctcttcttcctatgcaagggacacgagggctccttcttctccgccttcctgaacctcctggtcagcgccttcgtggtcttcctggtcttcattgccagcaccatcgtgagcgtgggcttcaccatgtggtgcgacaccatcaccgagaagggcaccgtaccccacagctgtgaagagctccaggacatcgacttggagctgggcgtggacaactccgccttctacgatcagtttgcaattgcccaggtagggggctctgggcaagaagggaggcttgcaatgctgggagggggccatttactgctggacatttgctgagctctcccccatccagaggaggaggcaggctcctgtgtggataaggtagttagcaatgggaccaggcagtgggagcagtcgggaaggcttcctgcaggaggtgggggagagctgggcttttgtaggtgggtttggggaggagatggccacagtgagttagaatcaggaagtggcaaggccctggggtctggggtgggaagtgtgggggtgtggggggaggtggtgccagaaacgaaaccaggcatcagatcctgggggtccagtgtagggacaagggctttggactttggtgctggcgctgggtgggcctgttcagatcagagctggaggcttagaggagtcccctagccagggggaagctgatacagagtccaaggaaggaggcaggggatcccacttgtgaattcagatttgccaccctgcccttgtataagctgcgtcccccgccccctaggagacttggtggagggcgatggtggcccccactctgagggacgctatttgctgaaatgcaggcatgtggggacacatcagtggcccgtgagggccggagggggaaccctggaattgggtttgccccttgaaatctgcagatgtgccccagacggagatgaggcagatgaggggtgccgggtgggggtggctgagaccagacacctggctcctgccagcactgatcagggcccgctggcttcaggtccaattccggaccccaggctggcctctgaaggctcttgctggccgtggctggcctgaggacgcttctcctggccaggagccctccaagggtgctggacgtgggtgggcctgaatgctctttgccgagatgaactggacctgtcaaagacaccttcatgcaaatttagtgagtggaagaggcctcaggcctaatttgtgccagttggattaaggtgtgagtgcagtctgatggcaaatacgctcaaatgagaatcagcttaatgtagctcaggcctggttctgattaaattgtttctccttcaactgtttgg

SEQ ID NO: 998 - protein, 197 aa, Homo sapiens
MALNNFLFAQCACYFLAFLFSFVVVVPLSENGHDFRGRCLLFTEGMWLSANLTVQERERFTVQEWGPPAACRFSLLASLLSLLLAAAHAWRTLFFLCKGHEGSFFSAFLNLLVSAFVVFLVFIASTIVSVGFTMWCDTITEKGTVPHSCEELQDIDLELGVDNSAFYDQFAIAQVGGSGQEGRLAMLGGGHLLLDIC

SEQ ID NO: 999 - DNA, 4668 bp, Homo sapiens
cgccccgcgcccgccaggagccaccgtccgagccttgcggagcgcggcagtgggcgccggctgcccgcagcccctgacccggccccggacggagcgccggccgcaccaccgccctctggccgttgcctcaccggctcggcaagatgtcggtgaaggagggcgcacagcgcaagtgggcagcgctgaaggagaagctggggccacaggattcggaccccacggaggccaacctggagagcgcggaccccgagctgtgcatccggctgctccagatgccctctgtggtcaactactccggcctgcgcaagcgcctggagggcagcgacggcggctggatggtgcagttcctggagcagagcggcctggacctgctgctggaggcgctggcgcggctgtcgggccgcggcgttgcacgtatctccgacgccctgctgcagctcacctgcgtcagctgcgtgcgcgccgtcatgaactcgcggcagggcatcgagtacatcctcagcaaccagggctacgtgcgccagctctcccaggccctggacacatccaacgtgatggtgaagaagcaggtgtttgagctactggctgccctgtgcatctactctcccgagggccacgtgctgaccctggacgccctggaccactacaagacggtgtgcagccagcagtaccgcttcagcattgtcatgaacgagctctccggcagcgacaacgtgccctacgtggtcaccctgcttagcgtgatcaacgccgtcatcttgggccccgaggacctgcgcgcgcgcacccagctgcggaacgagtttatcgggctgcagctgctggacgtcctggctcgcctgcgagacctggaggatgccgacctgctgatccagctggaggctttcgaggaggctaaggccgaggacgaggaggagctgctgcgagtctctggcggggtcgacatgagcagccaccaggaggtctttgcctccctgttccacaaggtgagctgctccccggtgtctgcccagctcctgtcggtgctgcagggcctcctgcacctggagcccaccctccgctccagccagctgctctgggaggccctggagagcctcgtgaaccgggccgtgctcctggccagcgatgcccaggaatgcaccctggaggaagtggttgagcggctcctgtctgtcaaggggcgacccagaccgagccccctggtcaaggcccataaaagcgtccaggccaacctagaccagagccagaggggcagctccccgcaaaacactacaacccccaagcccagcgtggagggccagcagccagcagcagctgctgcctgcgagcccgtggaccacgcccagagtgagagcatcctgaaagtttcgcagcccagagccctggagcagcaggcgtccaccccacccccacccccacccccacccctgctccctggttccagtgccgagccccctccccctcccccaccaccccccctgcccagtgtgggggctaaggccctcccaacagcacccccgcccccacccctgccaggcctgggggccatggcccccccagcacctcctctaccaccacccctgccaggctcctgtgagttcctgcccccaccacctccaccactcccgggcttgggatgcccgcccccacccccacccctgctgcctggtatgggctggggccctcctccacccccacctccactactgccctgcacctgcagcccccccgtggcgggaggcatggaggaggtcatcgtggcccaggtggaccatggcttgggctcagcatgggtccccagccatcggcgggtgaacccacccacactgcgcatgaagaagctgaactggcagaagctgccatccaacgtggcacgtgagcacaactctatgtgggcgtccctgagcagccccgacgccgaggctgtggagcccgacttctccagcatcgagcgactattctccttccctgcagccaagcccaaggagcccaccatggtggccccccgggccaggaaggagcccaaggagatcactttcctcgatgccaagaagagcctgaacctcaacatcttcctgaagcaatttaagtgctccaacgaggaggtcgctgctatgatccgggctggagataccaccaagtttgatgtggaggttctcaaacaactccttaagctccttcccgagaagcacgagattgaaaacctgcgggcattcacagaggagcgagccaagctggccagcgccgaccacttctacctcctcctgctggccattccctgctaccagctgcgaatcgagtgcatgctgctgtgtgagggcgcggccgccgtgctggacatggtgcggcccaaggcccagctggtgctggctgcctgcgaaagcctgctcaccagccgccagctgcccatcttctgccagctgatcctgagaattgggaacttcctcaactacggcagccacaccggtgacgccgacggcttcaagatcagcacattgctgaagctcacggagaccaagtcccagcagaaccgcgtgacgctgctgcaccacgtgctggaggaagcggaaaagagccaccccgacctcctgcagctgccccgggacctggaacagccctcgcaagcagcagggatcaacctggagatcatccgctcagaggccagctccaacctgaagaagcttctggagaccgagcggaaggtgtctgcctccgtggccgaggtccaggagcagtacaccgagcgcctccaggccagcatctcggccttccgggcactggatgagctgtttgaggccatcgagcagaagcaacgggagctggccgactacctgtgtgaggacgcccagcagctgtccctggaggacacgttcagcaccatgaaggctttccgggaccttttcctccgcgccctgaaggagaacaaggaccggaaggagcaggcggcgaaggcagagaggaggaagcagcagctggcggaggaggaggcgcggcggcctcggggagaggacgggaagcctgtcaggaaggggcccgggaagcaggaggaggtgtgtgtcatcgatgccctgctggctgacatcaggaagggcttccagctgcggaagacagcccggggccgcggggacaccgacgggggcagcaaggcagcctccatggatcccccaagagccacagagcctgtggccaccagtaaccctgcaggagatcccgtgggcagcacgcgctgtcccgcctctgagcccggccttgatgctacaacagccagcgagtcccggggctgggaccttgtagacgccgtgacccccggccctcagcccaccctggagcagttggaggagggtggtccacggcccctggagaggcgttcttcctggtatgtggatgccagcgatgtcctaaccactgaggatccccagtgcccccagcccttggagggggcctggccggtgactctgggagatgctcaggccctgaagcccctcaagttctccagcaaccagccccctgcagccggaagttcaaggcaagatgccaaggatcccacgtccttgctgggcgtcctccaggccgaggccgacagcacaagtgaggggctggaggacgctgtccacagccgtggtgccagaccccctgcagcaggcccaggtggggatgaggacgaggacgaggaggacacggccccagagtccgcactggacacatccctggacaagtccttctccgaggatgcggtgaccgactcctcggggtcgggcacactccccagggcccggggccgggcctcaaaggggaccgggaagcgaaggaagaagcgtccctccaggagccaggaaggcctcaggcccaggcccaaggccaagtgagagagcccaggccacaggacatgctgccattctgccaagagaggctcttctgggggccaggctgggactgggccccggaaaccaaaactccgtgccttacccagccggggccctcctggagccttcttggggtgttgtggctgggaacccgacaggcaccagtgccctgccaggcctggtgccctcctggaccgcctgcacgtgccagcctcccacctgcttcctaaaggcaaccctggcccacacccgcatgcgcccggtgcagcctgccaagggccagtcggggggtgctgcgtcctgccagtgtccaccacagctctgcctgcccttcagcccagcaaggtttaatcaaaatgcaatgctttgcaagtctttactgcttggaggtggctgagttgggggccctgggcaggggtaagctggcaggcagtgccatggcaggccagggtcccctcccatggggtctggcccccgttccagcatgtccagcccctgaagttggagtggggggcggtctgcctttgctgccactgccaggcctctgccctgcagctgaaacttggccatcacatcaacagaaaacccctcccagtgccagctgcccagcgtgggcaggccctggggacaatacaggtccacctgaggggctgcagggtgacacccagcagccgctgccccctcactgcccacccagcgagggcagcctacccgagcctgccccctgccaggtgtgtgccctgaggctggcggctggatgcgtggccaataaaaagcagacctagcccggaaaaaaaaaaaaaaa

SEQ ID NO: 1000 - protein, 1240 aa, Homo sapiens
MSVKEGAQRKWAALKEKLGPQDSDPTEANLESADPELCIRLLQMPSVVNYSGLRKRLEGSDGGWMVQFLEQSGLDLLLEALARLSGRGVARISDALLQLTCVSCVRAVMNSRQGIEYILSNQGYVRQLSQALDTSNVMVKKQVFELLAALCIYSPEGHVLTLDALDHYKTVCSQQYRFSIVMNELSGSDNVPYVVTLLSVINAVILGPEDLRARTQLRNEFIGLQLLDVLARLRDLEDADLLIQLEAFEEAKAEDEEELLRVSGGVDMSSHQEVFASLFHKVSCSPVSAQLLSVLQGLLHLEPTLRSSQLLWEALESLVNRAVLLASDAQECTLEEVVERLLSVKGRPRPSPLVKAHKSVQANLDQSQRGSSPQNTTTPKPSVEGQQPAAAAACEPVDHAQSESILKVSQPRALEQQASTPPPPPPPPLLPGSSAEPPPPPPPPPLPSVGAKALPTAPPPPPLPGLGAMAPPAPPLPPPLPGSCEFLPPPPPPLPGLGCPPPPPPLLPGMGWGPPPPPPPLLPCTCSPPVAGGMEEVIVAQVDHGLGSAWVPSHRRVNPPTLRMKKLNWQKLPSNVAREHNSMWASLSSPDAEAVEPDFSSIERLFSFPAAKPKEPTMVAPRARKEPKEITFLDAKKSLNLNIFLKQFKCSNEEVAAMIRAGDTTKFDVEVLKQLLKLLPEKHEIENLRAFTEERAKLASADHFYLLLLAIPCYQLRIECMLLCEGAAAVLDMVRPKAQLVLAACESLLTSRQLPIFCQLILRIGNFLNYGSHTGDADGFKISTLLKLTETKSQQNRVTLLHHVLEEAEKSHPDLLQLPRDLEQPSQAAGINLEIIRSEASSNLKKLLETERKVSASVAEVQEQYTERLQASISAFRALDELFEAIEQKQRELADYLCEDAQQLSLEDTFSTMKAFRDLFLRALKENKDRKEQAAKAERRKQQLAEEEARRPRGEDGKPVRKGPGKQEEVCVIDALLADIRKGFQLRKTARGRGDTDGGSKAASMDPPRATEPVATSNPAGDPVGSTRCPASEPGLDATTASESRGWDLVDAVTPGPQPTLEQLEEGGPRPLERRSSWYVDASDVLTTEDPQCPQPLEGAWPVTLGDAQALKPLKFSSNQPPAAGSSRQDAKDPTSLLGVLQAEADSTSEGLEDAVHSRGARPPAAGPGGDEDEDEEDTAPESALDTSLDKSFSEDAVTDSSGSGTLPRARGRASKGTGKRRKKRPSRSQEGLRPRPKAK

SEQ ID NO: 1001 - DNA, 4725 bp, Homo sapiens
cgccccgcgcccgccaggagccaccgtccgagccttgcggagcgcggcagtgggcgccggctgcccgcagcccctgacccggccccggacggagcgccggccgcaccaccgccctctggccgttgcctcaccggctcggcaagatgtcggtgaaggagggcgcacagcgcaagtgggcagcgctgaaggagaagctggggccacaggattcggaccccacggaggccaacctggagagcgcggaccccgagctgtgcatccggctgctccagatgccctctgtggtcaactactccggcctgcgcaagcgcctggagggcagcgacggcggctggatggtgcagttcctggagcagagcggcctggacctgctgctggaggcgctggcgcggctgtcgggccgcggcgttgcacgtatctccgacgccctgctgcagctcacctgcgtcagctgcgtgcgcgccgtcatgaactcgcggcagggcatcgagtacatcctcagcaaccagggctacgtgcgccagctctcccaggccctggacacatccaacgtgatggtgaagaagcaggtgtttgagctactggctgccctgtgcatctactctcccgagggccacgtgctgaccctggacgccctggaccactacaagacggtgtgcagccagcagtaccgcttcagcattgtcatgaacgagctctccggcagcgacaacgtgccctacgtggtcaccctgcttagcgtgatcaacgccgtcatcttgggccccgaggacctgcgcgcgcgcacccagctgcggaacgagtttatcgggctgcagctgctggacgtcctggctcgcctgcgagacctggaggatgccgacctgctgatccagctggaggctttcgaggaggctaaggccgaggacgaggaggagctgctgcgagtctctggcggggtcgacatgagcagccaccaggaggtctttgcctccctgttccacaaggtgagctgctccccggtgtctgcccagctcctgtcggtgctgcagggcctcctgcacctggagcccaccctccgctccagccagctgctctgggaggccctggagagcctcgtgaaccgggccgtgctcctggccagcgatgcccaggaatgcaccctggaggaagtggttgagcggctcctgtctgtcaaggggcgacccagaccgagccccctggtcaaggcccataaaagcgtccaggccaacctagaccagagccagaggggcagctccccgcaaaacactacaacccccaagcccagcgtggagggccagcagccagcagcagctgctgcctgcgagcccgtggaccacgcccagagtgagagcatcctgaaagtttcgcagcccagagccctggagcagcaggcgtccaccccacccccacccccacccccacccctgctccctggttccagtgccgagccccctccccctcccccaccaccccccctgcccagtgtgggggctaaggccctcccaacagcacccccgcccccacccctgccaggcctgggggccatggcccccccagcacctcctctaccaccacccctgccaggctcctgtgagttcctgcccccaccacctccaccactcccgggcttgggatgcccgcccccacccccacccctgctgcctggtatgggctggggccctcctccacccccacctccactactgccctgcacctgcagcccccccgtggcgggaggcatggaggaggtcatcgtggcccaggtggaccatggcttgggctcagcatgggtccccagccatcggcgggtgaacccacccacactgcgcatgaagaagctgaactggcagaagctgccatccaacgtggcacgtgagcacaactctatgtgggcgtccctgagcagccccgacgccgaggctgtggagcccgacttctccagcatcgagcgactattctccttccctgcagccaagcccaaggagcccaccatggtggccccccgggccaggaaggagcccaaggagatcactttcctcgatgccaagaagagcctgaacctcaacatcttcctgaagcaatttaagtgctccaacgaggaggtcgctgctatgatccgggctggagataccaccaagtttgatgtggaggttctcaaacaactccttaagctccttcccgagaagcacgagattgaaaacctgcgggcattcacagaggagcgagccaagctggccagcgccgaccacttctacctcctcctgctggccattccctgctaccagctgcgaatcgagtgcatgctgctgtgtgagggcgcggccgccgtgctggacatggtgcggcccaaggcccagctggtgctggctgcctgcgaaagcctgctcaccagccgccagctgcccatcttctgccagctgatcctgagaattgggaacttcctcaactacggcagccacaccggtgacgccgacggcttcaagatcagcacattgctgaagctcacggagaccaagtcccagcagaaccgcgtgacgctgctgcaccacgtgctggaggaagcggaaaagagccaccccgacctcctgcagctgccccgggacctggaacagccctcgcaagcagcagggatcaacctggagatcatccgctcagaggccagctccaacctgaagaagcttctggagaccgagcggaaggtgtctgcctccgtggccgaggtccaggagcagtacaccgagcgcctccaggccagcatctcggccttccgggcactggatgagctgtttgaggccatcgagcagaagcaacgggagctggccgactacctgtgtgaggacgcccagcagctgtccctggaggacacgttcagcaccatgaaggctttccgggaccttttcctccgcgccctgaaggagaacaaggaccggaaggagcaggcggcgaaggcagagaggaggaagcagcagctggcggaggaggaggcgcggcggcctcggggagaggacgggaagcctgtcaggaaggggcccgggaagcaggaggaggtgtgtgtcatcgatgccctgctggctgacatcaggaagggcttccagctgcggaagacagcccggggccgcggggacaccgacgggggcagcaaggcagcctccatggatcccccaagagccacagagcctgtggccaccagtaaccctgcaggagatcccgtgggcagcacgcgctgtcccgcctctgagcccggccttgatgctacaacagccagcgagtcccggggctgggaccttgtagacgccgtgacccccggccctcagcccaccctggagcagttggaggagggtggtccacggcccctggagaggcgttcttcctggtatgtggatgccagcgatgtcctaaccactgaggatccccagtgcccccagcccttggagggggcctggccggtgactctgggagatgctcaggccctgaagcccctcaagttctccagcaaccagccccctgcagccggaagttcaaggcaagatgccaaggatcccacgtccttgctgggcgtcctccaggccgaggccgacagcacaagtgaggggctggaggacgctgtccacagccgtggtgccagaccccctgcagcaggcccaggtggggatgaggacgaggacgaggaggacacggccccagagtccgcactggacacatccctggacaagtccttctccgaggatgcggtgaccgactcctcggggtcgggcacactccccagggcccggggccgggcctcaaaggggaccgggaagcgaaggaagaagcgtccctccaggagccaggaagaggttccccctgattctgatgataataaaacaaagaaactgtgtgtgatccagtaaggcctcaggcccaggcccaaggccaagtgagagagcccaggccacaggacatgctgccattctgccaagagaggctcttctgggggccaggctgggactgggccccggaaaccaaaactccgtgccttacccagccggggccctcctggagccttcttggggtgttgtggctgggaacccgacaggcaccagtgccctgccaggcctggtgccctcctggaccgcctgcacgtgccagcctcccacctgcttcctaaaggcaaccctggcccacacccgcatgcgcccggtgcagcctgccaagggccagtcggggggtgctgcgtcctgccagtgtccaccacagctctgcctgcccttcagcccagcaaggtttaatcaaaatgcaatgctttgcaagtctttactgcttggaggtggctgagttgggggccctgggcaggggtaagctggcaggcagtgccatggcaggccagggtcccctcccatggggtctggcccccgttccagcatgtccagcccctgaagttggagtggggggcggtctgcctttgctgccactgccaggcctctgccctgcagctgaaacttggccatcacatcaacagaaaacccctcccagtgccagctgcccagcgtgggcaggccctggggacaatacaggtccacctgaggggctgcagggtgacacccagcagccgctgccccctcactgcccacccagcgagggcagcctacccgagcctgccccctgccaggtgtgtgccctgaggctggcggctggatgcgtggccaataaaaagcagacctagcccggaaaaaaaaaaaaaaa

SEQ ID NO: 1002 - protein, 1249 aa, Homo sapiens
MSVKEGAQRKWAALKEKLGPQDSDPTEANLESADPELCIRLLQMPSVVNYSGLRKRLEGSDGGWMVQFLEQSGLDLLLEALARLSGRGVARISDALLQLTCVSCVRAVMNSRQGIEYILSNQGYVRQLSQALDTSNVMVKKQVFELLAALCIYSPEGHVLTLDALDHYKTVCSQQYRFSIVMNELSGSDNVPYVVTLLSVINAVILGPEDLRARTQLRNEFIGLQLLDVLARLRDLEDADLLIQLEAFEEAKAEDEEELLRVSGGVDMSSHQEVFASLFHKVSCSPVSAQLLSVLQGLLHLEPTLRSSQLLWEALESLVNRAVLLASDAQECTLEEVVERLLSVKGRPRPSPLVKAHKSVQANLDQSQRGSSPQNTTTPKPSVEGQQPAAAAACEPVDHAQSESILKVSQPRALEQQASTPPPPPPPPLLPGSSAEPPPPPPPPPLPSVGAKALPTAPPPPPLPGLGAMAPPAPPLPPPLPGSCEFLPPPPPPLPGLGCPPPPPPLLPGMGWGPPPPPPPLLPCTCSPPVAGGMEEVIVAQVDHGLGSAWVPSHRRVNPPTLRMKKLNWQKLPSNVAREHNSMWASLSSPDAEAVEPDFSSIERLFSFPAAKPKEPTMVAPRARKEPKEITFLDAKKSLNLNIFLKQFKCSNEEVAAMIRAGDTTKFDVEVLKQLLKLLPEKHEIENLRAFTEERAKLASADHFYLLLLAIPCYQLRIECMLLCEGAAAVLDMVRPKAQLVLAACESLLTSRQLPIFCQLILRIGNFLNYGSHTGDADGFKISTLLKLTETKSQQNRVTLLHHVLEEAEKSHPDLLQLPRDLEQPSQAAGINLEIIRSEASSNLKKLLETERKVSASVAEVQEQYTERLQASISAFRALDELFEAIEQKQRELADYLCEDAQQLSLEDTFSTMKAFRDLFLRALKENKDRKEQAAKAERRKQQLAEEEARRPRGEDGKPVRKGPGKQEEVCVIDALLADIRKGFQLRKTARGRGDTDGGSKAASMDPPRATEPVATSNPAGDPVGSTRCPASEPGLDATTASESRGWDLVDAVTPGPQPTLEQLEEGGPRPLERRSSWYVDASDVLTTEDPQCPQPLEGAWPVTLGDAQALKPLKFSSNQPPAAGSSRQDAKDPTSLLGVLQAEADSTSEGLEDAVHSRGARPPAAGPGGDEDEDEEDTAPESALDTSLDKSFSEDAVTDSSGSGTLPRARGRASKGTGKRRKKRPSRSQEEVPPDSDDNKTKKLCVIQ

SEQ ID NO: 1003 - DNA, 1704 bp, Homo sapiens
aggagccaccgtccgagccttgcggagcgcggcagtgggcgccggctgcccgcagcccctgacccggccccggacggagcgccggccgcaccaccgccctctggccgttgcctcaccggctcggcaagatgtcggtgaaggagggcgcacagcgcaagtgggcagcgctgaaggagaagctggggccacaggattcggaccccacggaggccaacctggagagcgcggaccctgagctgtgcatccggctgctccagatgccctctgtggtcaactactccggcctgcgcaagcgcctggagggcagcgacggcggctggatggtgcagttcctggagcagagcggcctggacctgctgctggaggcgctggcgcggctgtcgggccgcggcgttgcacgtatctccgacgccctgctgcagctcacctgcgtcagctgcgtgcgcgccgtcatgaactcgcggcagggcatcgagtacatcctcagcaaccagggctacgtgcgccagctctcccaggccctggacacatccaacgtgatggtgaagaagcaggtgtttgagctactggctgccctgtgcatctactctcccgagggccacgtgctgaccctggacgccctggaccactacaagacggtgtgcagccagcagtaccgcttcagcattgtcatgaacgagctctccggcagcgacaacgtgccctacgtggtcaccctgcttagcgtgatcaacgccgtcatcttgggccccgaggacctgcgcgcgcgcacccagctgcggaacgagtttatcgggctgcagctgctggacgtcctggctcgcctgcggtgagtccccactgtagcggtcctgccggctccccctcctgctcccaaggccaggcccacctgccctttggctcccagccacctcacctaagcagcacctccagatggcagggaggtggctccctcggagtaaccccaggggtccagccagaagccaggtctcaggctagaatccagctcactgtccctggcagctgcccacagaaactagggttgcagcagccatagaaaggacagaatgagctcatatcctttgcacaccgtggatggagctggaggccgtgatcctaagtgaaccaacccagaaacagaaaatgaaatgccaataagagggaactacagggtggttcacgtggacgcaagatggagacagggacacgggctccagggcgagagttgaaaaactacctacagggtacagtgttcgtcgctacttggtgtcaggcccactagaacaagggtccccaaccgccaggctgcggaccggtacctggcctattggaaccgggccacgcagcaggaagtgagcggtgggcgggcattcctgcctgagctgcacctcatgtcagatcagcactgcattagattctccagcgcacgcacgcgcgcaagggatccaggctgcgcgctcctcatgacaatctaatgcctgatgatcgggggtggaacagttttatccctaaaccattcccgtcaccccagtctatggaaaaattgtcttccacaaaaccagtccctggtgccaaaaaggctggggaccactgccctagaaggcaaatcgcctacgttacacagtgtaccatgtggcaaacacgcacatgtacccccgagtctaaaataaaaattttttaaaaaagaaaaaaaaaaaaaaaaaa

SEQ ID NO: 1004 - protein, 234 aa, Homo sapiens
MSVKEGAQRKWAALKEKLGPQDSDPTEANLESADPELCIRLLQMPSVVNYSGLRKRLEGSDGGWMVQFLEQSGLDLLLEALARLSGRGVARISDALLQLTCVSCVRAVMNSRQGIEYILSNQGYVRQLSQALDTSNVMVKKQVFELLAALCIYSPEGHVLTLDALDHYKTVCSQQYRFSIVMNELSGSDNVPYVVTLLSVINAVILGPEDLRARTQLRNEFIGLQLLDVLARLR

SEQ ID NO: 1005 - DNA, 1769 bp, Homo sapiens
ctccatttaatggcgcggacgccggcggcggcgggctcctggccgggccagcgcagcggaagagccaagccagcatgtcggggacccgagcctccaacgaccggccccccggcgcaggcggcgtcaagcgggggcggctgcagcaggaggcggcggcgaccggctcccgcgtgacggtggtgctgggcgcgcagtggggggacgagggcaaaggcaaggtggtggacctgctggccacggacgccgacatcatcagccgctgccaggggggcaacaacgccggccacacggtggtggtggatgggaaagagtacgacttccacctgctgcccagcggcatcatcaacaccaaggccgtgtccttcattggcaacggggtggtcatccacttgccaggcttgtttgaggaagcagagaagaatgaaaagaaaggcctgaaggactgggagaagaggctcatcatctctgacagagcccaccttgtgtttgattttcaccaggctgtcgacggacttcaggaagtgcagcgccaggcacaagaggggaagaatataggcaccaccaagaagggaatcggaccaacctactcttccaaagctgcccggacaggcctccgcatctgcgacctcctgtcagattttgatgagttttcctccagattcaagaacctggcccaccagcaccagtcgatgttccccaccctggaaatagacattgaaggccaactcaaaaggctcaagggctttgctgagcggatcagacccatggtccgagatggtgtttactttatgtatgaggcactccacggcccccccaagaagatcctggtggagggtgccaacgccgccctcctcgacattgacttcgggacctacccctttgtgacttcatccaactgcaccgtgggcggtgtgtgcacgggcctgggcatccccccgcagaacataggtgacgtgtatggcgtggtgaaagcctataccacacgtgtgggcatcggggccttccccaccgagcagatcaacgagattggaggcctgctgcagacccgcggccacgagtggggagtgaccacaggcaggaagaggcgctgcggctggctcgacctgatgattctaagatatgctcacatggtcaacggattcactgcgctggccctgacgaagctggacatcctggacgtactgggtgaggttaaagtcggtgtctcatacaagctgaacgggaaaaggattccctatttcccagctaaccaggagatgcttcagaaggtcgaagttgagtatgaaacgctgcctgggtggaaagcagacaccacaggcgccaggaggtgggaggacctgcccccacaggcccagaactacatccgctttgtggagaatcacgtgggagtcgcagtcaaatgggttggtgttggcaagtcaagagagtcgatgatccagctgttttagtcacagactgagctgatcccaacaggccctggcagcgtctggacttgtgtaaacagcagcagtcacgttcctcggccgccacaaccaacaccaaagcaggaaaaccattttctgtacttttatatttctgttcaacctgttggtttctacaatgattttaaacattggaaagccagccttgtgtatatttttaaaaattatattcaaaatgagccaaagtgctcagagaccttctatgacacattagtgtcacatggttgcgtgtccagccgaagcagtgtaataaacatctccaatggccactgaaaaaaaaaaaaaaaa

SEQ ID NO: 1006 - protein, 457 aa, Homo sapiens
MSGTRASNDRPPGAGGVKRGRLQQEAAATGSRVTVVLGAQWGDEGKGKVVDLLATDADIISRCQGGNNAGHTVVVDGKEYDFHLLPSGIINTKAVSFIGNGVVIHLPGLFEEAEKNEKKGLKDWEKRLIISDRAHLVFDFHQAVDGLQEVQRQAQEGKNIGTTKKGIGPTYSSKAARTGLRICDLLSDFDEFSSRFKNLAHQHQSMFPTLEIDIEGQLKRLKGFAERIRPMVRDGVYFMYEALHGPPKKILVEGANAALLDIDFGTYPFVTSSNCTVGGVCTGLGIPPQNIGDVYGVVKAYTTRVGIGAFPTEQINEIGGLLQTRGHEWGVTTGRKRRCGWLDLMILRYAHMVNGFTALALTKLDILDVLGEVKVGVSYKLNGKRIPYFPANQEMLQKVEVEYETLPGWKADTTGARRWEDLPPQAQNYIRFVENHVGVAVKWVGVGKSRESMIQLF

SEQ ID NO: 1007 - DNA, 1826 bp, Homo sapiens
gcatggtggggaggagctgtggggtggcaacccagaggcaaggaggtgggcagaggcccacgaacctggccctgaccctcagctcgtccccagctcacagcacagccctcccctggctgcctccaaggagtctccagttactgagtggccactccgtgccagctcagcccacccctcaccttcccagtgcctgtggaggcccaactagggtgacgctgggagaggagagggcttggaggagccacgggtcaaatgcaggaggccacacctgcctgcccaggaggactgcaggagccggatccttaacacctggaggggagcgggggggcaacaacgccggccacacggtggtggtggatgggaaagagtacgacttccacctgctgcccagcggcatcatcaacaccaaggccgtgtccttcattggcaacggggtggtcatccacttgccaggcttgtttgaggaagcagagaagaatgaaaagaaaggcctgaaggactgggagaagaggctcatcatctctgacagagcccaccttgtgtttgattttcaccaggctgtcgacggacttcaggaagtgcagcgccaggcacaagaggggaagaatataggcaccaccaagaagggaatcggaccaacctactcttccaaagctgcccggacaggcctccgcatctgcgacctcctgtcagattttgatgagttttcctccagattcaagaacctggcccaccagcaccagtcgatgttccccaccctggaaatagacattgaaggccaactcaaaaggctcaagggctttgctgagcggatcagacccatggtccgagatggtgtttactttatgtatgaggcactccacggcccccccaagaagatcctggtggagggtgccaacgccgccctcctcgacattgacttcgggacctacccctttgtgacttcatccaactgcaccgtgggcggtgtgtgcacgggcctgggcatccccccgcagaacataggtgacgtgtatggcgtggtgaaagcctataccacacgtgtgggcatcggggccttccccaccgagcagatcaacgagattggaggcctgctgcagacccgcggccacgagtggggagtgaccacaggcaggaagaggcgctgcggctggctcgacctgatgattctaagatatgctcacatggtcaacggattcactgcgctggccctgacgaagctggacatcctggacgtactgggtgaggttaaagtcggtgtctcatacaagctgaacgggaaaaggattccctatttcccagctaaccaggagatgcttcagaaggtcgaagttgagtatgaaacgctgcctgggtggaaagcagacaccacaggcgccaggaggtgggaggacctgcccccacaggcccagaactacatccgctttgtggagaatcacgtgggagtcgcagtcaaatgggttggtgttggcaagtcaagagagtcgatgatccagctgttttagtcacagactgagctgatcccaacaggccctggcagcgtctggacttgtgtaaacagcagcagtcacgttcctcggccgccacaaccaacaccaaagcaggaaaaccattttctgtacttttatatttctgttcaacctgttggtttctacaatgattttaaacattggaaagccagccttgtgtatatttttaaaaattatattcaaaatgagccaaagtgctcagagaccttctatgacacattagtgtcacatggttgcgtgtccagccgaagcagtgtaataaacatctccaatggccactgaaaaaaaaaaaaaaaa

SEQ ID NO: 1008 - protein, 500 aa, Homo sapiens
MVGRSCGVATQRQGGGQRPTNLALTLSSSPAHSTALPWLPPRSLQLLSGHSVPAQPTPHLPSACGGPTRVTLGEERAWRSHGSNAGGHTCLPRRTAGAGSLTPGGERGGNNAGHTVVVDGKEYDFHLLPSGIINTKAVSFIGNGVVIHLPGLFEEAEKNEKKGLKDWEKRLIISDRAHLVFDFHQAVDGLQEVQRQAQEGKNIGTTKKGIGPTYSSKAARTGLRICDLLSDFDEFSSRFKNLAHQHQSMFPTLEIDIEGQLKRLKGFAERIRPMVRDGVYFMYEALHGPPKKILVEGANAALLDIDFGTYPFVTSSNCTVGGVCTGLGIPPQNIGDVYGVVKAYTTRVGIGAFPTEQINEIGGLLQTRGHEWGVTTGRKRRCGWLDLMILRYAHMVNGFTALALTKLDILDVLGEVKVGVSYKLNGKRIPYFPANQEMLQKVEVEYETLPGWKADTTGARRWEDLPPQAQNYIRFVENHVGVAVKWVGVGKSRESMIQLF

SEQ ID NO: 1009 - DNA, 790 bp, Homo sapiens
tgtgacgtcacggcgtcgttggtaaggggctggcggccggggagctgcgtagctcccggccccgcggccatgcccaagcggagctgccccttcgcggacgtggccccgctacagctcaaggtccgcgtgagccagagggagttgagccgcggcgtgtgcgccgagcgctactcgcaggaggtcttcgagaagaccaagcgactcctgttcctcggggcccaggcctacctggaccacgtgtgggatgaaggctgtgccgtcgttcacctgccagagtccccaaagcctggccctacaggggccccgagggctgcacgtgggcagatgctgattggaccagacggccgcctgatcaggagccttgggcaggcctccgaagctgacccatctggggtagcgtccattgcctgttcctcatgcgtgcgagccgtggatgggaaggcggtctgcggtcagtgtgagcgagccctgtgcgggcagtgtgtgcgcacctgctggggctgcggctccgtggcctgtaccctgtgtggcctcgtggactgcagtgacatgtacgagaaagtgctgtgcaccagctgtgccatgttcgagacctgaggctggctcaagccggctgccttcaccgggagccacgccgtgcatggcagccttccctggacgagcgctcggtgttcacactgaactgtggggtcgacgggaggggtgccttttacatgttctattttgtatcctaatgacagaatgaataaacctctttatatttgcacaagaaaaaaaaaaaaaaaaaaaa

SEQ ID NO: 1010 - protein, 175 aa, Homo sapiens
MPKRSCPFADVAPLQLKVRVSQRELSRGVCAERYSQEVFEKTKRLLFLGAQAYLDHVWDEGCAVVHLPESPKPGPTGAPRAARGQMLIGPDGRLIRSLGQASEADPSGVASIACSSCVRAVDGKAVCGQCERALCGQCVRTCWGCGSVACTLCGLVDCSDMYEKVLCTSCAMFET

SEQ ID NO: 1011 - DNA, 595 bp, Homo sapiens
tgtgacgtcacggcgtcgttggtaaggggctggcggccggggagctgcgtagctcccggccccgcggccatgcccaagcggagctgccccttcgcggacgtggccccgctacagctcaaggtccgcgtgagccagagggagttgagccgcggcgtgtgcgccgagcgctactcgcaggaggtcttcgacccatctggggtagcgtccattgcctgttcctcatgcgtgcgagccgtggatgggaaggcggtctgcggtcagtgtgagcgagccctgtgcgggcagtgtgtgcgcacctgctggggctgcggctccgtggcctgtaccctgtgtggcctcgtggactgcagtgacatgtacgagaaagtgctgtgcaccagctgtgccatgttcgagacctgaggctggctcaagccggctgccttcaccgggagccacgccgtgcatggcagccttccctggacgagcgctcggtgttcacactgaactgtggggtcgacgggaggggtgccttttacatgttctattttgtatcctaatgacagaatgaataaacctctttatatttgcacaagaaaaaaaaaaaaaaaaaaaa

SEQ ID NO: 1012 - protein, 110 aa, Homo sapiens
MPKRSCPFADVAPLQLKVRVSQRELSRGVCAERYSQEVFDPSGVASIACSSCVRAVDGKAVCGQCERALCGQCVRTCWGCGSVACTLCGLVDCSDMYEKVLCTSCAMFET

SEQ ID NO: 1013 - DNA, 2794 bp, Homo sapiens
cggcaggaccgagcgcggcaggcggctggcccagcgcagccagcgcggcccgaaggacgggagcaggcggccgagcaccgagcgctgggcaccgggcaccgagcggcggcggcacgcgaggcccggccccgagcagcgcccccgcccgccgcggcctccagcccggccccgcccagcgccggcccgcggggatgcggagcggcgggcgccggaggccgcggcccggctaggcccgcgctcgcgcccggacgcggcggcccgaggctgtggccaggccagctgggctcggggagcgccagcctgagaggagcgcgtgagcgtcgcgggagcctcgggcaccatgagcgacgtggctattgtgaaggagggttggctgcacaaacgaggggagtacatcaagacctggcggccacgctacttcctcctcaagaatgatggcaccttcattggctacaaggagcggccgcaggatgtggaccaacgtgaggctcccctcaacaacttctctgtggcgcagtgccagctgatgaagacggagcggccccggcccaacaccttcatcatccgctgcctgcagtggaccactgtcatcgaacgcaccttccatgtggagactcctgaggagcgggaggagtggacaaccgccatccagactgtggctgacggcctcaagaagcaggaggaggaggagatggacttccggtcgggctcacccagtgacaactcaggggctgaagagatggaggtgtccctggccaagcccaagcaccgcgtgaccatgaacgagtttgagtacctgaagctgctgggcaagggcactttcggcaaggtgatcctggtgaaggagaaggccacaggccgctactacgccatgaagatcctcaagaaggaagtcatcgtggccaaggacgaggtggcccacacactcaccgagaaccgcgtcctgcagaactccaggcaccccttcctcacagccctgaagtactctttccagacccacgaccgcctctgctttgtcatggagtacgccaacgggggcgagctgttcttccacctgtcccgggagcgtgtgttctccgaggaccgggcccgcttctatggcgctgagattgtgtcagccctggactacctgcactcggagaagaacgtggtgtaccgggacctcaagctggagaacctcatgctggacaaggacgggcacattaagatcacagacttcgggctgtgcaaggaggggatcaaggacggtgccaccatgaagaccttttgcggcacacctgagtacctggcccccgaggtgctggaggacaatgactacggccgtgcagtggactggtgggggctgggcgtggtcatgtacgagatgatgtgcggtcgcctgcccttctacaaccaggaccatgagaagctttttgagctcatcctcatggaggagatccgcttcccgcgcacgcttggtcccgaggccaagtccttgctttcagggctgctcaagaaggaccccaagcagaggcttggcgggggctccgaggacgccaaggagatcatgcagcatcgcttctttgccggtatcgtgtggcagcacgtgtacgagaagaagctcagcccacccttcaagccccaggtcacgtcggagactgacaccaggtattttgatgaggagttcacggcccagatgatcaccatcacaccacctgaccaagatgacagcatggagtgtgtggacagcgagcgcaggccccacttcccccagttctcctactcggccagcggcacggcctgaggcggcggtggactgcgctggacgatagcttggagggatggagaggcggcctcgtgccatgatctgtatttaatggtttttatttctcgggtgcatttgagagaagccacgctgtcctctcgagcccagatggaaagacgtttttgtgctgtgggcagcaccctcccccgcagcggggtagggaagaaaactatcctgcgggttttaatttatttcatccagtttgttctccgggtgtggcctcagccctcagaacaatccgattcacgtagggaaatgttaaggacttctgcagctatgcgcaatgtggcattggggggccgggcaggtcctgcccatgtgtcccctcactctgtcagccagccgccctgggctgtctgtcaccagctatctgtcatctctctggggccctgggcctcagttcaacctggtggcaccagatgcaacctcactatggtatgctggccagcaccctctcctgggggtggcaggcacacagcagccccccagcactaaggccgtgtctctgaggacgtcatcggaggctgggcccctgggatgggaccagggatgggggatgggccagggtttacccagtgggacagaggagcaaggtttaaatttgttattgtgtattatgttgttcaaatgcattttgggggtttttaatctttgtgacaggaaagccctcccccttccccttctgtgtcacagttcttggtgactgtcccaccgggagcctccccctcagatgatctctccacggtagcacttgaccttttcgacgcttaacctttccgctgtcgccccaggccctccctgactccctgtgggggtggccatccctgggcccctccacgcctcctggccagacgctgccgctgccgctgcaccacggcgtttttttacaacattcaactttagtatttttactattataatataatatggaaccttccctccaaattcttcaataaaagttgcttttcaaaaaaaaaaaaaaaaaaaaaa

SEQ ID NO: 1014 - protein, 480 aa, Homo sapiens [sequence omitted]

SEQ ID NO: 1015 - DNA, 2878 bp, Homo sapiens
cggcaggaccgagcgcggcaggcggctggcccagcgcagccagcgcggcccgaaggacgggagcaggcggccgagcaccgagcgctgggcaccgggcaccgagcggcggcggcacgcgaggcccggccccgagcagcgcccccgcccgccgcggcctccagcccggccccgcccagcgccggcccgcggggatgcggagcggcgggcgccggaggccgcggcccggctaggcccgcgctcgcgcccggacgcggcggcccggggcttagggaaggccgagccagcctgggtcaaagaagtcaaaggggctgcctggaggaggcagcctgtcagctggtgcatcagaggctgtggccaggccagctgggctcggggagcgccagcctgagaggagcgcgtgagcgtcgcgggagcctcgggcaccatgagcgacgtggctattgtgaaggagggttggctgcacaaacgaggggagtacatcaagacctggcggccacgctacttcctcctcaagaatgatggcaccttcattggctacaaggagcggccgcaggatgtggaccaacgtgaggctcccctcaacaacttctctgtggcgcagtgccagctgatgaagacggagcggccccggcccaacaccttcatcatccgctgcctgcagtggaccactgtcatcgaacgcaccttccatgtggagactcctgaggagcgggaggagtggacaaccgccatccagactgtggctgacggcctcaagaagcaggaggaggaggagatggacttccggtcgggctcacccagtgacaactcaggggctgaagagatggaggtgtccctggccaagcccaagcaccgcgtgaccatgaacgagtttgagtacctgaagctgctgggcaagggcactttcggcaaggtgatcctggtgaaggagaaggccacaggccgctactacgccatgaagatcctcaagaaggaagtcatcgtggccaaggacgaggtggcccacacactcaccgagaaccgcgtcctgcagaactccaggcaccccttcctcacagccctgaagtactctttccagacccacgaccgcctctgctttgtcatggagtacgccaacgggggcgagctgttcttccacctgtcccgggagcgtgtgttctccgaggaccgggcccgcttctatggcgctgagattgtgtcagccctggactacctgcactcggagaagaacgtggtgtaccgggacctcaagctggagaacctcatgctggacaaggacgggcacattaagatcacagacttcgggctgtgcaaggaggggatcaaggacggtgccaccatgaagaccttttgcggcacacctgagtacctggcccccgaggtgctggaggacaatgactacggccgtgcagtggactggtgggggctgggcgtggtcatgtacgagatgatgtgcggtcgcctgcccttctacaaccaggaccatgagaagctttttgagctcatcctcatggaggagatccgcttcccgcgcacgcttggtcccgaggccaagtccttgctttcagggctgctcaagaaggaccccaagcagaggcttggcgggggctccgaggacgccaaggagatcatgcagcatcgcttctttgccggtatcgtgtggcagcacgtgtacgagaagaagctcagcccacccttcaagccccaggtcacgtcggagactgacaccaggtattttgatgaggagttcacggcccagatgatcaccatcacaccacctgaccaagatgacagcatggagtgtgtggacagcgagcgcaggccccacttcccccagttctcctactcggccagcggcacggcctgaggcggcggtggactgcgctggacgatagcttggagggatggagaggcggcctcgtgccatgatctgtatttaatggtttttatttctcgggtgcatttgagagaagccacgctgtcctctcgagcccagatggaaagacgtttttgtgctgtgggcagcaccctcccccgcagcggggtagggaagaaaactatcctgcgggttttaatttatttcatccagtttgttctccgggtgtggcctcagccctcagaacaatccgattcacgtagggaaatgttaaggacttctgcagctatgcgcaatgtggcattggggggccgggcaggtcctgcccatgtgtcccctcactctgtcagccagccgccctgggctgtctgtcaccagctatctgtcatctctctggggccctgggcctcagttcaacctggtggcaccagatgcaacctcactatggtatgctggccagcaccctctcctgggggtggcaggcacacagcagccccccagcactaaggccgtgtctctgaggacgtcatcggaggctgggcccctgggatgggaccagggatgggggatgggccagggtttacccagtgggacagaggagcaaggtttaaatttgttattgtgtattatgttgttcaaatgcattttgggggtttttaatctttgtgacaggaaagccctcccccttccccttctgtgtcacagttcttggtgactgtcccaccgggagcctccccctcagatgatctctccacggtagcacttgaccttttcgacgcttaacctttccgctgtcgccccaggccctccctgactccctgtgggggtggccatccctgggcccctccacgcctcctggccagacgctgccgctgccgctgcaccacggcgtttttttacaacattcaactttagtatttttactattataatataatatggaaccttccctccaaattcttcaataaaagttgcttttcaaaaaaaaaaaaaaaaaaaaaa

SEQ ID NO: 1016 - protein, 480 aa, Homo sapiens [sequence omitted]

SEQ ID NO: 1017 - DNA, 3008 bp, Homo sapiens
taattatgggtctgtaaccaccctggactgggtgctcctcactgacggacttgtctgaacctctctttgtctccagcgcccagcactgggcctggcaaaacctgagacgcccggtacatgttggccaaatgaatgaaccagattcagaccggcaggggcgctgtggtttaggaggggcctggggtttctcccaggaggtttttgggcttgcgctggagggctctggactcccgtttgcgccagtggcctgcatcctggtcctgtcttcctcatgtttgaatttctttgctttcctagtctggggagcagggaggagccctgtgccctgtcccaggatccatgggtaggaacaccatggacagggagagcaaacggggccatctgtcaccaggggcttagggaaggccgagccagcctgggtcaaagaagtcaaaggggctgcctggaggaggcagcctgtcagctggtgcatcagaggctgtggccaggccagctgggctcggggagcgccagcctgagaggagcgcgtgagcgtcgcgggagcctcgggcaccatgagcgacgtggctattgtgaaggagggttggctgcacaaacgaggggagtacatcaagacctggcggccacgctacttcctcctcaagaatgatggcaccttcattggctacaaggagcggccgcaggatgtggaccaacgtgaggctcccctcaacaacttctctgtggcgcagtgccagctgatgaagacggagcggccccggcccaacaccttcatcatccgctgcctgcagtggaccactgtcatcgaacgcaccttccatgtggagactcctgaggagcgggaggagtggacaaccgccatccagactgtggctgacggcctcaagaagcaggaggaggaggagatggacttccggtcgggctcacccagtgacaactcaggggctgaagagatggaggtgtccctggccaagcccaagcaccgcgtgaccatgaacgagtttgagtacctgaagctgctgggcaagggcactttcggcaaggtgatcctggtgaaggagaaggccacaggccgctactacgccatgaagatcctcaagaaggaagtcatcgtggccaaggacgaggtggcccacacactcaccgagaaccgcgtcctgcagaactccaggcaccccttcctcacagccctgaagtactctttccagacccacgaccgcctctgctttgtcatggagtacgccaacgggggcgagctgttcttccacctgtcccgggagcgtgtgttctccgaggaccgggcccgcttctatggcgctgagattgtgtcagccctggactacctgcactcggagaagaacgtggtgtaccgggacctcaagctggagaacctcatgctggacaaggacgggcacattaagatcacagacttcgggctgtgcaaggaggggatcaaggacggtgccaccatgaagaccttttgcggcacacctgagtacctggcccccgaggtgctggaggacaatgactacggccgtgcagtggactggtgggggctgggcgtggtcatgtacgagatgatgtgcggtcgcctgcccttctacaaccaggaccatgagaagctttttgagctcatcctcatggaggagatccgcttcccgcgcacgcttggtcccgaggccaagtccttgctttcagggctgctcaagaaggaccccaagcagaggcttggcgggggctccgaggacgccaaggagatcatgcagcatcgcttctttgccggtatcgtgtggcagcacgtgtacgagaagaagctcagcccacccttcaagccccaggtcacgtcggagactgacaccaggtattttgatgaggagttcacggcccagatgatcaccatcacaccacctgaccaagatgacagcatggagtgtgtggacagcgagcgcaggccccacttcccccagttctcctactcggccagcggcacggcctgaggcggcggtggactgcgctggacgatagcttggagggatggagaggcggcctcgtgccatgatctgtatttaatggtttttatttctcgggtgcatttgagagaagccacgctgtcctctcgagcccagatggaaagacgtttttgtgctgtgggcagcaccctcccccgcagcggggtagggaagaaaactatcctgcgggttttaatttatttcatccagtttgttctccgggtgtggcctcagccctcagaacaatccgattcacgtagggaaatgttaaggacttctgcagctatgcgcaatgtggcattggggggccgggcaggtcctgcccatgtgtcccctcactctgtcagccagccgccctgggctgtctgtcaccagctatctgtcatctctctggggccctgggcctcagttcaacctggtggcaccagatgcaacctcactatggtatgctggccagcaccctctcctgggggtggcaggcacacagcagccccccagcactaaggccgtgtctctgaggacgtcatcggaggctgggcccctgggatgggaccagggatgggggatgggccagggtttacccagtgggacagaggagcaaggtttaaatttgttattgtgtattatgttgttcaaatgcattttgggggtttttaatctttgtgacaggaaagccctcccccttccccttctgtgtcacagttcttggtgactgtcccaccgggagcctccccctcagatgatctctccacggtagcacttgaccttttcgacgcttaacctttccgctgtcgccccaggccctccctgactccctgtgggggtggccatccctgggcccctccacgcctcctggccagacgctgccgctgccgctgcaccacggcgtttttttacaacattcaactttagtatttttactattataatataatatggaaccttccctccaaattcttcaataaaagttgcttttcaaaaaaaaaaaaaaaaaaaaaa

SEQ ID NO: 1018 - protein, 480 aa, Homo sapiens [sequence omitted]

SEQ ID NO: 1019 - DNA, 1038 bp, Homo sapiens
atggagttccctgagcacggcggacggctgctgggccgcctgagacagcagcgcgagctgggcttcctatgcgactgcaccgtgctggtgggcgacgcgcgcttcccggcccaccgtgccgtgctggccgcgtgcagcgtctacttccatctcttctacagggaccggcccgcgggcagtcgcgacacggtgcggctcaacggcgacatcgtcacggcgcccgccttcggccgcctactggacttcatgtacgagggccgcctggacctgcgcagcctgcctgtggaggacgtcctggcagccgccagctacctgcacatgtatgacatcgtcaaggtctgcaagggcaggctccaggagaaggatcgaagtctggacccggggaaccctgcccctggggcagaacctgctcagccaccgtgcccctggcctgtctggaccgcggacctctgcccagctgcccgaaaggccaagctccccccgtttggggtcaaggctgccctccctcctcgagcatctgggcctcctccctgccaggtcccagaagagtcagaccaggccctggacctgtcgttgaagtctggcccaaggcaggagcgggtccacccaccgtgcgtcctccagacacccctctgcagccagaggcagccaggggcccagccactggtgaaggacgaacgggactcactgtccgaacaggaggagagcagcagctctaggagcccccacagtcccccgaagccacctcctgttcctgcagccaagggcctggtgctgcacctcagtgcccacttccgtgagcgagacagcacccgggcccggctctcacccgacggcgtggcacccacctgcccgctctgtgggaagaccttctcgtgcacatacacactgaagaggcacgagcggacacactcggtgcacactcgagagaagccgcatgcctgccggtggtgtgagcgccgtttcacgcagtccggggacctctaccgccacgtccgcaagtttcactgtggcctcgtcaagtcccttctggtgtga

SEQ ID NO: 1020 - protein, 345 aa, Homo sapiens
MEFPEHGGRLLGRLRQQRELGFLCDCTVLVGDARFPAHRAVLAACSVYFHLFYRDRPAGSRDTVRLNGDIVTAPAFGRLLDFMYEGRLDLRSLPVEDVLAAASYLHMYDIVKVCKGRLQEKDRSLDPGNPAPGAEPAQPPCPWPVWTADLCPAARKAKLPPFGVKAALPPRASGPPPCQVPEESDQALDLSLKSGPRQERVHPPCVLQTPLCSQRQPGAQPLVKDERDSLSEQEESSSSRSPHSPPKPPPVPAAKGLVLHLSAHFRERDSTRARLSPDGVAPTCPLCGKTFSCTYTLKRHERTHSVHTREKPHACRWCERRFTQSGDLYRHVRKFHCGLVKSLLV

SEQ ID NO: 1021 - DNA, 6568 bp, Homo sapiens
gctcggcccgggctgccacgagcgtgcgggcctcgccgggcatgtcctaggcggcggccccgcccagcgctcggccgggcgggcgggcgggcgcgagggcagggaccgagccgggccgagctggggaacaagccggggaccaagccggggaccaagccggggactaaggcgagccggagaccgagcccgaacagcagtcccgcagcgtggacaagcagcatgccgtcatcaactacgaccaggacagggacgagcactgggtgaaggacctgggcagcctcaatgggacgtttgtgaatgacatgcgcatcccggaccagaagtacgtcacgctgaagctcaacgatgtcatccgcttcggctacgattccaacatgtatgtgctggagcgtgtgcagcaccgagtcccggaggaggcactcaagcatgaaaagtacaccagccagctgcaggtgagcgtgaagggtttggcgcccaagaggagcgaggcactgccggaacacacaccatactgcgaggcctcgaaccccaggccggagaagggggaccggagaccaggaacagaggcagcctcttaccgcacacccctgtatgggcagccctcctggtggggtgaggacgatggtagcacgctgcctgacgcccagcgccagggagagccctacccagagcgccccaagggaccagtgcagcaggacggggagctccacggcttccgcgcccctgctgagcctcagggctgctcgttccggcgggagcccagctacttcgagatccccacgaaggagaccccgcagccgtcgcagccccccgaggtgccggcacacgagatgcccacgaaggatgcagaggcaggtgggggcggagcggcccctgtggtgcagagccacgcctccttcaccatcgagtttgatgactgcagccctggcaagatgaagatcaaggaccatatcaccaagttttccctgcgccagcggcggcccccgggcaaggaggccacacctggcgagatggtgtcggctgagaccaaggtggccgactggctggtgcagaatgacccgagcctgctgcaccgggttggccctggggatgaccgccacagcaccaagagcgacctgcctgtccacacccgcaccctgaagggccacaagcacgaggacggcacgcagagtgactcagaggaccccctggccaaggcggcctcggccgctggggtgcccttggaggccagcggggagcaggtgcggctgcagaggcagatcaagcgggacccccaggagctactacataaccagcaggcctttgtcatcgagttcttcgacgaggacacaccccgaaagaagcgctcccagtccttcacgcacagcccgtccggggaccccaaggccgacaagcgccgtggcccaacgccggccgatagggaccgccccagtgtcccagccccagtccaggcagggggccgcagctcggggccacagagggccggctcgctcaagcgggagaagacagaggaacggctgggcagcccctcgcccgcctcccgaacccctgcccgccccttcggaagcgtggggcgccgctcccgcctggcccaggacttcatggcccagtgtctgcgggagagctccccggccgcccggcccagccccgagaaggttcctccggtgctgcccgctcccctgacaccccatgggaccagccccgtgggccccccgaccccaccgcccgcccccacggacccccagctgaccaaggcacggaaacaggaggaggacgacagcctcagtgacgcagggacatacaccatcgagaccgaggcgcaggacacggaggtggaggaggcccggaagatgatcgaccaggtctttggggtgttggagtcccctgaactctccagggcatcttcggccacctttcgcccagtcatcagaggggacagagatgagtctgatgacgggggcgtggcccagcggatggcgctactgcaggagtttgcctcccggccactgggtgcggccccccaggcggagcaccagggcctcccggtgccgggctcccctgggggtcagaagtgggtgtcccgctgggccagcctggctgacagctactcagacccgggcctcacagaggatggcctgggacgtagaggcggggagccggaggggtccctgcctgtgcgcatgcggcgacggctccctcagctgcccagtgagagggctgacagccctgcgggcccagagagcagcaggaggagtgggcctgggccaccggagctggacagtgagcagcccagccgcctcttcggccaggaggagttggatcctgacagcctcagcgatgccagtgggtcggacgggggccgaggccccgagccaggggtggagccacaggacagcagacgcaggagcccccaggaggggcccacgtggagcaggggtcggcgctcaccaagggcccccggggagccaactcccgcctctttcttcattggggaccagaatggggacgctgtgttatctaggaaaccgcttgcggctccaggggatggggagggcctagggcagacagcccagcccagccccccagcacgggatggcgtctatgtcagtgccaatgggagaatggtcatccagctacggcctggacggtccccagaacccgacggccctgccccagcctttctccggcaagagagcttcactaaggagccagccagtggtcccccagcgcccggcaagcccccccacatctccagccacccgcttctacaggacctggccgctacccgggccgcacgcatggacttccactcccaggacacccacctgatcttgaaggagacggagacggccctggcggccctggaggcccgactcctctctaattctgtggatgccgagtgtgaggggggcagcaccccgaggccgccggaggacgccctgtctggggactcggacgtggacacagccagcaccgtcagcctgcgtagtggcaagagcgggcccagccccacaaccccccagcctctgcgggcacagaaggagatgtcgccatccccgccagctgcacaggacccgggaggcaccgccctggtcagtgcccgtgagcagtcctcagagaggcagcatcacccacttggcccgacggacatgggccgtggagagccggtacggcgctcagccataaggcgtggccacaggccccgagggtccctggattggcccagtgaggagcgtggccctgtcctcgcccacctacccagctcagatgtgatggcctccaaccacgaaacccctgaggccaccggggcaggacggctaggttctcgccggaaaccagcggccccaccgccatccccagctgcccgggaggagcagagccgtagctcagccagctcccagaaggggccgcaggccttgacccgctccaacagcctgtccacccctcgccccacacgggcctcccggctgaggcgggcccggctgggggacgcttcagacactgaggctgcggatggtgagcgggggtccctgggcaaccctgagcccgtgggccggccagctgctgagcaggccaagaagctgtcacgcctggacatcctggccatgccccggaagcgggccggctccttcacagggactagtgaccccgaggcagcccctgcccgcaccagcttctctggccgcagtgtggagttgtgctgtgccagccgcaagcccaccatggccgaagcacgggctgtctccaggaaggctgccaacacagccaccaccacgggtccccgccagcccttcagcagggcccgctcaggcagtgcccgatacacctccaccactcagaccccgagggctggcagctccagccgggctcgttcccgggcccccggcccccgggacacggacgacgatgaggaggagcctgacccttatggtttcatcgtgcagacggcagagattgcggagattgccaggctgagccagacgctggtgaaggacgtggccatcctagcccaggagatccacgatgtggctggggacggtgacacactgggctcctcggagcctgcccacagcgcctccctcagcaacatgcccagcacccccgcctcgaccatctctgcccgggaggagctggtgcagcgcatccccgaggccagcctcaacttccagaaggtgccgcccggctcgctgaactctcgggactttgaccagaacatgaacgacagctgtgaggacgccctggccaacaagacgcggcctcggaaccgagaggaggtgatcttcgataacctgatgctgaacccggtgtcccagctgtcgcaggccatccgtgagaacacagagcaccttgccgagaagatgaagatcctctttcagaacacagggagagcttgggaggacctggaagccaggatcaacgccgagaacgaggtgcccatcctgaagacatctaacaaggaaatcagctccatcctgaaggaactgaggcgggtgcagaaacagctggaagttatcaatgccatcgtggaccccagtgggagcctggacctgctcacaggaaacaggagcttggccagctctgcacagccggggctggggaagggccgcgtggctgcccagagcccaccctcacccgcctcagccgaggccctgctgccagccctgcccctgaggaatttcccacagcgggccagctgtgggcctcccagcctcccggaccccaccttcctccctgatgccgagaggttcctgatctaggccccagacctggccaggccagcctccctgtgcgtgtgcgtctctgccttccgtccgccgcacacccgcctgcctggccgcaggtggttctccctgaagacccccacatgtgccatatccctgtgggcgggtgcctcccacgcccttgccccctcgtcagctcccagccagcaccctactcaccctgtccagccccatggccacccccacccctgcctcgccccctacaggcctctgggcccagctcctggccaggctgctgccaaggtcaagccctcaagggcattaccccgcctcctcttcatcactgttatttttgtctttagctttaaaggaaagagttgttggtgccattgcaggtgccccctccaggcctgactggctccgccaggcactaacctgccataaccctttgtgctggcctgcggccaggcagaggaagagaggtcgactgtggggtcatttggtgccaaacatggaggtgggcaggctcacctgttcctgggactgtctgagatggcagggcacttgccctggtggctcccacctgaccccaggccttttataggcaggagccccactgcttccagcctctggtgccaacacagttgccaaacccattgagcttggggctgccctgtggaggcctcctgggtatggaccaggggcttgttgagagctgagccatgcacacaggtgcagacaccccccaactcccatgcacacggctagtccaggcgcctccacgctgcaccgtgaggactgcagggcatgtccccgtgaggggctatgggcctctgtaggtgggcttccaaggtcctgggtgcagccgggtgcatggcagcccttctggcgggggtgagcgcacgaccaaagtcactggaagccgggtttccggaagctcgcagcttggcctgcaccacacgccctccccttttggcttcacgccatcaggcctcaagtgggcatgggggcagggacgggcccaggaactgttgttttctcaggattctttcagctgggaacatggcaggtgagcagagcttggtgcctctgccgtggcccctgctggggcagcccgtgttgccggagcctctaagccaaagagcccgttggccgtggttggtgggggtggacgtgggggtgtcccacctggaccagactggcgtgggtgagctccacaccctgcctggcaatggtatgagagtcggacctggacagggccagctgctgggggagcggcactggggactggaggctggaagcgggtggtgtgtgtcccctgtttacttttagctgagctggggttgggtgtacgggttctgttcctctgagcctgcggcccacctgatgtttacgtgtgtgtgtgagggggggcgggggtggcaggtgtccccccctggtccccgccccaagagcctgctgtctgtatggaggaggtgctagcccggtccaccgggctgctgcccacccctgcatgccccagttgcccaccccgcctgcccctggacatgaagtggtcacgcttcatccacggctccttcccacccctcggcagtggctgtgcaatgttttaagttcacaagttcctgctcctccccacactgagctcctttgttcctccccctccagcctttgcctgggaactggtccttgtttgccgggcttctcggagggttcactgtacattcgttctcaggtggtcttgtggctgtctttcggaaaatggttattttatatgatttgtcatggaatttgttctaataaatcattcttctatcacatggcagcaaaaaaaaaaaaaaaaaaaa

SEQ ID NO: 1022 - protein, 1484 aa, Homo sapiens
MRIPDQKYVTLKLNDVIRFGYDSNMYVLERVQHRVPEEALKHEKYTSQLQVSVKGLAPKRSEALPEHTPYCEASNPRPEKGDRRPGTEAASYRTPLYGQPSWWGEDDGSTLPDAQRQGEPYPERPKGPVQQDGELHGFRAPAEPQGCSFRREPSYFEIPTKETPQPSQPPEVPAHEMPTKDAEAGGGGAAPVVQSHASFTIEFDDCSPGKMKIKDHITKFSLRQRRPPGKEATPGEMVSAETKVADWLVQNDPSLLHRVGPGDDRHSTKSDLPVHTRTLKGHKHEDGTQSDSEDPLAKAASAAGVPLEASGEQVRLQRQIKRDPQELLHNQQAFVIEFFDEDTPRKKRSQSFTHSPSGDPKADKRRGPTPADRDRPSVPAPVQAGGRSSGPQRAGSLKREKTEERLGSPSPASRTPARPFGSVGRRSRLAQDFMAQCLRESSPAARPSPEKVPPVLPAPLTPHGTSPVGPPTPPPAPTDPQLTKARKQEEDDSLSDAGTYTIETEAQDTEVEEARKMIDQVFGVLESPELSRASSATFRPVIRGDRDESDDGGVAQRMALLQEFASRPLGAAPQAEHQGLPVPGSPGGQKWVSRWASLADSYSDPGLTEDGLGRRGGEPEGSLPVRMRRRLPQLPSERADSPAGPESSRRSGPGPPELDSEQPSRLFGQEELDPDSLSDASGSDGGRGPEPGVEPQDSRRRSPQEGPTWSRGRRSPRAPGEPTPASFFIGDQNGDAVLSRKPLAAPGDGEGLGQTAQPSPPARDGVYVSANGRMVIQLRPGRSPEPDGPAPAFLRQESFTKEPASGPPAPGKPPHISSHPLLQDLAATRAARMDFHSQDTHLILKETETALAALEARLLSNSVDAECEGGSTPRPPEDALSGDSDVDTASTVSLRSGKSGPSPTTPQPLRAQKEMSPSPPAAQDPGGTALVSAREQSSERQHHPLGPTDMGRGEPVRRSAIRRGHRPRGSLDWPSEERGPVLAHLPSSDVMASNHETPEATGAGRLGSRRKPAAPPPSPAAREEQSRSSASSQKGPQALTRSNSLSTPRPTRASRLRRARLGDASDTEAADGERGSLGNPEPVGRPAAEQAKKLSRLDILAMPRKRAGSFTGTSDPEAAPARTSFSGRSVELCCASRKPTMAEARAVSRKAANTATTTGPRQPFSRARSGSARYTSTTQTPRAGSSSRARSRAPGPRDTDDDEEEPDPYGFIVQTAEIAEIARLSQTLVKDVAILAQEIHDVAGDGDTLGSSEPAHSASLSNMPSTPASTISAREELVQRIPEASLNFQKVPPGSLNSRDFDQNMNDSCEDALANKTRPRNREEVIFDNLMLNPVSQLSQAIRENTEHLAEKMKILFQNTGRAWEDLEARINAENEVPILKTSNKEISSILKELRRVQKQLEVINAIVDPSGSLDLLTGNRSLASSAQPGLGKGRVAAQSPPSPASAEALLPALPLRNFPQRASCGPPSLPDPTFLPDAERFLI

SEQ ID NO: 1023 - DNA, 15563 bp, Homo sapiens
cgcacgccgagcggctgccgggggaagcagaggcgccggaggctggggcaccgccgacgcctcgggagccatggccgaagggggagaaggaggcgaggacgagatccagtttctgaggactgaggatgaagtggtactccagtgcatcgccaccattcataaggagcagaggaagttctgcctggcagccgagggacttgggaatcgcctgtgcttcttggaacccacttcagaagccaagtacattcctccagatctctgcgtctgcaattttgtgctggaacagtccctatctgtcagagccctgcaggaaatgcttgccaacacaggtgaaaatggcggcgaaggggcagcacaaggaggtggccacaggaccctgttatacggccatgcagttctcctgaggcactctttcagcggaatgtatctaacatgcttgactacatcaagatcccagacagacaaacttgcctttgatgtaggtctacgggaacatgccacaggagaagcctgttggtggactatacatcctgcttccaaacagaggtccgaaggagagaaagttcgaattggcgatgacctcatcctcgtcagcgtgtcctctgaaagataccttcatctctcagtatcaaatggtaacatacaagtggatgcctcctttatgcaaacactctggaatgtacatcctacgtgctcaggaagtagcatcgaagaaggatacctacttggtgggcatgtagtacgtcttttccatggtcatgatgaatgtttgacgataccatctacagaccagaatgattcccagcacaggaggatattctacgaagctgggggagctgggactcgagccaggtctctttggagagtggaaccccttcggataagctggagtggcagtaacatcagatggggccaggctttccgactccggcatctcaccacaggccactacctggccttgacagaagaccaaggccttatactgcaagaccgggcaaagtcagacaccaagtccacagctttctctttccgggcatcaaaggaactcaaggagaaattagactccagtcacaagcgagacatagaaggcatgggagttccagaaatcaagtatggagattctgtctgctttgtgcagcatatagccagtggtctgtgggtgacctacaaagcacaagacgccaaaacttcccgcctgggacctctaaaaagaaaggtcatactccatcaggaaggccacatggatgatggattaacactgcagagatgccagcgtgaggagtcccaggctgctcggatcatccggaacactacagccttattcagccagtttgtcagcggaaacaatcgcacagctgcccccatcaccctgcctatagaagaagtcctgcagaccctacaggacttgatcgcctacttccagcccccagaggaggagatgcgacatgaagacaagcagaacaagctccgctcactcaaaaacagacaaaatcttttcaaggaagagggaatgttggcccttgtcttaaattgcattgaccgcttaaatgtctacaatagcgtagcacactttgcagggattgcaagggaagagagtggcatggcctggaaagaaattctgaacctcctctacaaattgctggctgctctcattcgcggaaacagaaacaattgcgctcaattctccaataaccttgattggctcatcagtaaattggacagactagaatcttcctcaggtatcttggaagttttgcactgcatcttaactgaaagcccagaagccttaaatctgatagcggagggccacatcaagtcgatcatctccctgttggataagcacgggcggaatcacaaggttctggatatcctgtgctccctctgtctctgcaatggggttgcagtgagagccaaccagaatctgatctgtgacaacttgctgccccggagaaacctactcctgcagacacgactgattaacgatgtaaccagtatccggccaaacatcttcctgggagtcgcggagggctcagcccagtacaagaagtggtacttcgagctgattatcgaccaggtggaccccttcctaacagcagagcccacacatctgcgggtgggctgggcctcttcttcaggctatgccccatacccaggaggtggagaaggatggggaggcaatggtgttggtgacgacctgtactcctatggctttgatggacttcacctttggtcaggccggatacccagagctgtggcttccatcaaccagcacctcctgagatcggatgacgtggtaagctgctgcctggacctcggggtgcccagcatctcattccgcatcaatgggcagcccgtgcaggggatgtttgagaacttcaacacagacgggctcttcttccctgtgatgagcttttcagcaggtgtcaaagtacgtttcctgatgggtggacgtcatggagagtttaagttcctgcctccctctggctatgccccttgctatgaagccttacttccaaaagagaagatgagattggagcctgtcaaagaatataaacgtgatgctgatggcattagagatctcttgggtaccacccagttcctctcccaagcctctttcatcccatgccccgtagacaccagtcaggttattttgccacctcacctagaaaagatccgagacagactagctgaaaacatccatgagctttggggaatgaataaaatagaacttggctggactttcggcaagatacgagatgacaataaaagacaacacccttgccttgtggagttttcaaagctcccagaaactgagaagaactataacctgcaaatgtcaactgaaaccttaaaaaccctcttggccctggggtgccacattgctcatgttaacccagctgctgaggaggatctcaagaaggtcaaactgcccaaaaactatatgatgtccaacggctataagccagcccctttggatttgtctgatgtgaagctgttacctcctcaagaaattttagtggataagcttgcagaaaatgcacacaatgtttgggcaaaagacagaataaaacaaggatggacctatggcatccaacaggatttgaagaacaaaagaaatccccgtctggtgccatatgcattactggatgagcgtaccaagaagtcaaacagggacagcctgcgggaagctgtgcgcacttttgttggttacgggtataacattgagccatcagaccaagaactagctgactcggctgtggagaaggtcagcatagacaagatccgatttttccgggtagagcgatcttatgcagtgagatctggaaagtggtattttgagtttgaagtggtgactggaggagacatgcgagtcggctgggcgaggccaggctgtcgacctgatgtcgagctgggggccgatgaccaagcctttgtgtttgaaggcaacaggggccagcgttggcatcaaggaagtgggtattttgggcgtacctggcagccaggggatgtggtcggatgtatgattaacctggatgatgcttcaatgatcttcacactgaatggggagctgctgatcaccaacaaaggctctgaacttgccttcgctgactacgagattgagaatggcttcgtgcccatctgctgtctgggtctatctcagatcggccgcatgaatctcgggacagatgccagtaccttcaagttttataccatgtgcggtctccaagagggctttgagccttttgctgtcaacatgaacagagatgttgctatgtggttcagcaagcgcctcccgacgtttgtcaacgtgccaaaggatcatccacacatagaggtcatgaggattgatggcaccatggacagccctccgtgtctcaaggtgacgcataagacatttggcacacagaatagcaatgccgacatgatctattgccgcttgagcatgcctgtcgagtgccactcctccttcagccacagcccctgtctggacagtgaagctttccagaaaaggaaacagatgcaagaaatactctctcatacaacaacacagtgctactacgccatccgcatctttgctggacaggatccatcctgtgtctgggtcggatgggtgactccagactatcacttgtacagtgaaaagtttgacctgaataaaaactgcacagtgactgtcaccctaggggatgaaagaggccgggtccatgaaagtgtgaaacgcagcaactgctacatggtctggggtggagacattgtagccagttcccagagatcaaatcggagcaacgtggacctggagatcggctgtctcgtggatctggccatgggcatgttgtccttctcagccaatggaaaggaactgggcacctgctaccaggtggagcctaataccaaagtgtttccagcagtcttcctgcagcctacaagtacttctttgtttcagtttgaacttggaaagctgaagaacgcaatgcccctgtcagcggccatattcaggagtgaagagaagaacccagtcccacagtgtccacctcggctggacgtccaaaccatccagcccgtgctctggagccgcatgcccaacagcttcctgaaggtggagaccgagcgtgtgagcgagcgccacggctgggtggtgcagtgcctggagcccctgcagatgatggcgctccacatccccgaggagaacaggtgtgtggatatcctggagctctgtgagcaggaggacctgatgcggttccattaccacacgctgaggctctacagcgcggtgtgcgccctgggaaacagccgcgtggcctacgccctgtgcagccacgtggacctctcccagctcttctatgccattgacaacaagtacctccccggcctccttcgatctggtttctatgacctgctcatcagcatccacctggccagcgccaaggagaggaagctgatgatgaagaacgagtacatcatccccattaccagcaccaccaggaatatccgcctcttcccggacgagtccaagaggcatggactgcctggggtgggcctgagaacatgtctcaagcccgggttcaggttctccaccccttgctttgttgtgactggtgaggatcaccaaaagcagagccccgagattcccttggagagtctcaggacgaaggctctgagtatgctgacagaggcagtgcagtgcagcggggcccacatccgagaccctgtaggggggtctgtggagttccagtttgtgcctgtgctgaaactcattggaaccctgctggtcatgggcgtgtttgatgatgatgatgttcggcagatcctcctcctgattgatccctctgtgtttggggagcatagtgcggggacagaggagggagcagaaaaggaggaagtgacccaggtggaggagaaggctgtggaggctggggagaaggccggcaaggaggctcctgtcaaaggcttgttgcagactcgattacccgaatccgtcaagctgcagatgtgtgagctcctcagctatctctgcgactgtgagctgcagcaccgagtggaggccattgtggcatttggtgacatttatgtctccaagctgcaggcaaatcagaagttccgctacaatgagctcatgcaggccctgaacatgtctgcggccctgactgcccggaagaccaaggagttccgctcacccccacaggagcagatcaacatgctgcttaactttcaactgggagagaactgcccctgcccagaggagattcgggaggagctgtatgatttccatgaggaccttctccttcactgtggggttcctttggaagaagaggaagaggaggaggaggacacctcctggacaggaaaactctgtgccttggtttacaaaatcaaaggcccacccaagccagagaaggagcagccgacggaggaggaggagagatgccccacaacattgaaggaactcatctcacagacgatgatctgctgggcccaggaggaccagatccaggattcagagctggtccgaatgatgttcaacctcctccggaggcagtatgacagcattggggagctgctgcaggcgctgcggaagacctacaccatcagccacacctctgtaagcgacaccatcaacctgctggctgccctgggccaaatccgctccctcctcagtgtcaggatgggcaaggaagaggagttgctcatgatcaatgggctgggagacataatgaacaacaaggtgttttaccagcatcccaacctcatgagagtcctgggcatgcacgagacggtgatggaggtgatggtgaacgtgttgggtacagagaaatctcagattgcatttccaaagatggttgctagctgctgccgtttcctttgctatttctgtcgaattagccggcaaaatcagaaggccatgtttgagcatctgagttatcttctggagaatagcagtgttggcctagcctccccgtcgatgaggggatccaccccgctggatgtggcagcttcctctgtgatggacaacaatgagttagcgctgagcttagaggaaccagacctcgagaaggtggtgacctacttggcaggctgtggcctacagagctgccccatgcttctggccaaaggataccctgatgtcggctggaaccccattgaaggggaacgctacctgtccttcctgaggtttgctgtcttcgtgaacagtgagagtgtggaagaaaacgccagcgttgtggtcaagctgctcatcagacgcccagagtgcttcggcccggccctgcggggtgaggggggaaacgggctcttggcagccatgcagggtgccattaagatctctgagaacccagcgctcgacctcccctctcaaggatacaaaagagaagtcagcacgggggacgatgaagaggaagaagaaatcgtgcatatgggcaatgcaattatgtcattttattcggcccttatagatctactgggccgctgtgctcctgaaatgcacctcatccagacaggaaagggggaagccatccgcatcaggtccatcctgcgctccctggtccccacagaagacctggttgggatcatcagcatccccttgaaactgccctccctcaacaaagatgggtcggtcagtgagccagatatggcggccaatttctgccctgaccacaaggcacctatggtgctgttcttggaccgcgtttatggcattaaggatcaaacttttctgctccacttgctggaggttggatttttacctgacctaagagcttctgcctctctagatacagtttccctaagcaccacagaggctgcgcttgcactaaataggtatatatgttctgctgtgctcccgctcctcacaagatgtgcccctctctttgccggaacagaacactgcacctctctgattgattccacactgcagacaatatacaggctatccaagggacgttccctcaccaaagcacaaagggacactatagaagaatgtttgcttgccatttgcaatcacttgaggccttccatgttacagcaactcctgcgacgcctcgtttttgatgtgccgcaactcaatgaatactgcaaaatgcctctcaagcttctgacgaatcactatgaacagtgttggaagtattactgcctgccttcaggatgggggagctacgggctagctgtggaagaagagctgcacctaacggagaagcttttctgggggatttttgactcgctctcccataagaaatatgacccagatcttttccgaatggccctgccttgtctcagtgctatagctggggccttgccaccagattatttagataccagaatcacagccacgttggagaaacagatctcagtggatgcggatggcaactttgacccaaaacctattaacaccatgaatttttccttgcctgaaaaattggaatacatcgtcaccaagtatgctgagcattcacatgataaatgggcctgtgacaagagtcagagtggatggaaatatgggatttccctggatgaaaatgtgaagacccacccactgataaggcctttcaagacattaacggagaaggagaaggaaatttatcgctggcctgcgcgagagtccctgaaaaccatgctggctgtgggctggactgtggagaggaccaaagagggagaagctttggttcaacagcgggaaaatgagaagcttcgaagtgtgtcccaggccaaccagggcaacagctacagtcctgctcccctcgacctctcaaacgttgtgctctccagagagctccagggaatggtggaggtcgtggctgagaactatcacaatatctgggccaagaagaagaagctggagctggagagcaaaggtggtggcagccaccctcttctggtaccatatgacaccttgactgccaaggaaaagttcaaggaccgggagaaggcacaggacctgtttaagttcctccaagtgaatggcatcatagtttccaggggtatgaaggatatggagctggatgcctcctccatggagaagaggtttgcctataagttcttgaagaagatcctgaaatacgttgattctgctcaagaatttattgcccatttagaagccattgtcagcagtgggaaaactgaaaagtctccccgtgaccaggagatcaaattctttgccaaagttctcctcccgctggttgaccagtacttcaccagtcattgcctctacttcttgtcatcccctctgaagccccttagcagcagcggatatgcctcccataaggagaaagaaatggtggccggcctgttctgcaaacttgccgctctcgttagacacagaatttccctctttggtagtgattctactacaatggtgagctgtcttcacatcttagctcagacacttgacacaaggactgtcatgaagtcaggctcagagctggtgaaggctgggttacgagcattctttgaaaatgctgcagaagatttggagaagacttcagaaaacctgaaacttgggaagttcacccattcccgaacgcagattaaaggcgtttctcagaatattaactacactacagtggctctgctccccatcctgacgtccatctttgagcacgtcactcagcatcagtttggaatggatctactcttgggtgatgtgcagatttcatgctaccacatactgtgcagcctctactcccttgggacgggaaagaacatttatgttgaaaggcaacgccctgcccttggagaatgtctggcctcgctggcagctgccataccagtggcattcctggagcccacccttaatcgctacaatccactctcggtcttcaacaccaaaacccccagggagaggtctattctggggatgccagacacggtagaagacatgtgtcctgacatcccccagctggaaggcctgatgaaggaaatcaacgacctggccgagtcaggggcccggtacacagagatgccccatgtcatcgaggtgatcttacccatgctctgcaactacttgtcctactggtgggagcggggtcctgagaacctgccccccagcacagggccatgctgcaccaaggtcacctctgaacacctcagtctcatcctgggcaacattctgaaaatcatcaacaacaacctgggcatcgatgaggcctcctggatgaagcgcattgcagtgtatgcacagcccatcatcagcaaagccaggcccgacctgctgagaagccacttcatcccaactctggagaagctgaagaaaaaggctgtcaagacggtgcaggaggaggagcagttgaaagccgatggcaaaggggacacccaggaggcagaactcctcatcctggacgagttcgcggtcctctgcagagatctctatgccttctaccccatgctgatccgctacgtggacaacaacagatctaactggctgaaaagtcctgatgctgattctgaccagctcttccgcatggtggcagaagtcttcattctgtggtgtaaatctcataacttcaagagagaagagcaaaattttgtgattcagaatgaaattaataatttggcatttttaactggagacagcaaaagcaagatgtcaaaagccatgcaagtaaagtctggaggacaagaccaggagcggaagaagacaaagcggcggggagacttgtattccatccagacctccctcatcgtggctgcactcaagaaaatgctgcccattggtttgaatatgtgtactccaggcgaccaggagctgatctccctcgcaaaatcgcgatacagccatagggacacagatgaagaggtcagagaacatctgcggaacaacttgcacttgcaggaaaagtctgatgacccagctgtaaaatggcaactgaacctctacaaggatgttctgaagagtgaagaacctttcaatccggaaaagacagtggagcgtgtgcagagaatttcagcagctgtcttccacctggaacaggtggaacagcctttgaggtccaagaaggccgtctggcacaaactgttatcaaagcaacggaaacgggcagtggtggcctgtttcaggatggcccctctctacaacctgcccaggcaccgctctattaacctcttcctccatggctatcagagattttggatagaaacagaggagtattcctttgaagagaaactagtacaggatttggctaaatctccaaaggtggaagaggaggaggaggaagagacagaaaaacaacctgacccactacatcagatcattctctattttagccgcaacgctctcacggagaggagcaaattggaagacgaccctttgtacacctcctattccagcatgatggccaagagttgtcaaagtggtgaggatgaagaagaagatgaagacaaggaaaaaacattcgaagagaaagagatggagaagcaaaaaaccctctatcagcaagctcggctgcatgagcgtggtgctgcagagatggtccttcagatgataagcgctagcaaaggtgagatgagccccatggtggttgagacgctgaagctggggatcgccattctgaacggaggcaatgctggtgtgcaacagaaaatgctagattacctaaaggagaaaaaggatgctggattctttcaaagcctttctggtcttatgcagtcttgcagtgtccttgatttgaatgcatttgagaggcagaataaagctgaaggcctggggatggtgactgaagaaggaacactcattgttcgggaacgtggtgaaaaagtactccagaatgacgagttcacgcgtgatctctttagattcctacagttactttgtgagggacataacagtgactttcagaacttcctgcggactcagatgggcaacaccaccaccgtgaatgtcatcatcagcactgtggactaccttctgcgtctgcaggaatcaatcagtgatttctactggtattattcagggaaggacatcattgatgaatctggacagcacaatttttccaaagctctggcagtcaccaagcagattttcaattctcttacagaatacatccagggcccttgcattggtaatcaacagagcctggctcacagcaggctgtgggacgcagtggttggcttcctccatgtctttgctaatatgcagatgaaactctctcaggattccagtcagatcgagctgctgaaggaactcttggatctccttcaggacatggtggtgatgcttctgtccctcctggaagggaatgtggtaaatggcaccattggcaagcagatggttgacacactggtagaatcatctaccaatgtagaaatgatcttgaaattctttgacatgttcttgaaacttaaagacttaaccagctcagacaccttcaaagaatatgacccagatggtaaaggaattatctccaaaaaagaattccagaaggccatggaagggcaaaaacagtacacgcagtcagagattgactttctcctgtcgtgtgcagaagctgatgagaatgacatgtttaattacgttgattttgtagaccggttccatgagccagccaaggacatagggtttaatgtggctgtgttattgacaaatctttctgaacacatgccaaacgattcccgcctgaagtgtctgttggacccagcagaaagtgtgctaaattacttcgaaccctacctaggacgcatcgagatcatgggtggggccaagaagattgagcgtgtttattttgagatcagtgaatccagtcgcactcagtgggagaagccccaggtgaaggaatctaagcgacagttcatttttgatgttgtcaatgaaggtggggagcaggaaaagatggagctgtttgtgaacttctgtgaggacaccatctttgaaatgcagttagcatctcagatctctgaatccgattcagctgacaggccagaagaggaggaagaagatgaagattcttcttacgtgttagaaattgcgggtgaagaggaagaagacgggtctcttgagccggcctctgcatttgctatggcctgtgcctctgtgaagaggaatgtcaccgacttcctgaagagagcaaccctgaagaacctcaggaagcagtacaggaacgtgaaaaagatgactgcgaaggagctggtgaaggtgctcttctcctttttctggatgctgttcgtggggctattccagttgctcttcaccatcctgggaggaatctttcagatcctctggagcacagtgtttggagggggcctggtagaaggggcaaagaacatcagagtgaccaagatcctgggtgacatgcctgacccaacccaatttggtatccatgatgacactatggaggctgagagggcagaggtgatggagccaggtatcaccactgaactagtacacttcataaagggggagaagggagatacagatatcatgtcagacctctttggactccacccaaagaaagagggcagcttaaagcatgggcctgaagtgggtttgggtgacctctcagaaattattggcaaggatgaaccccctacattagagagtactgtacagaagaagaggaaagctcaggcagcagaaatgaaagcagcaaatgaagcagaaggaaaagtagaatccgagaaggcagacatggaagatggagagaaggaagacaaagacaaagaagaggagcaagctgagtacctgtggacagaagtgacaaaaaagaagaagcggcggtgtggtcagaaggttgagaagccggaagctttcacagccaatttctttaaagggctggaaatctatcagaccaagttactgcattacctggccaggaatttctacaacctgaggttccttgctctgtttgtagccttcgctatcaacttcatcctgcttttttataaggtcactgaagaacctttagaagaagagacagaggatgttgcaaacctatggaattcctttaatgacgaggaagaggaagaagcgatggtattctttgtccttcaggagagcaccgggtatatggcaccaaccctgcgtgccctggccatcatccataccatcatctctctagtctgtgtggtgggctactactgcctgaaggtgcctttggtggttttcaaaagggaaaaagaaatcgccaggaagctggagtttgatggcctatatatcaccgaacagccatctgaagatgacatcaaggggcagtgggaccgcttggtgatcaacacaccatcttttcctaataactactgggacaagtttgtaaagagaaaggtgatcaacaagtatggagatctctacggagcagaacgcattgctgaacttctgggtttggacaaaaatgctcttgactttagcccagtagaagagaccaaagcagaagcggcttctctggtgtcatggctaagttccatagacatgaagtaccatatctggaagcttggagttgtttttactgacaactcctttctctaccttgcctggtatacaaccatgtcagtcctgggccactacaataacttcttctttgctgctcacctattggacatcgcaatgggcttcaagacactgaggaccattctgtcatctgtaactcacaatggcaaacagttggttctgactgtcggtctcctggccgtggtggtttatctctatactgtggtggctttcaacttcttccgcaagttctacaacaaaagcgaagacgatgacgagcccgatatgaagtgcgacgacatgatgacgtgttaccttttccacatgtacgtgggagtgagagcaggaggtggcattggtgatgaaattgaagaccctgctggtgatccttatgaaatgtatcgcattgtctttgacattacctttttcttcttcgtcattgtcatcttgctggccatcattcaaggtcttattattgatgctttcggagagctaagagaccagcaggaacaagtacgagaagatatggagactaaatgtttcatctgtgggattggcaatgactactttgacacaacccctcatggttttgaaacacatacattacaagagcacaacttagccaactacttgttctttctgatgtatttgattaataaagatgaaacagagcacacgggtcaggaatcttatgtctggaagatgtaccaagaaaggtgttgggatttcttcccagccggtgactgctttcgtaaacaatatgaagatcagcttggataaatctgaatcaaagaagcgcgacaattctggacagtcaacttcccatgaaataaagtcccctttttacagttctgcaacatatctgaaatgtgacattttctaaatgcctcccttaaaaaaaaaactgctgaaaatctgtgctattttgaaattgatttggctttttgtgcctaatggacatacactgtgggagagaacctgtcaaaatgtcgaagaaggaaggcgaagaatcaagtaatctctaggcaaatgccttcaagttttccagttctgaggtaactagttcagtttgttgggatggaagcatgaaggaaagggctagagaagtatgaaatctcgaatgtgtaatacctgaaaatttaaacacttgaatgtcatcatggtatccaacttgtgactcatagggtctgaactcactccaaaagataataactgcagtctaatttttcccatggtacttgctagtgactgtatccagaaaagctttaagcagttaaagaaacagaaaaaaaccgacactttgtcgacactgaaatatcgattaagtgccttaaaacctctttagacatagctatgcaagttttttatgtttgtgttccagaaggacagttccattcattagttgtgatcttccgtcttactttatgaaactgcacttgaaggttattcatacaagtttttttagtaacagctgtcagtcaactgctgttattagaagaaaagtactgtactgaaaattcagaaaaaaaatctcaaccttatgccaaaatggagtaatgctttatggtcccttgtaagtagtggagctgctctgtttaggtgaatctcctcaaatacaatgaagtgcccactgcaataaagtaatacgtaccaataaaaa

SEQ ID NO: 1024 - protein, 4870 aa, Homo sapiens
MAEGGEGGEDEIQFLRTEDEVVLQCIATIHKEQRKFCLAAEGLGNRLCFLEPTSEAKYIPPDLCVCNFVLEQSLSVRALQEMLANTGENGGEGAAQGGGHRTLLYGHAVLLRHSFSGMYLTCLTTSRSQTDKLAFDVGLREHATGEACWWTIHPASKQRSEGEKVRIGDDLILVSVSSERYLHLSVSNGNIQVDASFMQTLWNVHPTCSGSSIEEGYLLGGHVVRLFHGHDECLTIPSTDQNDSQHRRIFYEAGGAGTRARSLWRVEPLRISWSGSNIRWGQAFRLRHLTTGHYLALTEDQGLILQDRAKSDTKSTAFSFRASKELKEKLDSSHKRDIEGMGVPEIKYGDSVCFVQHIASGLWVTYKAQDAKTSRLGPLKRKVILHQEGHMDDGLTLQRCQREESQAARIIRNTTALFSQFVSGNNRTAAPITLPIEEVLQTLQDLIAYFQPPEEEMRHEDKQNKLRSLKNRQNLFKEEGMLALVLNCIDRLNVYNSVAHFAGIAREESGMAWKEILNLLYKLLAALIRGNRNNCAQFSNNLDWLISKLDRLESSSGILEVLHCILTESPEALNLIAEGHIKSIISLLDKHGRNHKVLDILCSLCLCNGVAVRANQNLICDNLLPRRNLLLQTRLINDVTSIRPNIFLGVAEGSAQYKKWYFELIIDQVDPFLTAEPTHLRVGWASSSGYAPYPGGGEGWGGNGVGDDLYSYGFDGLHLWSGRIPRAVASINQHLLRSDDVVSCCLDLGVPSISFRINGQPVQGMFENFNTDGLFFPVMSFSAGVKVRFLMGGRHGEFKFLPPSGYAPCYEALLPKEKMRLEPVKEYKRDADGIRDLLGTTQFLSQASFIPCPVDTSQVILPPHLEKIRDRLAENIHELWGMNKIELGWTFGKIRDDNKRQHPCLVEFSKLPETEKNYNLQMSTETLKTLLALGCHIAHVNPAAEEDLKKVKLPKNYMMSNGYKPAPLDLSDVKLLPPQEILVDKLAENAHNVWAKDRIKQGWTYGIQQDLKNKRNPRLVPYALLDERTKKSNRDSLREAVRTFVGYGYNIEPSDQELADSAVEKVSIDKIRFFRVERSYAVRSGKWYFEFEVVTGGDMRVGWARPGCRPDVELGADDQAFVFEGNRGQRWHQGSGYFGRTWQPGDVVGCMINLDDASMIFTLNGELLITNKGSELAFADYEIENGFVPICCLGLSQIGRMNLGTDASTFKFYTMCGLQEGFEPFAVNMNRDVAMWFSKRLPTFVNVPKDHPHIEVMRIDGTMDSPPCLKVTHKTFGTQNSNADMIYCRLSMPVECHSSFSHSPCLDSEAFQKRKQMQEILSHTTTQCYYAIRIFAGQDPSCVWVGWVTPDYHLYSEKFDLNKNCTVTVTLGDERGRVHESVKRSNCYMVWGGDIVASSQRSNRSNVDLEIGCLVDLAMGMLSFSANGKELGTCYQVEPNTKVFPAVFLQPTSTSLFQFELGKLKNAMPLSAAIFRSEEKNPVPQCPPRLDVQTIQPVLWSRMPNSFLKVETERVSERHGWVVQCLEPLQMMALHIPEENRCVDILELCEQEDLMRFHYHTLRLYSAVCALGNSRVAYALCSHVDLSQLFYAIDNKYLPGLLRSGFYDLLISIHLASAKERKLMMKNEYIIPITSTTRNIRLFPDESKRHGLPGVGLRTCLKPGFRFSTPCFVVTGEDHQKQSPEIPLESLRTKALSMLTEAVQCSGAHIRDPVGGSVEFQFVPVLKLIGTLLVMGVFDDDDVRQILLLIDPSVFGEHSAGTEEGAEKEEVTQVEEKAVEAGEKAGKEAPVKGLLQTRLPESVKLQMCELLSYLCDCELQHRVEAIVAFGDIYVSKLQANQKFRYNELMQALNMSAALTARKTKEFRSPPQEQINMLLNFQLGENCPCPEEIREELYDFHEDLLLHCGVPLEEEEEEEEDTSWTGKLCALVYKIKGPPKPEKEQPTEEEERCPTTLKELISQTMICWAQEDQIQDSELVRMMFNLLRRQYDSIGELLQALRKTYTISHTSVSDTINLLAALGQIRSLLSVRMGKEEELLMINGLGDIMNNKVFYQHPNLMRVLGMHETVMEVMVNVLGTEKSQIAFPKMVASCCRFLCYFCRISRQNQKAMFEHLSYLLENSSVGLASPSMRGSTPLDVAASSVMDNNELALSLEEPDLEKVVTYLAGCGLQSCPMLLAKGYPDVGWNPIEGERYLSFLRFAVFVNSESVEENASVVVKLLIRRPECFGPALRGEGGNGLLAAMQGAIKISENPALDLPSQGYKREVSTGDDEEEEEIVHMGNAIMSFYSALIDLLGRCAPEMHLIQTGKGEAIRIRSILRSLVPTEDLVGIISIPLKLPSLNKDGSVSEPDMAANFCPDHKAPMVLFLDRVYGIKDQTFLLHLLEVGFLPDLRASASLDTVSLSTTEAALALNRYICSAVLPLLTRCAPLFAGTEHCTSLIDSTLQTIYRLSKGRSLTKAQRDTIEECLLAICNHLRPSMLQQLLRRLVFDVPQLNEYCKMPLKLLTNHYEQCWKYYCLPSGWGSYGLAVEEELHLTEKLFWGIFDSLSHKKYDPDLFRMALPCLSAIAGALPPDYLDTRITATLEKQISVDADGNFDPKPINTMNFSLPEKLEYIVTKYAEHSHDKWACDKSQSGWKYGISLDENVKTHPLIRPFKTLTEKEKEIYRWPARESLKTMLAVGWTVERTKEGEALVQQRENEKLRSVSQANQGNSYSPAPLDLSNVVLSRELQGMVEVVAENYHNIWAKKKKLELESKGGGSHPLLVPYDTLTAKEKFKDREKAQDLFKFLQVNGIIVSRGMKDMELDASSMEKRFAYKFLKKILKYVDSAQEFIAHLEAIVSSGKTEKSPRDQEIKFFAKVLLPLVDQYFTSHCLYFLSSPLKPLSSSGYASHKEKEMVAGLFCKLAALVRHRISLFGSDSTTMVSCLHILAQTLDTRTVMKSGSELVKAGLRAFFENAAEDLEKTSENLKLGKFTHSRTQIKGVSQNINYTTVALLPILTSIFEHVTQHQFGMDLLLGDVQISCYHILCSLYSLGTGKNIYVERQRPALGECLASLAAAIPVAFLEPTLNRYNPLSVFNTKTPRERSILGMPDTVEDMCPDIPQLEGLMKEINDLAESGARYTEMPHVIEVILPMLCNYLSYWWERGPENLPPSTGPCCTKVTSEHLSLILGNILKIINNNLGIDEASWMKRIAVYAQPIISKARPDLLRSHFIPTLEKLKKKAVKTVQEEEQLKADGKGDTQEAELLILDEFAVLCRDLYAFYPMLIRYVDNNRSNWLKSPDADSDQLFRMVAEVFILWCKSHNFKREEQNFVIQNEINNLAFLTGDSKSKMSKAMQVKSGGQDQERKKTKRRGDLYSIQTSLIVAALKKMLPIGLNMCTPGDQELISLAKSRYSHRDTDEEVREHLRNNLHLQEKSDDPAVKWQLNLYKDVLKSEEPFNPEKTVERVQRISAAVFHLEQVEQPLRSKKAVWHKLLSKQRKRAVVACFRMAPLYNLPRHRSINLFLHGYQRFWIETEEYSFEEKLVQDLAKSPKVEEEEEEETEKQPDPLHQIILYFSRNALTERSKLEDDPLYTSYSSMMAKSCQSGEDEEEDEDKEKTFEEKEMEKQKTLYQQARLHERGAAEMVLQMISASKGEMSPMVVETLKLGIAILNGGNAGVQQKMLDYLKEKKDAGFFQSLSGLMQSCSVLDLNAFERQNKAEGLGMVTEEGTLIVRERGEKVLQNDEFTRDLFRFLQLLCEGHNSDFQNFLRTQMGNTTTVNVIISTVDYLLRLQESISDFYWYYSGKDIIDESGQHNFSKALAVTKQIFNSLTEYIQGPCIGNQQSLAHSRLWDAVVGFLHVFANMQMKLSQDSSQIELLKELLDLLQDMVVMLLSLLEGNVVNGTIGKQMVDTLVESSTNVEMILKFFDMFLKLKDLTSSDTFKEYDPDGKGIISKKEFQKAMEGQKQYTQSEIDFLLSCAEADENDMFNYVDFVDRFHEPAKDIGFNVAVLLTNLSEHMPNDSRLKCLLDPAESVLNYFEPYLGRIEIMGGAKKIERVYFEISESSRTQWEKPQVKESKRQFIFDVVNEGGEQEKMELFVNFCEDTIFEMQLASQISESDSADRPEEEEEDEDSSYVLEIAGEEEEDGSLEPASAFAMACASVKRNVTDFLKRATLKNLRKQYRNVKKMTAKELVKVLFSFFWMLFVGLFQLLFTILGGIFQILWSTVFGGGLVEGAKNIRVTKILGDMPDPTQFGIHDDTMEAERAEVMEPGITTELVHFIKGEKGDTDIMSDLFGLHPKKEGSLKHGPEVGLGDLSEIIGKDEPPTLESTVQKKRKAQAAEMKAANEAEGKVESEKADMEDGEKEDKDKEEEQAEYLWTEVTKKKKRRCGQKVEKPEAFTANFFKGLEIYQTKLLHYLARNFYNLRFLALFVAFAINFILLFYKVTEEPLEEETEDVANLWNSFNDEEEEEAMVFFVLQESTGYMAPTLRALAIIHTIISLVCVVGYYCLKVPLVVFKREKEIARKLEFDGLYITEQPSEDDIKGQWDRLVINTPSFPNNYWDKFVKRKVINKYGDLYGAERIAELLGLDKNALDFSPVEETKAEAASLVSWLSSIDMKYHIWKLGVVFTDNSFLYLAWYTTMSVLGHYNNFFFAAHLLDIAMGFKTLRTILSSVTHNGKQLVLTVGLLAVVVYLYTVVAFNFFRKFYNKSEDDDEPDMKCDDMMTCYLFHMYVGVRAGGGIGDEIEDPAGDPYEMYRIVFDITFFFFVIVILLAIIQGLIIDAFGELRDQQEQVREDMETKCFICGIGNDYFDTTPHGFETHTLQEHNLANYLFFLMYLINKDETEHTGQESYVWKMYQERCWDFFPAGDCFRKQYEDQLG

SEQ ID NO: 1025 - DNA, 5532 bp, Homo sapiens
ggcccaccgccgcccaggcaaggccgccctgccttgggcgcagcgctgccatggctgggggccgtggggcccccgggcgcggccgggacgagcctccggagagctacccgcaacgacaggaccacgagctacaggccctggaggccatctacggcgcggacttccaagacctgcggccggacgcttgcggaccggtcaaagagccccctgaaatcaatttagttttgtaccctcaaggcctaactggtgaagaagtatatgtaaaagtggatttgagggttaaatgcccacctacctatccagatgtagttcctgaaatagagttaaaaaatgccaaaggtctatcaaatgaaagtgtcaatttgttaaaatctcgcctagaagaactggccaagaaacactgtggggaggtgatgatctttgaactggcttaccacgtgcagtcatttctcagcgagcataacaagccccctcccaagtcttttcatgaagaaatgctggaaaggcgggctcaggaggagcagcagaggctgttggaggccaagcggaaagaagagcaggagcaacgtgaaatcctgcatgagattcagagaaggaaagaagagataaaagaagagaaaaaaaggaaagaaatggctaagcaggaacgtttggaaattgctagtttgtcaaaccaagatcatacctctaagaaggacccaggaggacacagaacggctgccattctacatggaggctctcctgactttgtaggaaatggtaaacatcgggcaaactcctcaggaaggtctaggcgagaacgtcagtattctgtatgtaatagtgaagattctcctggctcttgtgaaattctgtatttcaatatggggagtcctgatcagctcatggtgcacaaagggaaatgtattggcagtgatgaacaacttggaaaattagtctacaatgctttggaaacagccactggtggctttgtcttgttgtatgagtgggtccttcagtggcagaaaaaaatgggtccattccttaccagtcaagaaaaagagaagattgataagtgcaaaaagcagattcaaggaacagaaacagaattcaactcactggtaaaattgagccatccaaatgtagtacgctaccttgcaatgaatctcaaagagcaagacgactccatcgtggtggacattttagtggagcacattagtggggtctctcttgctgcacacctgagccactcaggccccatccctgtgcatcagcttcgcaggtacacagctcagctcctgtcaggccttgattatctgcacagcaattctgtggtgcataaggtcctgagtgcatctaatgtcttggtggatgcagaaggcaccgtcaagattacggactatagcatttctaagcgcctcgcagacatttgcaaggaggatgtgtttgagcaaacccgagttcgttttagtgacaatgctctgccttataaaacggggaagaaaggagatgtttggcgtcttggccttctgctgctgtccctcagccaaggacaggaatgtggagagtaccctgtgaccatccctagtgacttaccagctgactttcaagattttctaaagaaatgtgtgtgcttggatgacaaggaaagatggagtccccagcagttgttgaaacacagctttataaatccccagccaaaaatgcctctagtggaacaaagtcctgaagattctgaaggacaagattatgttgagactgttattcctagcaaccggctacccagtgctgccttctttagtgagacacagagacagttttcccgatacttcattgagtttgaagaattacaacttcttggtaaaggagcttttggagctgtcatcaaggtgcagaacaagttggacggctgctgctacgcagtgaagcgcatccccatcaacccggccagccggcagttccgcaggatcaagggcgaagtgacactgctgtcacggctgcaccatgagaacattgtgcgctactacaacgcctggatcgagcggcacgagcggccggcgggaccggggacgccgcccccggactccgggcccctggccaaggatgaccgagctgcacgcgggcagccggcgagcgacacagacggcctggacagcgtagaggccgccgcgccgccacccatcctcagcagctcggtggagtggagcacttcgggcgagcgctcggccagtgcccgtttccccgccaccggcccgggctccagcgatgacgaggacgacgacgaggacgagcacggtggcgtcttctcccagtccttcctgcctgcttcagattctgaaagtgatattatctttgacaatgaagatgagaacagtaaaagtcagaatcaggatgaagattgcaatgaaaagaatggctgccatgaaagtgagccatcagtgacgactgaggctgtgcactacctatacatccagatggagtactgtgagaagagcactttacgagacaccattgaccagggactgtatcgagacaccgtcagactctggaggctttttcgagagattctggatggattagcttatatccatgagaaaggaatgattcaccgggatttgaagcctgtcaacatttttttggattctgatgaccatgtgaaaataggtgattttggtttggcgacagaccatctagccttttctgctgacagcaaacaagacgatcagacaggagacttgattaagtcagacccttcaggtcacttaactgggatggttggcactgctctctatgtaagcccagaggtccaaggaagcaccaaatctgcatacaaccagaaagtggatctcttcagcctgggaattatcttctttgagatgtcctatcaccccatggtcacggcttcagaaaggatctttgttctcaaccaactcagagatcccacttcgcctaagtttccagaagactttgacgatggagagcatgcaaagcagaaatcagtcatctcctggctgttgaaccacgatccagcaaaacggcccacagccacagaactgctcaagagtgagctgctgcccccaccccagatggaggagtcagagctgcatgaagtgctgcaccacacgctgaccaacgtggatgggaaggcctaccgcaccatgatggcccagatcttctcgcagcgcatctcccctgccatcgattacacctatgacagcgacatactgaagggcaacttctcaatccgtacagccaagatgcagcagcatgtgtgtgaaaccatcatccgcatctttaaaagacatggagctgttcagttgtgtactccactactgcttccccgaaacagacaaatatatgagcacaacgaagctgccctattcatggaccacagcgggatgctggtgatgcttccttttgacctgcggatcccttttgcaagatatgtggcaagaaataatatattgaatttaaaacgatactgcatagaacgtgtgttcaggccgcgcaagttagatcgatttcatcccaaagaacttctggagtgtgcatttgatattgtcacttctaccaccaacagctttctgcccactgctgaaattatctacactatctatgaaatcatccaagagtttccagcacttcaggaaagaaattacagtatttatttgaaccataccatgttattgaaagcaatactcttacactgtgggatcccagaagataaactcagtcaagtctacattattctgtatgatgctgtgacagagaagctgacgaggagagaagtggaagctaaattttgtaatctgtctttgtcttctaatagtctgtgtcgactctacaagtttattgaacagaagggagatttgcaagatcttatgccaacaataaattcattaataaaacagaaaacaggtattgcacagttggtgaagtatggcttaaaagacctagaggaggttgttggactgttgaagaaactcggcatcaagttacaggtcttgatcaatttgggcttggtttacaaggtgcagcagcacaatggaatcatcttccagtttgtggctttcatcaaacgaaggcaaagggctgtacctgaaatcctcgcagctggaggcagatatgacctgctgattccccagtttagagggccacaagctctggggccagttcccactgccattggggtcagcatagctatagacaagatatctgctgctgtcctcaacatggaggaatctgttacaataagctcttgtgacctcctggttgtaagtgttggccagatgtctatgtccagggccatcaacctaacccagaaactctggacagcaggcatcacagcagaaatcatgtacgactggtcacagtcccaagaggaattacaagagtactgcagacatcatgaaatcacctatgtggcccttgtctcggataaagaaggaagccatgtcaaggttaagtctttcgagaaggaaaggcagacagagaagcgtgtgctggagactgaacttgtggaccatgtactgcagaaactgaggactaaagtcactgatgaaaggaatggcagagaagcttccgataatcttgcagtgcaaaatctgaaggggtcattttctaatgcttcaggtttgtttgaaatccatggagcaacagtggttcccattgtgagtgtgctagccccggagaagctgtcagccagcactaggaggcgctatgaaactcaggtacaaactcgacttcagacctcccttgccaacttacatcagaaaagcagtgaaattgaaattctggctgtggatctacccaaagaaacaatattacagtttttatcattagagtgggatgctgatgaacaggcatttaacacaactgtgaagcagctgctgtcacgcctgccaaagcaaagatacctcaaattagtctgtgatgaaatttataacatcaaagtagaaaaaaaggtgtctgtgctatttctgtacagctatagagatgactactacagaatcttattttaaccctaaagaactgtcgttaacctcattcaaacagacagaggcttatactggaataatggaatgttgtacattcatcataatttaaaattaaattctaagaagaggctgggtgcagtggctcacacctttaatcccagcactttgggaagccaaggcaggaagactgcttgaaaccaggagtttgagaccagcctgagcaacaaagcaagaccccatctctataaaaactaaaaaaattagttgggcatggtggcacatgcctgtagtcccagctactccagaggctgagatggatcatctgagcctcaggaggttgaggctgcagtgagctgtgactgcgccactgcactccagtctgggacaacagagcaagaccctgtcttaaaaaaaaaaagaaaaaaaaaatttttttctaagaagctgtcctacaaagttgagctttgttagtttttcatgtgtaatatattataaatttatcttttgggatataataaatgctttcatatacctgcaaaaaaaaaaaaaaaaaaaa

SEQ ID NO: 1026 - protein, 1649 aa, Homo sapiens
MAGGRGAPGRGRDEPPESYPQRQDHELQALEAIYGADFQDLRPDACGPVKEPPEINLVLYPQGLTGEEVYVKVDLRVKCPPTYPDVVPEIELKNAKGLSNESVNLLKSRLEELAKKHCGEVMIFELAYHVQSFLSEHNKPPPKSFHEEMLERRAQEEQQRLLEAKRKEEQEQREILHEIQRRKEEIKEEKKRKEMAKQERLEIASLSNQDHTSKKDPGGHRTAAILHGGSPDFVGNGKHRANSSGRSRRERQYSVCNSEDSPGSCEILYFNMGSPDQLMVHKGKCIGSDEQLGKLVYNALETATGGFVLLYEWVLQWQKKMGPFLTSQEKEKIDKCKKQIQGTETEFNSLVKLSHPNVVRYLAMNLKEQDDSIVVDILVEHISGVSLAAHLSHSGPIPVHQLRRYTAQLLSGLDYLHSNSVVHKVLSASNVLVDAEGTVKITDYSISKRLADICKEDVFEQTRVRFSDNALPYKTGKKGDVWRLGLLLLSLSQGQECGEYPVTIPSDLPADFQDFLKKCVCLDDKERWSPQQLLKHSFINPQPKMPLVEQSPEDSEGQDYVETVIPSNRLPSAAFFSETQRQFSRYFIEFEELQLLGKGAFGAVIKVQNKLDGCCYAVKRIPINPASRQFRRIKGEVTLLSRLHHENIVRYYNAWIERHERPAGPGTPPPDSGPLAKDDRAARGQPASDTDGLDSVEAAAPPPILSSSVEWSTSGERSASARFPATGPGSSDDEDDDEDEHGGVFSQSFLPASDSESDIIFDNEDENSKSQNQDEDCNEKNGCHESEPSVTTEAVHYLYIQMEYCEKSTLRDTIDQGLYRDTVRLWRLFREILDGLAYIHEKGMIHRDLKPVNIFLDSDDHVKIGDFGLATDHLAFSADSKQDDQTGDLIKSDPSGHLTGMVGTALYVSPEVQGSTKSAYNQKVDLFSLGIIFFEMSYHPMVTASERIFVLNQLRDPTSPKFPEDFDDGEHAKQKSVISWLLNHDPAKRPTATELLKSELLPPPQMEESELHEVLHHTLTNVDGKAYRTMMAQIFSQRISPAIDYTYDSDILKGNFSIRTAKMQQHVCETIIRIFKRHGAVQLCTPLLLPRNRQIYEHNEAALFMDHSGMLVMLPFDLRIPFARYVARNNILNLKRYCIERVFRPRKLDRFHPKELLECAFDIVTSTTNSFLPTAEIIYTIYEIIQEFPALQERNYSIYLNHTMLLKAILLHCGIPEDKLSQVYIILYDAVTEKLTRREVEAKFCNLSLSSNSLCRLYKFIEQKGDLQDLMPTINSLIKQKTGIAQLVKYGLKDLEEVVGLLKKLGIKLQVLINLGLVYKVQQHNGIIFQFVAFIKRRQRAVPEILAAGGRYDLLIPQFRGPQALGPVPTAIGVSIAIDKISAAVLNMEESVTISSCDLLVVSVGQMSMSRAINLTQKLWTAGITAEIMYDWSQSQEELQEYCRHHEITYVALVSDKEGSHVKVKSFEKERQTEKRVLETELVDHVLQKLRTKVTDERNGREASDNLAVQNLKGSFSNASGLFEIHGATVVPIVSVLAPEKLSASTRRRYETQVQTRLQTSLANLHQKSSEIEILAVDLPKETILQFLSLEWDADEQAFNTTVKQLLSRLPKQRYLKLVCDEIYNIKVEKKVSVLFLYSYRDDYYRILF

SEQ ID NO: 1027 - DNA, 1126 bp, Homo sapiens
ccagcctaggccgaacttccggctctcactgctaggggcttaagcggagggagtcgagccagcgtcgccgcgatggtgttgttggagagcgagcagttcctgacggagctgaccagacttttccagaagtgccggacgtcgggcagcgtctatatcaccttgaagaagtatgacggtcgaaccaaacccattccaaagaagggtactgtggagggctttgagcccgcagacaacaagtgtctgttaagagctaccgatgggaagaagaagatcagcactgtggtgagctccaaggaagtgaataagtttcagatggcttattcaaacctccttagagctaacatggatgggctgaagaagagagacaaaaagaacaaaactaagaagaccaaagcagcagcagcagcagcagcagcagcacctgccgcagcagcaacagcaccaacaacagcagcaacaacagcagcaacagcagcacagtaaagggcatacatttcctgctttcaccaattaaccactgaattgctattttttccttttggccagatagctaggtttctggttcccccacagtaggtgttttcacataagattagggtccttttggaaagaatagttgcagtgtttataggatagttgtggtaagaatctagtttattttgcatttggctaattggtctgtgctgcatggttatatactcctggattatagattaaaagtctctgtagacatctctgtgaagagcaagctatcattaaacatgtctgtttatcagcactgtctctttattcctttcccaacccattttaatagttctggcaataactactaaatctagaatgatgtgattaatgaataggctttagctctataatatcttctaggttattagaattgaaacctgacagttttataaaaagtcatgttatctcatgagctgcttcccacctggctgtataattttatcatcatggttccccagtttcgatgagttctcacagtcaaatgagagtttgtttaaccaccttaggagaaacatactacaaagtcatcaagaataaaggttccaaagtaattatgatttttggtttctttatgccctttggtttggatattttcatgtgc

SEQ ID NO: 1028 - protein, 136 aa, Homo sapiens
MVLLESEQFLTELTRLFQKCRTSGSVYITLKKYDGRTKPIPKKGTVEGFEPADNKCLLRATDGKKKISTVVSSKEVNKFQMAYSNLLRANMDGLKKRDKKNKTKKTKAAAAAAAAAPAAAATAPTTAATTAATAAQ

SEQ ID NO: 1029 - DNA, 3584 bp, Homo sapiens
gctggtcctatcccactgggaccgtcgctgccactcagccagagagccagcatcttggcaagggctgggcctggagtgaagctggaagggctagcatggagagcctgtcacctgggggaccacctggccacccttaccagggggaggcctctacctgctggcagctcacagtgagggtcctggaggcgcggaacctgcgctgggctgacctgttgagtgaggccgacccttacgtgatcctacagctgtcgaccgcacctggaatgaagtttaagaccaagacgctcaccgacaccagtcatcctgtgtggaatgaggccttccgtttccttatccaaagtcaggtcaagaatgttctggagcttagcatctatgatgaggactcagtcacggaggatgacatctgcttcaaggttctctatgacatctcagaagtcctccctggcaagctgctccggaaaaccttctcccagagtccccagggagaggaggagctggatgtggagttcctgatggaagaaacgtcagatcgcccagaaaacctcatcaccaacaaagtcattgtggcccgagagctgtcatgcctggatgtgcatctggacagcacagggagcaccgctgtggttgcagatcaggacaagctggagctggagctggtgctgaaggggtcctatgaggacacacagacatccttcctgggcacagcctctgccttccgcttccactacatggcagccctagagacagagctgagcgggcgcctgaggagctccagaagcaatggctggaatggggacaactcagctgggtacctcactgtgcccctgaggcccttgaccattgggaaggaggtgactatggatgttcctgctccaaatgccccaggagtgaggctgcagctcaaggcagagggctgccctgaggagctggccgtgcacctgggcttcaatctctgtgcagaggagcaggccttcctgagcaggaggaagcaggtggtggccaaggccctgaagcaggccctgcagctggacagagacctgcaggaggatgaggtacccgttgtgggcatcatggccacaggaggaggtgcccgggccatgacctcactctacggccacctattggccttgcagaagctgggcctcctagactgtgtgacctacttcagtggcatctctggctctacgtggacaatggcccacctgtacggggaccctgagtggtcgcagagggacctggagggacctatcagatacgcccgggagcacctggccaagagcaagctggaggtcttttccccagagcgcctggcgagctaccgccgggagctggagctgcgggctgagcagggccaccccacgacctttgtggacctgtgggcgctagtgctggagtccatgctgcacggccaggtgatggatcagaagctgtcaggacagagagccgccctggaacggggtcagaaccctctgcccctctacttgagcctcaatgtcaaagagaacaatctggagacactggacttcaaggagtgggttgagttctccccctatgaggtcggtttcctgaagtacggggccttcgtccctcctgagctcttcggctccgagttcttcatgggacggctgatgaggaggatcccggagccccggatctgctttctggaagccatctggagcaacattttctccctgaacctgctggatgcctggtatgacctcaccagttctggggagtcctggaaacagcacatcaaggacaagaccaggagcttagagaaggagcccctgaccacctcggggacctcctcgcggctggaggcctcgtggctgcagccaggcacggcgctggcccaggcatttaaaggcttcctgacaggcaggcccctccaccagcgcagccccaacttcctccagggcctccagctgcaccaggactactgtagccacaaagacttctccacctgggcagactaccagcttgactccatgcccagccagctgacccccaaggagccccggctctgcctggtggacgccgcctacttcatcaacaccagctctccctccatgttccggccaggccgcaggctggacctcatcctctccttcgactactccctatctgcgcccttcgaggcactgcagcagacggagctgtactgccgggcccgggggctgcccttcccccgggtggaacccagccctcaggaccagcaccagccaagggaatgccacctcttctcagaccccgcctgccccgaggccccgatcctgctgcacttcccgctggtcaatgcctccttcaaggaccactcagcccccggtgtccagcgcagccccgcagagctccagggtggccaagtggatctcaccggggccacctgcccctacaccctgtccaacatgacctacaaggaggaagacttcgagcgcctgctgcggctcagtgactacaacgtgcagaccagccagggtgccatcctgcaggccctgaggaccgcgctgaagcaccggactctagaggcgaggcctccaagggcacagacctgaggttgctcagaggctgcaggaccctccagggcctgcgggcataacctgatctgtagctgggctcagccacaggccttcctggttggagttctgggctctcccaggcctgggtggcctctgtagctggtctcactgcccagagggaactgcacacacagacttctctcttacgttcatggctggcttgagatgagttgaaaataacttcgccaggccagtgtgtagaacagctggtccaaccagacagactttcacaccacaattacttccatgcctgagcaggatagatttgaagtgcaagccggaggcagcagatcaggagtagggacaggaaggacaggggatgcctgacctgacaggtggcttcaggcctcgggaatcacaagacatcctgaacacattgcctcctcatcttcttcctgctcctccacctcctcctctccttgtccttctcctctttgtcctcctgctttccgtatccaagtcttgtacttgtttaaatttattcctaaatattttattctttttgataagtggagttactttcttaatttcatttagattattcattgctattttatagaaatacaatggatttttaaatgttgatcttgtattccgcaatcttgctgaagttgtttaccggctctaatacttttgcggatttcttagaattttctgtagacagatcatgccatctccaaatagagatggttttacttcttcctgtctgatctgaatgccttttatttatttttcccaattgccctgagcagtacaatgatgaacacacgtttcaagagcagacatcttgtcttgttcctgactctgacaagaaagcataagtctctcaccatttagtgtgattttagctgtgggtttttcttggacatccttatcaggttgagaaagttctcttttatttctagtttattgagtgttttatgatgaaacggtgttaggttttgtcaagtgatttttctgtgtctatgggcatgatcatgtggttttgtcgtgtattttattaatgta

SEQ ID NO: 1030 - protein, 818 aa, Homo sapiens
MESLSPGGPPGHPYQGEASTCWQLTVRVLEARNLRWADLLSEADPYVILQLSTAPGMKFKTKTLTDTSHPVWNEAFRFLIQSQVKNVLELSIYDEDSVTEDDICFKVLYDISEVLPGKLLRKTFSQSPQGEEELDVEFLMEETSDRPENLITNKVIVARELSCLDVHLDSTGSTAVVADQDKLELELVLKGSYEDTQTSFLGTASAFRFHYMAALETELSGRLRSSRSNGWNGDNSAGYLTVPLRPLTIGKEVTMDVPAPNAPGVRLQLKAEGCPEELAVHLGFNLCAEEQAFLSRRKQVVAKALKQALQLDRDLQEDEVPVVGIMATGGGARAMTSLYGHLLALQKLGLLDCVTYFSGISGSTWTMAHLYGDPEWSQRDLEGPIRYAREHLAKSKLEVFSPERLASYRRELELRAEQGHPTTFVDLWALVLESMLHGQVMDQKLSGQRAALERGQNPLPLYLSLNVKENNLETLDFKEWVEFSPYEVGFLKYGAFVPPELFGSEFFMGRLMRRIPEPRICFLEAIWSNIFSLNLLDAWYDLTSSGESWKQHIKDKTRSLEKEPLTTSGTSSRLEASWLQPGTALAQAFKGFLTGRPLHQRSPNFLQGLQLHQDYCSHKDFSTWADYQLDSMPSQLTPKEPRLCLVDAAYFINTSSPSMFRPGRRLDLILSFDYSLSAPFEALQQTELYCRARGLPFPRVEPSPQDQHQPRECHLFSDPACPEAPILLHFPLVNASFKDHSAPGVQRSPAELQGGQVDLTGATCPYTLSNMTYKEEDFERLLRLSDYNVQTSQGAILQALRTALKHRTLEARPPRAQT

SEQ ID NO: 1031 - DNA, 15083 bp, Homo sapiens
atgagaagaaggaccacagtgatatttcctctgcttttgttgttacaggttttccaggatttagggatggaagtactgtctggagttgccaaaggctataacatatgcctttttgcttatggacagacaggctctgggaagacatataccatgctggggaccccagcctctgttgggttgacaccacggatatgtgagggtctcttcgtcagggagaaagactgtgcctcactgccttcctcctgtaggataaaagtaagttttctagaaatctataatgaacgggtgcgggatctgttgaagcaatctggtcaaaaaaagtcctataccctgcgggtcagggagcatccagagatggggccctatgtacaaggtttatctcaacatgtagttaccaattataagcaagtaatccaactcttggaggagggaattgcaaacagaatcacagcagccacccatgttcatgaggccagcagcagatcccacgccattttcacgatccactacacgcaggcaatcctggagaacaacctcccttctgaaatggctagcaagatcaaccttgtggacctagcaggcagcgaaagagcagatcccagttactgtaaggaccgcattgctgaaggagccaatatcaacaagtcccttgtgactctaggaattgtcatctccaccttagcccagaactcccaagttttcagcagctgccagagcctcaacagctcagtcagcaatggtggtgacagtgggatccttagctctccttctgggaccagcagtggaggggcaccctcccgaaggcagtcttatatcccataccgagactctgtgttgacctggctgctgaaggacagccttggaggcaactctaaaaccatcatggttgccataacaaggcaaaccatgagcacactgagatatgcatccagtgccaaaaacattatcaacaagccacgagtaaatgaggtgagaccttttcagaaaaacttcagttcattgagtgatgaaaacctgaaggagctggttctccaaaatgaattgaaggtggaccagctgactaaagactggacccagaagtggaatgattggcaggccctcatggagcattacagtgtggacatcaacaggaggagggctggggtggtcatcgactccagcctgccacacttgatggccttggaggatgatgtgctcagcacaggtgttgtgctctatcatctcaagggtcagtggattgagagagaccactgcactatcaccagtgcctgtggtgtagttgttctacgacctgcccgtggggcccgctgtacagtcaatggccgggaggtcactgcctcctgccgtctgactcaaggagctgtcataaccctggggaaggcacagaagttccgattcaaccacccagcagaggctgctgtcctgcggcagcgaaggcaggttggagaggctgctgctggtcgtggctcgttggagtggctggatttggatggagatctcgctgcctcccggctgggtctctcccctttgctttggaaggaaaggagagcgcttgaagagcaatgtgacgaggaccatcagacaccgagggatggagagacatcccacagggcccagattcagcagcagcagagctacgtagaggatttgaggcatcaaatcctagcagaagagattcgagctgcgaaggaactggaatttgaccaagcttggattagccagcagattaaagaaaaccagcagtgtctgctcagagaagagacctggctggccagcttgcaacagcagcagcaagaagaccaggtagcagagaaagaacttgaggcatctgtggcacttgatgcttggcttcagacagatcctgagattcagccatccccatttgtccaaagtcagaaaagggtggtgcacctgcagctcctgcggagacacactcttcgggcagcagagcggaatgtccggcggaaaaaggtctcattccagctagagagaatcatcaaaaagcagaggctgctggaggcccagaagagactggagaagctcacgacattgtgctggctccaggatgacagcacccaggagcccccataccaggtcctcagccctgatgccacagtcccacggcctccatgtagaagcaaattgacgagttgcagttctttgagcccccaaagactctgcagcaagcacatgccccagctacacagcattttcctaagttgggatccctctaccacattgccacctaggcctgaccctacacaccaaacatcagagaaaacatcatcagaagagcatttgccacaggctgcttcctaccctgcaaggacagggtgcctccgcaagaacggcctgcattcctcaggtcatgggcagccctgcacagccagagcagccttggccaggaagggagcctcagctccagacgcttgcctcaccatgagtcccaactctgttggcatccaggaaatggagatgggggttaagcagccccatcagatggtgagccagggcttagcatctctgaggaaatcagctaacaaactaaagccaaggcatgagccaaagatcttcacctctactacccagaccagaggggcgaagggactagcagaccctagccacacacaagctgggtggcgaaaagaagggaaccttgggacccacaaggctgctaagggagccagttgcaattccttgtatcctcatggacccaggcagactgctgggcacggaaaggcagtcaagactttttggacagaatacaaaccaccttctccaagcagggcatcaaaaaggcatcagagggttctggcaactagggtcagaaatattaccaaaaagtcctctcacttgcctcttggcagtcctttgaagagacaacaaaatacaagggacccagacaccatggtcccactcacagatttcagcccagtaatggatcattcaagagaaaaagacaatgatttatctgacacagatagcaactactcattggattctctctcatgtgtctatgccaaagccctgatagagccactgaagccagaggagaggaaatgggatttcccagagccagagaactctgaaagtgatgacagccaactatctgaggactcactggctgagaagaggtaccaaagccccaaaaacaggctagggggcaatcgtcccaccaacaaccgtggccaacccaggaccagaactagagcttctgtgaggggcttcactgcagcctcagacagtgacctacttgctcaaactcataggagcttctccttggatagcctgattgatgcagaggaagaactgggggaagatcagcaagaagaacctttccctggttcagctgacgagatacccacagagactttttggcacctggaggactctagtctgcctgtaatggaccaagaggcaatatgcaggcttggtcccatcaactacagaacagcagctaggctggatgccgtcctgccaatgagcagttcgttttaccttgatcctcagttccaaccccattgcatgcagctttcaagagagagcccactgatgtccatggattcctggttttcctgtgactctaagatcaaccccagcagccccccaggaatagtgggttctttatgtccaagtcctgatatgcaggaatttcactcctgtaagggggagaggcctggatactggccaaatactgaggaactaaagccatcagatgcagaaacggttctgccatatagctccaaactgcaccaaggcagtactgagctcctctgcagtgcaagagatgagcacacagcctctgctgctgatacgtctaggctgtctctctggggaattcaaaggcttattcaaccaggagctgatggcacctttcagggcagatgtatccctgacatgacccagcagggcagctctgaagcatcccacaattctagcgtatcaaacgtgctggctgcctctgccaccaccttgactcatgtaggcagcacccatgaaagggattggtctgcccttcagcagaagtacctccttgaactctcttgtcctgttttggaggccataggagcacccaagccagcttacccctaccttgaggaagactctggttccctggcccaagcttctagcaaaggaggagatactctattgccagttggccctagggtatctagcaatctgaatctcaacaactttccagtccatctgtccagaatcaggcgtttgagggcagagaaagaacaggacagtttaaatgccaaattagaaggtgtttcagatttctttagcactagtgagaaagaggcgagttatgacgaaacttattcggcagacttagaatcattgtctgcttctcgatctacaaatgcacaggtctttgcaacagagaacgcgataccagattccatgacagaagcatgtgaagtcaagcagaacaacttggaagaatgccttcagagttgcaggaaacctggactgatgacttcctctgatgaggattttttccagaagaacgcttgtcacagtaatgtcactacagccaccaaagcagaccattggtcccaaggctgggctcctctcaggaaaaatagtgcagtccagccagggcaattaagtcccgacagccactacccactagaggaagagaagacagattgccaggagagctctaaggaagcagttagaagacacataaatgtttcctttgcccttccttcaggtccagagctataccttcactctgctccctggaatccattgtcatcttccctgcagcccccactcttggaaacattctatgtgaccaaaagcagggatgccctgacagaaactgccttagagattccagcttgcagagaagtaagggtaccctccccaccccccagggaagcctggggctttggtcacaaccaccaagctctccaaggtgcttatttgaagaataatttgccagtgctgttacaaaaccagaattctaagattgcctcatctcagcaggtcacagctgagataccagttgatctgaataccagggaagtcatcagagaatcaggtaaatgccctggaaatattacagaagaaagccatgattcagtttattcttctgttactcagaacagacattttctcccctctaccagcacaaaagtatgtgaatttgaaaaccaagttgtaattttaaataaaaaacacagttttccagcacttgagggaggagaggtcactgctcagtcctgttgcggtgcttcctcagacagcactgagtctgggaagtctctcctctttcgtgaatctgaggcacgagaggaagaagagctggatcagaatacggttctgaggcagaccatcaatgtaagccttgagaaagacatgccaggggaaagtgctgtttctttgaaatccagatcagtagatcgtagagtaagcagcccagtgatggtggcccagggtggtggcccaacccctaagtgggaagggaaaaatgaaactgggcttcttgaaaaaggtcttcgtcccaaagatagctcagaagagtttaagcttccaggtacaaagcctgcatatgaaaggttccagttagttgcatgccctcaggaaagaaaccccagtgaatgcaagtcacaagaaatgttaaatcccaacagagaaccttctggaaagaaacagaataaaagagttaataatactgatgaaatggctaggctaattaggagtgtaatgcagctggaaaatggcatcttagaaattgaatctaagcagaataagcaggttcatgcttcccacacaccaggaaccgataaggagttggtgttccaggaccagaaggagcaggagaagactgaccatgcctttaggccagacagctctggaaaccctttgccctctaaggatcagccatcttctccaagacagacagatgatactgtctttagggatagtgaagctggagcgatggaggttaacagcattgggaaccatccccaggtccagaaaatcaccccaaaccccttcaggtcaagggaaggtgtacgagagagtgaacctgtgagagagcacacccacccagctggatcggacagacctgccagggatatttgtgattctttagggaaacacacaacttgcagagagttcaccaacacttctcttcacccacagagaatgaaagcattggctagagctctgccattgcaacccaggctagagaggtcttctaagaataatggccagtttgtaaaagcatcagcaagtctcaaagggcagccttggggcttaggaagtcttgaggaattggagactgtgaaaggttttcaggaaagccaagtagctgaacacgtaagtagttccaaccaagaagagccaaaagctcaaggtaaagttgaagaaatgcctatgcaaaggggaggcagccttcaggaagaaaataaagtgactcagaaatttcctagtctcagccagctttgtagggacacgtttttcaggcaggaaactgtcagcccattactaagccggacagaattctgtacagctcctcttcaccaagacctgagtaataccttgcccttgaattctccaaggtggccaagaaggtgtcttcatgtacctgttgctctaggcatctcttcacttgactgtgtgctggatctcacaatgttgaaaattcataacagtcccttggtaactggagtagagcatcaggaccagagtacggagaccagaagccacagccccgaaggaaatgttagagggcgttcctctgaggcacacactgcctggtgtgggtctgtgcgatccatggccatgggatctcatagtcaatctggtgtaccagagagcattcctctggggacagaggacaggatctcagcaagcaccagcccccaagaccatggaaaggacctcagaatcaccttgctgggtttcagtaccagtgaagattttgcttctgaagccgaggtggctgtacaaaaagaaataagagtcagttcactgaacaaggtctctagccagcctgaaaagagggtcagcttctccttggaagaggatagtgaccaagccagcaagccaaggcagaaggcagagaaggagactgaggacgtcggactgaccagcggtgtttccttagcacctgtttccctgccgagggtgcccagtccagagcctaggctgttggagccctctgaccatgcatccatgtgcctggccatcttggaggagatcagacaggcaaaggcccagagaaagcagcttcatgactttgtggccaggggcacagtcctttcttactgtgaaactttactagaacccgaatgttcttcaagggttgctggcaggcctcagtgtaaacaaatagaccagtcatcatcagaccagaccaggaatgagggtgaagcaccgggatttcatgtggcatctctatctgctgaagcagggcagatagatctgttacctgatgagaggaaagtccaggccacatctctgtctgcagacagctttgaatctctgcccaatacggaaactgacagagagccatgggatcctgtgcaggctttctcccatgctgctcctgctcaagacaggaaacgtcgtactggagaactgaggcagttcgcgggagcaagtgaaccatttatatgtcactctagttcttctgaaatcatagagaaaaagaaagatgcaaccagaacaccttcctcagctgatcctttggccccagacagtcctcgttcttcagcacctgtggaggaggtcaggagggtagtatcaaagaaggtagtggctgccttaccttctcaggccccttatgatgatcctagagtgactctgcatgagctaagtcagtcagttccgcaggagactgcagagggcataccccctggcagtcaggacagcagcccagagcatcaggaacccagaactctagacaccacatatggagaagtttcagataatttgttagtgactgcacagggagaaaaaacagcccattttgaaagtcagtctgtgacctgtgatgttcagaattctacaagtgcctcagggcctaagcaagaccatgtccaatgccctgaggcttctactggctttgaagaaggtagggcaagtcccaaacaagataccattctgcctggagctctgacaagggttgcactggaagctcccacacagcagtgtgtgcagtgtaaggagagtgttgggtctgggttgacagaagtctgcagggctggcagcaaacattccaggccaattccactgccagatcaaagaccaagcgcaaatcctgggggaattggggaggaagccccatgtagacacccaagggaagctttagatggccctgtcttctcaaggaaccctgaaggcagcaggactctcagcccgtctagagggaaagagagcagaactcttccttgccgacagccatgcagttctcaacctgttgctactcatgcttattcctcccattcctctactttactgtgttttagagatggtgacctagggaaggagcctttcaaggctgccccacatactatccacccaccctgtgtagtaccttccagggcctatgaaatggatgagacaggagagatctctaggggacctgatgtgcacttgacacatggccttgagcccaaagatgttaacagggaatttaggctaacagagagcagcacttgtgagccttctactgtggctgctgtcctatctcgagctcaaggctgcagatccccttctgctcctgacgtgaggacaggttccttcagccactcagctactgatggaagcgtggggttaataggggttcctgagaaaaaggttgctgagaagcaagcaagcacagaacttgaggctgcctctttccctgcaggcatgtactctgagcccctgaggcagtttagggacagctctgtaggtgaccagaatgcacaggtgtgtcaaaccaatccagaaccacctgcaacaactcagggaccacacaccctggatttaagtgaagggtctgctgagagcaagttggtggtagagccacagcatgaatgtttagaaaataccactagatgttttttggaaaagccacaattttccactgagttgagggatcacaatcgcttggattcccaagccaagtttgtagcaaggttaaaacatacctgcagcccccaggaagacagtccctggcaggaagaagagcagcacagagaccaggcttcaggtggtggagaaggcttcgcccagggtgtgaatccccttcctgatgaagatggcttagatggctgtcagattttagatgctgggagagaggaggtggctgtggccaagcctcctgtgtccaagattttatcacagggcttcaaagacccagccactgtgtccttgaggcaaaatgaaacaccgcagcctgctgctcagaggagtggccacctctacactggcagagagcagccagcacccaaccacaggggctcacttcctgtgactacaatcttctctggccccaaacactccaggtcctcccccacaccacagttctcagttgtcggctcttctcgttctcttcaggagctgaacttgagtgtggagcctccttcccctacagacgaagatacacaggggcctaacagattgtggaacccacatctcaggggctattcctcaggaaagtcagtggcaagaacatctctgcaggctgaggacagcaatcagaaagcctcatctcgcttggatgatgggactaccgatcacaggcacctgaagcctgccacccctccttatccaatgccttccactctctcacacatgccaacccctgatttcacgaccagctggatgtctggtactttggaacaagcccaacagggaaagcgagagaaactgggtgtccaggttaggccagaaaattggtgctctcagatggacaaaggaatgctgcactttggctccagtgacatcagtccctatgcgctgccgtggcgtccggaggagcctgcacgtatcagctggaagcagtatatgtctggcagtgcagtcgatgtttcctgcagccagaagccccaggggctgacactatcaaatgtggcccggtgctccagcatggacaatggcctagaagaccagaactcccctttccactcccacctcagcacttacgccaatatttgtgatctgtcaaccacacacagcagcactgagaatgcccagggttcaaatgaggcctgggaagtattccgagggagttcttcaattgccttaggagacccccacatcccgacgagccctgaaggagtagcccccacttcgggtcatgacagaaggcctcagttcaggggcccttctggtgaagcagactgtctgaggagtaagccccccttggccaaaggaagtgctgcaggtccagtggatgagattatgctgctgtatccatcagaggcaggctgccctgtgggacagaccaggacgaacacattcgaacagggcacacagaccctcggcagcaggcgccactggagcagcactgacatctcctttgctcagcctgaagccagtgcagtatcagcctttgatctggcctcatggaccagcatgcacaatctgtctctccacctctcacagctcctgcacagtacctcagagctgcttgggagtctctcccagccagatgtggccagaagggagcagaacaccaagagggacatcccagataaagccccacaggccctgatgatggatggctctactcagaccactgtggatgagggcagccagactgacctcaccttacccaccctgtgcctccagacttcagaggctgaacctcagggagccaatgtgatccttgaagggctaggctcagatacctcgactgtgtctcaagaagagggagatgtgccaggggtacctcagaagagagaggcagaggaaacagcacagaaaatggctcagctcctctatcttcaggaagaaagcactccctacaagccccagagcccttcaataccctcatcccacttgaggtttcagaaagcccccgttgggcagcatcttccttctgtgagcccctcagtttctgatgctttcctgcctcccagctcccagccagaggagtcatattgcttagttgtcagcagtcccagtcccagctcccctcattccccagggctctttcccagtacttccgagtatcctggggactccagggtccagaagaagctgggccccacaagtgctttgttcgtggacagggcctcctccccaatcctcactcttagtgccagcacccaagagccgggtctttccccaggctctttgaccctctcagccccttcaactcaccctgttgaaggccaccagaagcttgactccagcccagaccctgttgatgccccaaggactccaatggataattattcccaaaccactgacgagttaggtggctcccagagaggtagaagttccttacaaaggagtaatgggagatccttccttgagttgcactccccacacagcccacagcagagtccaaaactccaatttagtttcttagggcagcaccctcagcagcttcagcccaggacaactatcggggtccaaagcagactgctgccaccaccactgaggcacaggagccaaaggctgggcaacagctttgtgcctgagaaggtggcttccccggagcattgcccactgagcggtagggagccaagtcagtggcagagcaggacagaaaatggaggtgagagttcagcatctccaggggaaccacaacgcactctggaccgaccttcttcatggggaggcctccagcacctcagcccctgccctgtctctgagttgactgatactgcagggctccgaggttctgccttgggcctccctcaggcctgccaacctgaggagttactgtgcttcagttgccagatgtgcatggcccctgagcaccagcaccacagtctgagggacctcccggtgcataacaaatttagtaactggtgtggggttcagaagggctcacctggggggttggacatgactgaggaggagctgggggccagcggtgatctcagctctgaaaagcaggaacagagtcccccacaacctcctaatgaccacagccaggattctgagtggtccaagagggagcagatccccctgcaagttggggcccagaacctctcactcagcgtggaactcacagaagcgaaactgcaccatggctttggggaggccgatgccctgctccaggtgctgcagagtgggacaggggaggcgcttgctgctgatgaacctgtgacatccacctggaaggagctctatgcacggcaaaaaaaggccattgagaccctcaggagagagcgggctgagcgacttgggaacttctgccggacgcgaagccttagccctcagaaacaactgagcctcctgcccaacaaagatctcttcatctgggatcttgacttgcccagcagacgccgagaatacctgcagcaactgaggaaggatgttgtggagaccaccaggtacccagagtcagtgtcaaggtcagctcacacaccctctgacatagagttgatgctgcaagactaccagcaggcccatgaggaggccaaggtggagattgcccgggcccgagaccaactgcgggagcggactgaacaagagaagctgagaatccaccagaagatcatttcccagctattgaaggaagaggataaactacataccttggccaattccagctccctgtgcaccagctctaatggaagcctctcgtctggcatgacctctggctataatagcagcccagccttgtcaggccagctccagttcccagagaatatggggcatacaaacttgcctgattccagggatgtatggataggggatgagcgaggaggccattctgcagtgaggaagaactctgcctacagccacagagcctccctgggcagttgctgctgttcaccatccagtctgtccagcttggggacctgcttttcctcctcctaccaggatttggccaagcatgtcgtggacacttctatggctgatgtaatggctgcttgttcggataatttgcacaacctcttcagctgccaggcaactgctggctggaactatcagggtgaggagcaggcggtgcagctttactacaaggtgttttctcccactcggcatggcttcctgggggcaggtgtggtgtcccagccgctgtctcgtgtgtgggcggctgtcagtgaccccactgtgtggcccctgtattacaagcccatccagacagcaaggctgcatcagcgagtgaccaacagcatcagcctggtgtacttggtgtgcaacaccaccctgtgcgcactgaagcagccacgggatttctgttgtgtctgcgtggaagccaaagagggtcacctgtctgtcatggcagcccagtctgtgtatgatacatccatgccaagacccagcagaaaaatggttcgcggggagatcctgcccagtgcctggatcttgcagcccatcactgtggaagggaaggaagtcaccagagtcatctacttggcccaggtggaacttggtgctccaggcttcccacctcagctcctgagctctttcatcaaacggcagccactggttatagccagactggcttccttccttggtaggtagcatctcaccgtcaagatggtgctgctgagatgcaggcccaggctgctcaagagagacactgtggcagctccttgttactttccataccacagtgcaggaaaagctgatgctacctgctgtggccgattggggcagacagcactggcccagggatgctagcaaagcccagtcagtacttggtcacagctggcaccagtgcagagcaaacggcctgagctcctggcccagactatccagagtgaatgcagctccgctcaccttttggatttctcacctttctttcctgtttctgggactctgcggcagacaggacacttaaggaccaggactgggcacagccagcagagccggggactgcagtgctttggcaaggtgcttccgcaggctggtagggaagcaggcagccactggccaagactctgttctgaatctacctcctctagcattcagctctactgtgtgatgggacgttaaaaataccaaaacagaaagagggtttaaaaaacagctgcacaaaccagaacaccgattcagaatcttttctccctcttgagtttttgcaaaatactttattattgatttttgctttttttctccctttccctcccaggagaagacatttgggtcttggcctgaggcaggggtgttgagcgatgatgctctgatatggagctgtcactctagagctcggtcagatggaagacactatagaaccaggttggacagatttggggtcagggttggaggctgagttcttttgaggactggttggagtggcagccagatggtggctgctgacaaggcaagaggaatttcagagattaaacattgtcctttgaggaagggagaggaggtgaatgaactcccagaggaggtgagtggcttgttgggaggaagctcagttccagaacttacctcagtgcacttgggaggggtggagtcctgagcattccatgatttctgccctggccccacctatcctaggatggggtgggatggagagtgggttcagttttcttgtactttagcctggctgaacatgaactttgtgtttacctggaagtggtaggggtgggagagattctcatctttagttctggtgcccaaaatctttggtagatggagggaactggggattcagaagatgtggtaaaggtctatttctgtagtgtggcagagatgtgtttttctaaagtgtttgcagggcatttttccctcttacctcagattaagttatttatatattgttgattgaaggttttttaaaattgcttttaaacttctatttctcgggtaaattttttggtgacatgatatatttaacaccctatttatatactcctacctcttttcatataaatctcttactaagactactgaccaaaaaagaacattttaaaattaaaagtcctctgtgtacttta

SEQ ID NO: 1032 - protein, 4552 aa, Homo sapiens [sequence omitted]

SEQ ID NO: 1033 - DNA, 4757 bp, Homo sapiens
ccgggtccctccccatcccgcgacccaacggtcgttccccgccgccggccccgcccctccctggccgcccgcggcgcgccggcgcctgcgcagtcgccccagagcgccccgaccgggatggcggccgttttggagtcgctgctgcgagaagaggtgtcggtcgcagccgtcgtgcggtggatcgcgcgcagcacccagggttcggaggataacgctggggaggcggccgcgctgagctcactccgggccctgcggaaagaattcgtaccgttcctgttgaacttcctgagggagcagagcagccgcgtcctcccgcaggggcccccgacccccgccaagaccccgggcgcctcggcagccttgccagggaggccgggaggcccgccgcggggtagccgcggggcgcgcagccagcttttccctccgaccgaggcccagagcaccgctgccgaggcccctctggcccgccgcgggggcaggaggcggggcccggggccggcccgcgagcgtggaggccgcggcctggaggagggggtcagcggggagagcctgcccggagccgggggccggaggcttaggggctctggcagccccagccgccccagcctcacgctgtctgatccgccaaacctcagcaacctggaggagttccctcccgtaggctcggttccccccggccctacagggacgaagccttctcgcaggatcaacccaactccggtgagcgaagagcggtcactctccaagcccaagacctgcttcacctcacccccaatcagctgtgtccccagttcccaaccctcagccctggacactagcccttggggccttggccttcccccagggtgcagaagtctgcaagaggagcgagagatgctcaggaaggagcgctctaagcagctgcagcagtcacctacccccacctgtcccaccccagaattggggtcgcccctccccagccggacaggaagcctcacagatgaacctgcagaccctgccagagtgtcttcccgccagcgcctggagcttgtagcccttgtttactcctcgtgcattgctgagaacctggtaccaaacctcttcttggagcttttcttcgtctttcagctcctcactgcccggaggatggtgactgccaaggacagcgaccctgaactaagtccagctgtcctagattccctggaaagtccactgttccaaagcatccacgattgtgtcttctttgcagtgcaggttttggagtgtcactttcaggttctttccaacctggacaaagggaccttgaagctgctggctgagaatgagcggctgctgtgcttctcaccagctctgcaaggccgccttcgagctgcctatgagggcagtgttgccaaggtctctctggtgatgcctccctctactcaagctgtctcctttcagccagagactgacaatcgtgccaacttctccagtgaccgagcctttcatacttttaagaaacagagggatgtgttttatgaggtgctgcgagagtgggaagatcaccatgaggagcctggctgggattttgagaagggcttgggcagcagaatcagggccatgatgggtcagctctccgcagcctgcagccacagccactttgttcggcttttccaaaaacaactactccagatgtgtcagagccctggtggtgctgggggcaccgtcttgggcgaggccccagatgtgttgagtatgctgggagctgacaagctggggcggttgtggcgcctacaggaacggcttatggctcctcagagcagtggggggccctgcccaccccccaccttcccaggctgtcaaggcttctttagggacttcatccttagtgccagcagcttccagtttaaccagcatctcatggacagtctgagcttgaagatccaggagctcaatggtcttgccctgccccagcatgagcccaatgatgaagacggggagtcagacgtagactggcagggtgagcggaagcaatttgctgtggtgcttcttagcctgagacttttggctaaattcctgggctttgtggctttcctgccataccgggggcctgaacctcccccgaccggtgagcttcaggactccattctggccctcaggagccaggtccctccggtcctggatgtgcggactctgctgcagcgagggctgcaggcccgccgggcggtgctcaccgtgccctggctggtggagtttctctcctttgctgaccatgttgttcccttgctggaatattaccgggacatcttcactctcctgctgcgcctgcaccggagcttggtgttgtcgcaggagagtgaggggaagatgtgtttcctgaacaagctgctgctacttgctgtcctgggctggcttttccagattcccacagtccctgaggacttgttctttctggaagagggtccctcatatgcctttgaggtggacacagtagccccagagcatggcttggacaatgcgcctgtggtggaccagcagctgctctacacctgctgcccctacatcggagagctccggaaactgctcgcttcgtgggtgtcaggcagtagtggacggagtgggggcttcatgaggaaaatcacccccaccactaccaccagcctgggagcccagccttcccagaccagccaggggctgcaggcacagctcgcccaggcctttttccacaaccagccgccctccttgcgccggaccgtagagttcgtggcagaaagaattggatcaaactgtgtcaaacatatcaaggctacactggtggcagatctggtgcgccaggcagagtcacttctccaagagcagctggtgacacagggagaggaagggggagacccagcccagctgttggagatcttgtgttcccagctgtgccctcacggggcccaggcattggccctggggcgggagttctgtcaaaggaagagccctggggctgtgcgggcgctgcttccagaggagaccccggcagccgttctgagcagtgcagagaacattgctgtggggcttgcaacagagaaagcctgtgcttggctgtcagccaacatcacagcactgatcaggagggaggtgaaagcagcagtgagtcgcacacttcgagcccagggtcctgaacctgctgcccggggggagcggaggggctgctcccgcgcctgtgagcaccatgctcccctcccctcccacctcatctccgagataaaagacgtgctctccttggccgtggggccacgggaccctgacgagggagtctccccagagcatctggaacagctcctaggccagctgggccagacgctgcggtgccgccagttcctgtgcccacctgctgagcagcatctggcaaagtgctctgtggagttagcttccctcctcgttgcagatcaaattcctatcctagggcccccggcacagtacaggctggagagagggcaggctcgaaggcttctgcacatgctgctttccttgtggaaggaagactttcaggggccggttccgctgcagctgctgctgagcccaagaaatgtggggcttctggcagacacaaggccaagggagtgggacttgctgctattcttgctacgggagctggtggagaagggtctgatgggacggatggagatagaggcctgcctgggcagcctccaccaggcccagtggccaggggactttgctgaagaattagcaacactgtctaatctgtttctagccgagccccacctgccagaaccccagctaagagcctgtgagttggtgcagccaaaccggggcactgtgctggcccagagctagggctgagaagtggccctgccttgggcattgcaccagaaccctggacccccgcctcacgaggaggcccaagtgcccaatgcagaccctcactggttggggtgtagctgggtctacagtcagacttcctgctctaagggtgtcactgcctggcatcccaccacgcgaatcctagaggaaggagagttggcctgatttgggattatggcagaaaagtccagagatgccagtcctggagtagaagaggtggtgtttgtttatctcttggatactaaatgaaatgaggtgtgtgggcttgtcaacacagaattcaagcctcatttgctatcccagcatctcttaaaactttgtagtcttggaattcatgacagaggcaaatgactcctgcttaacttatgaagaaagttaaaacatgaatcttgggagtctacattttcttatcaccaggagctggactgccatctccttataaatgcctaacacaggccgggtctggtggctcatgcctgtaatcccagcactttgagaggcctgaggtcggcggactgcctgaggtcaggaattcaagaccagcctggccaacatggcaaaaccccatctctactaaaaataaaaaaattattagctgggcatggtggtgtgtgcctgtaatcccagctactcaggaggatgaggcaggagacctgcttgaacctggaggtggaggttgcagtgagccgaggtcgcaccactgcactccagtctgggtaacagagcgagactttctagaaaaagcctaacaaacagataaggtaggactcaaccaactgaaacctgactttccccctgtaccttcagcccctgtgcaggtagtaacctcttgagacctctccctgaccagggaccaagcacagggcatttagagctttttagaataaactggttttctttaaaaaaaaaaaaaaaaaaaaaaaaaaaaa

SEQ ID NO: 1034 - protein, 1227 aa, Homo sapiens
MAAVLESLLREEVSVAAVVRWIARSTQGSEDNAGEAAALSSLRALRKEFVPFLLNFLREQSSRVLPQGPPTPAKTPGASAALPGRPGGPPRGSRGARSQLFPPTEAQSTAAEAPLARRGGRRRGPGPARERGGRGLEEGVSGESLPGAGGRRLRGSGSPSRPSLTLSDPPNLSNLEEFPPVGSVPPGPTGTKPSRRINPTPVSEERSLSKPKTCFTSPPISCVPSSQPSALDTSPWGLGLPPGCRSLQEEREMLRKERSKQLQQSPTPTCPTPELGSPLPSRTGSLTDEPADPARVSSRQRLELVALVYSSCIAENLVPNLFLELFFVFQLLTARRMVTAKDSDPELSPAVLDSLESPLFQSIHDCVFFAVQVLECHFQVLSNLDKGTLKLLAENERLLCFSPALQGRLRAAYEGSVAKVSLVMPPSTQAVSFQPETDNRANFSSDRAFHTFKKQRDVFYEVLREWEDHHEEPGWDFEKGLGSRIRAMMGQLSAACSHSHFVRLFQKQLLQMCQSPGGAGGTVLGEAPDVLSMLGADKLGRLWRLQERLMAPQSSGGPCPPPTFPGCQGFFRDFILSASSFQFNQHLMDSLSLKIQELNGLALPQHEPNDEDGESDVDWQGERKQFAVVLLSLRLLAKFLGFVAFLPYRGPEPPPTGELQDSILALRSQVPPVLDVRTLLQRGLQARRAVLTVPWLVEFLSFADHVVPLLEYYRDIFTLLLRLHRSLVLSQESEGKMCFLNKLLLLAVLGWLFQIPTVPEDLFFLEEGPSYAFEVDTVAPEHGLDNAPVVDQQLLYTCCPYIGELRKLLASWVSGSSGRSGGFMRKITPTTTTSLGAQPSQTSQGLQAQLAQAFFHNQPPSLRRTVEFVAERIGSNCVKHIKATLVADLVRQAESLLQEQLVTQGEEGGDPAQLLEILCSQLCPHGAQALALGREFCQRKSPGAVRALLPEETPAAVLSSAENIAVGLATEKACAWLSANITALIRREVKAAVSRTLRAQGPEPAARGERRGCSRACEHHAPLPSHLISEIKDVLSLAVGPRDPDEGVSPEHLEQLLGQLGQTLRCRQFLCPPAEQHLAKCSVELASLLVADQIPILGPPAQYRLERGQARRLLHMLLSLWKEDFQGPVPLQLLLSPRNVGLLADTRPREWDLLLFLLRELVEKGLMGRMEIEACLGSLHQAQWPGDFAEELATLSNLFLAEPHLPEPQLRACELVQPNRGTVLAQS

SEQ ID NO: 1035 - DNA, 5635 bp, Homo sapiens
agaataacgtcgggtcgggtcagcgggctctgcagtagtcgccgcagcggcgatgggagcggtggggacgaggcggcggcggcggcaggagggggagcaggtgctggcacaagagcagcggcttgggggagccggcagcagcagtaacagcagcagcagccgccgccgccgccgccagtaaacgcggacggtaccccaggggactacccagccggccggccctggaagccgcgctcgggtcccgccgcagtcggcggtgggggatgggcaggcagtggcggtcccgcctgccgagggttaacccccgccggtcccggtcctgagctggaccagagccctcctccagaaacccctgcgtccgccacggcccaggttaaatggaaaccacccttgggaactggatgcctgtgtagctgttctaccatatcagtgtattgcaatgagtgggggaggagagcagctggatatcctgagtgttggaatcctagtgaaagaaagatggaaagtgttgagaaagattgggggtgggggctttggagaaatttacgatgccttggacatgctcaccagggaaaatgttgcactgaaggtggaatcagctcaacaaccaaaacaagttctgaaaatggaagttgctgttttgaaaaagctgcaagggaaagaccatgtttgtagatttattggctgtgggaggaatgatcgattcaactatgtggtcatgcagttgcagggtcggaatctggcagatcttcgccgtagccagtcccgaggcacattcaccattagtaccactctccggctgggtagacagattttggagtctattgaaagcattcattctgtgggattcttgcatcgagacatcaaaccgtcgaacttcgctatgggtcgctttcctagtacatgtaggaaatgttacatgcttgattttggcttggctcgacaatttaccaattcctgtggtgacgtcagaccacctcgagctgtggcaggttttcgagggacagttcgttatgcatcaatcaacgcacatcggaacagggaaatgggaagacatgatgacctttggtccttattctacatgttggtggagtttgtggttggtcagctgccctggagaaaaataaaggacaaggagcaagtaggctctattaaggagagatatgaccacaggctcatgttgaaacatctccctccagaattcagcatctttctagaccatatctcttctttggattattttacaaaaccagactaccagcttcttacatccgtgtttgacaatagcatcaagacttttggagtaattgagagtgacccttttgactgggagaagactggaaatgatggctccctaacaaccaccactacttctaccacccctcagttgcacactcgcttgacccctgctgcaattggaattgccaatgctactcccatccctggagacttgcttcgagaaaatacagatgaggtatttccagatgaacagcttagcgatggagaaaatggcatccctgttggtgtgtcaccagataaattgcctggatctctgggacacccccgtccccaggagaaggatgtttgggaagagatggatgccaacaaaaacaagataaagcttggaatttgtaaggctgctactgaagaggagaacagccatggccaggcaaatggtcttctcaatgctccaagccttgggtcaccaattcgtgtccgctcagagattactcagccagacagagatattccactggtgcgaaagttacgttccattcacagctttgagctggaaaaacgtctgaccctggagccaaagccagacactgacaagttccttgagacctgcctggagaaaatgcagaaagataccagtgcaggaaaagaatctattctccctgctctgctgcataagccttgcgttcctgctgtgtcccgtactgaccacatctggcactatgatgaagaatatcttccagatgcctccaagcctgcttctgccaacacccctgagcaggcagatggtggtggcagcaatggatttatagctgttaacctgagctcttgcaagcaagaaattgattccaaagaatgggtgattgtggacaaggagcaggaccttcaggattttaggacaaatgaggctgtaggacataaaacaactggaagtccttctgatgaggagcctgaagtacttcaagtcctggaggcatcacctcaagatgaaaagctccagttaggtccttgggcagaaaatgatcatttaaagaaggaaacctcaggtgtggtcttagcactttctgcagagggtcctcctactgctgcttcagaacaatatacagataggctggaactccagcctggagctgctagtcagtttattgcagcgacgcccacaagtctaatggaggcgcaggcagaaggaccccttacagcgattacaattcctagaccttctgtggcatctacacagtcaacttcaggaagctttcactgtggtcagcagccagagaagaaagatcttcagcccatggagcccactgtggaactttactctccaagggaaaacttctctggcttggttgtgacagagggtgaacctcctagtggaggaagcagaacagatttggggcttcagatagatcacattggtcatgacatgttacccaacattagagaaagtaacaaatctcaagacctgggaccaaaagaacttcctgatcataatagactggttgtgagagaatttgaaaatctccctggggaaactgaagagaaaagcatccttttagagtcagataatgaagatgagaagttaagtagagggcagcattgtattgagatctcctctctcccaggagatttggtaattgtggaaaaggatcactcagctactactgaacctcttgatgtgacaaaaacacagacttttagtgtggtgccaaatcaagacaaaaataatgagataatgaagcttctgacagttggaacttcagaaatttcttccagagacattgacccacatgttgaaggtcagataggccaagtggcagaaatgcaaaaaaataagatatctaaggatgatgacatcatgagtgaagacttgccaggtcatcaaggagacctctctacttttttgcaccaagagggcaagagagagaaaatcacccctagaaatggagaactatttcattgtgtttcagagaatgaacatggtgccccaacccggaaggatatggttaggtcatcctttgtaactagacacagccgaatccctgttttagcacaagagatagactcaactttggaatcatcctctccagtttctgcaaaagaaaagctcctccaaaagaaagcctatcagccagacctagtcaagcttctggtggaaaaaagacaattcaagtccttccttggcgacctctcaagtgcctctgataaattgctagaggagaaactagctactgttcctgctcccttttgtgaggaggaagtgctcactcccttttcaagactgacagtagattctcacctgagtaggtcagctgaagatagctttctgtcacccatcatctcccagtctagaaagagcaaaattccaaggccagtttcatgggtcaacacagatcaggtcaatagctcaacttcgtctcagttctttcctcggccaccaccaggaaagccacccacgaggcctggagtagaagccaggctacgcagatataaagtcctagggagtagtaactccgactcagaccttttctcccgcctggcccaaattcttcaaaatggatctcagaaaccccggagcactactcagtgcaagagtccaggatctcctcacaatccaaaaacaccacccaagagtccagttgtccctcgcaggagtcccagtgcctctcctcgaagctcatccttgcctcgcacgtctagttcctcaccatctagggctggacggccccaccatgaccagaggagttcgtccccacatctggggagaagcaagtcacctcccagccactcaggatcttcctcctccaggaggtcctgccaacaggagcattgcaaacccagcaagaatggcctgaaaggatccggcagcctccaccaccactcagccagcactaaaaccccccaagggaagagtaagccagccagtaaactcagcagataggagccaggctgcatctctttgaaaggtgtgagatcttcctcctaaacctgatgcatgtgtgtccctgtactttctatgtaaaaaaatcagtgttgatcttctcttgcaaaagaaagtaacatgatcaattatttataagaagacataatacatgataaggaattacctaaggcaggcagcaagtagattaggaatcaatgtctttgtacaagaaggaaaaatagagcaaaaatccaagggggagaaactcattaaaatgagctctcattttttaagctgcctttgaaacaaaagagttgaggataggagatagaatggaattttaggggggttgcctaatttttttaagcctcaattcaaagattatatagcaaaagtgaaacttcttgtttgatattttcattcaaaactttcccaccctgaagagtcattgatcagatattagattatataagaagtctgttgccagggagccagtattcatgtatatttggcttgtgtgtttatttcgtgtattgagaatgaacacctttactttgcctcattcctagtaccctccctggagttcagatttttttttaaaattttgtatgtctcgtctgattcaatctctctgcttttattttatggtcctagttgtactatcaaatccaattacttttttttaggtccccctgattttttttttttagagcaagagttcttaacatattacatttttattatgaaaaataagaaagttaggtaaaggaaagaaaagtctaactagagctattttgcaggctttagtgtttagggagagaaagaaagtgtgggttaatagccttcaagatagaagatgccctttcatctctgttaagtgtcctcctttagaaacttgagtagaaggaaaactgaccagagtagactgcttccttaagtcttctgggttccaactgtttgtaatatcagcatccaagatgatacgagggaagcacaatgctttggactgtgatttgagatttagaaataaattagatatattattgaggcttagaatcctcaaactttgtattttatacatttagccaataaggaattaatatctggggaaataaatttaggcaaatatttcttttttaatgttttattacctgcttctcctgtgttttagttcaacatttgggcttcttggcctgattttcatacaatctcaatttacgaagctgtaaagaggaagatatttgttctaatctcactcttctaataggaatcaggcaaatgaaagtctaccagacttttaaaatgggctgtttttatactctctaggtgttttgtgttgtaaagaccttattaaggtcaggtaaattggtctgcttgctgttgaaatttgccttctagcaaacatatgtgctttctgtttgaccttgtgtttgctgccaaacctaatacagttgaattgggaaacaaaaaaaaaaaaaa

SEQ ID NO: 1036 - protein, 1244 aa, Homo sapiens
MSGGGEQLDILSVGILVKERWKVLRKIGGGGFGEIYDALDMLTRENVALKVESAQQPKQVLKMEVAVLKKLQGKDHVCRFIGCGRNDRFNYVVMQLQGRNLADLRRSQSRGTFTISTTLRLGRQILESIESIHSVGFLHRDIKPSNFAMGRFPSTCRKCYMLDFGLARQFTNSCGDVRPPRAVAGFRGTVRYASINAHRNREMGRHDDLWSLFYMLVEFVVGQLPWRKIKDKEQVGSIKERYDHRLMLKHLPPEFSIFLDHISSLDYFTKPDYQLLTSVFDNSIKTFGVIESDPFDWEKTGNDGSLTTTTTSTTPQLHTRLTPAAIGIANATPIPGDLLRENTDEVFPDEQLSDGENGIPVGVSPDKLPGSLGHPRPQEKDVWEEMDANKNKIKLGICKAATEEENSHGQANGLLNAPSLGSPIRVRSEITQPDRDIPLVRKLRSIHSFELEKRLTLEPKPDTDKFLETCLEKMQKDTSAGKESILPALLHKPCVPAVSRTDHIWHYDEEYLPDASKPASANTPEQADGGGSNGFIAVNLSSCKQEIDSKEWVIVDKEQDLQDFRTNEAVGHKTTGSPSDEEPEVLQVLEASPQDEKLQLGPWAENDHLKKETSGVVLALSAEGPPTAASEQYTDRLELQPGAASQFIAATPTSLMEAQAEGPLTAITIPRPSVASTQSTSGSFHCGQQPEKKDLQPMEPTVELYSPRENFSGLVVTEGEPPSGGSRTDLGLQIDHIGHDMLPNIRESNKSQDLGPKELPDHNRLVVREFENLPGETEEKSILLESDNEDEKLSRGQHCIEISSLPGDLVIVEKDHSATTEPLDVTKTQTFSVVPNQDKNNEIMKLLTVGTSEISSRDIDPHVEGQIGQVAEMQKNKISKDDDIMSEDLPGHQGDLSTFLHQEGKREKITPRNGELFHCVSENEHGAPTRKDMVRSSFVTRHSRIPVLAQEIDSTLESSSPVSAKEKLLQKKAYQPDLVKLLVEKRQFKSFLGDLSSASDKLLEEKLATVPAPFCEEEVLTPFSRLTVDSHLSRSAEDSFLSPIISQSRKSKIPRPVSWVNTDQVNSSTSSQFFPRPPPGKPPTRPGVEARLRRYKVLGSSNSDSDLFSRLAQILQNGSQKPRSTTQCKSPGSPHNPKTPPKSPVVPRRSPSASPRSSSLPRTSSSSPSRAGRPHHDQRSSSPHLGRSKSPPSHSGSSSSRRSCQQEHCKPSKNGLKGSGSLHHHSASTKTPQGKSKPASKLSR

SEQ ID NO: 1037 - DNA, 11626 bp, Homo sapiens
gggagccgcggcagagactgtgggtgccacaagcggacaggagccacagctgggacagctgcgagcggagccgagcagtggctgtagcggccacgactgggagcagccgccgccgcctcctcgggagtcggagccgccgcttctccactggcaggggccgcctgaagtgggagcagcgcctggagaaggcgggaggagcccggcccgggggacgggcggcgggatagcgggaccccggcggcgcggtgcgcttcagggcgcagcggcggccgcagaccgagccccgggcgcggcaagaggcggcgggagccggtggcggctcggcatcatgcgtcgagggcgtctgctggagatcgccctgggatttaccgtgcttttagcgtcctacacgagccatggggcggacgccaatttggaggctgggaacgtgaaggaaaccagagccagtcgggccaagagaagaggcggtggaggacacgacgcgcttaaaggacccaatgtctgtggatcacgttataatgcttactgttgccctggatggaaaaccttacctggcggaaatcagtgtattgtccccatttgccggcattcctgtggggatggattttgttcgaggccaaatatgtgcacttgcccatctggtcagatagctccttcctgtggctccagatccatacaacactgcaatattcgctgtatgaatggaggtagctgcagtgacgatcactgtctatgccagaaaggatacatagggactcactgtggacaacctgtttgtgaaagtggctgtctcaatggaggaaggtgtgtggccccaaatcgatgtgcatgcacttacggatttactggaccccagtgtgaaagagattacaggacaggcccatgttttactgtgatcagcaaccagatgtgccagggacaactcagcgggattgtctgcacaaaaacgctctgctgtgccacagtcggccgagcctggggccacccctgtgagatgtgtcctgcccagcctcacccctgccgccgtggcttcattccaaatatccgcacgggagcttgtcaagatgtggatgaatgccaggccatccccgggctctgtcagggaggaaattgcattaatactgttgggtcttttgagtgcaaatgccctgctggacacaaacttaatgaagtgtcacaaaaatgtgaagatattgatgaatgcagcaccattcctggaatctgtgaagggggtgaatgtacaaacacagtcagcagttacttttgcaaatgtccccctggtttttacacctctccagatggtaccagatgcatagatgttcgcccaggatactgttacacagctctgacaaacgggcgctgctctaaccagctgccacagtccataaccaaaatgcagtgctgctgtgatgccggccgatgctggtctccaggggtcactgtcgcccctgagatgtgtcccatcagagcaaccgaggatttcaacaagctgtgctctgttcctatggtaattcctgggagaccagaatatcctcccccaccccttggccccattcctccagttctccctgttcctcctggctttcctcctggacctcaaattccggtccctcgaccaccagtggaatatctgtatccatctcgggagccaccaagggtgctgccagtaaacgttactgattactgccagttggtccgctatctctgtcaaaatggacgctgcattccaactcctgggagttgccggtgtgagtgcaacaaagggttccagctggacctccgtggggagtgtattgatgttgatgaatgtgagaaaaacccctgtgctggtggtgagtgtattaacaaccagggttcgtacacctgtcagtgccgagctggatatcagagcacactcacgcggacagaatgccgagacattgatgagtgtttacagaatggccggatctgcaataatggacgctgcatcaacacagatggcagttttcattgcgtgtgtaatgcgggctttcatgttacacgagatgggaagaactgtgaagatatggatgaatgcagcataaggaacatgtgccttaatggaatgtgtatcaatgaagatggcagttttaaatgtatttgcaaacctggattccagctggcatcagatggacgttattgcaaagacattaacgagtgtgaaacccctgggatctgcatgaatgggcgttgcgtcaacactgatggctcctacagatgtgaatgcttccctggactggctgtgggtctggatggccgtgtgtgtgttgacacacacatgcggagcacatgctatggtggatacaagagaggccagtgtatcaaacctttgtttggtgctgtcactaaatctgaatgctgttgcgccagcactgagtatgcatttggggaaccttgccagccgtgtcctgcacagaattcagcggaatatcaggcactctgcagcagtgggccaggaatgacgtcagcaggcagtgatataaatgaatgtgcactagatcctgatatttgcccaaatggaatctgtgaaaaccttcgtgggacctataaatgtatatgcaattcaggatatgaagtggattcaactgggaaaaactgcgttgatattaatgaatgtgtactgaacagtctcctttgtgacaatggacaatgtagaaatactcctggaagttttgtctgtacctgccccaagggatttatctacaaacctgatctaaaaacatgtgaagacattgatgaatgcgaatcaagtccttgcattaatggagtctgcaagaacagcccaggctcttttatttgtgaatgttcttctgaaagtactttggatccaacaaaaaccatctgcatagaaaccatcaagggcacttgctggcagactgtcattgatgggcgatgtgagatcaacatcaatggagccaccttaaagtcccagtgctgctcctccctcggtgctgcgtggggaagcccgtgcaccctatgccaagttgatcccatatgtggtaaagggtactcaagaattaaaggaacacaatgtgaagatatagatgaatgtgaagtgttcccaggagtgtgtaaaaatggcctgtgtgttaacactagggggtcattcaagtgtcagtgtcccagtggaatgactttggatgccacaggaaggatctgtcttgatatccgcctggaaacctgcttcctgaggtacgaggacgaggagtgcaccctgcctattgctggccgccaccgcatggacgcctgctgctgctccgtcggggcagcctggggtactgaggaatgcgaggagtgtcccatgagaaatactcctgagtacgaggagctgtgtccgagaggacccggatttgccacaaaagaaattacaaatggaaagcctttcttcaaagatatcaatgagtgcaagatgatacccagcctctgcacccacggcaagtgcagaaacaccattggcagctttaagtgcaggtgtgacagcggctttgctcttgattctgaagaaaggaactgcacagacattgacgaatgccgcatatctcctgacctctgtggcagaggccagtgtgtgaacacccctggggactttgaatgcaagtgtgacgaaggctatgaaagtggattcatgatgatgaagaactgcatggatattgatgagtgtcagagagatcctctcctatgccgaggtggtgtttgccataacacagagggaagttaccgctgtgaatgcccgcctggccatcagctgtcccccaacatctccgcgtgtatcgacatcaatgaatgtgagctgagtgcacacctgtgccccaatggccgttgcgtgaacctcatagggaagtatcagtgtgcctgcaaccctggctaccattcaactcccgataggctattttgtgttgacattgatgaatgcagcataatgaatggtggttgtgaaaccttctgcacaaactctgaaggcagctatgaatgtagctgtcagccgggatttgcactaatgcctgaccagagatcatgcaccgacatcgatgagtgtgaagataatcccaatatctgtgatggtggtcagtgcacaaatatccctggagagtacaggtgcttgtgttatgatggattcatggcatctgaagacatgaagacttgtgtagatgtcaatgagtgtgacctgaatccaaatatctgcctaagtgggacctgtgaaaacacgaaaggctcatttatctgccactgtgatatgggctactccggcaaaaaaggaaaaactggctgtacagacatcaatgaatgtgaaattggagcacacaactgtggcaaacatgctgtatgtaccaatacagcaggaagcttcaaatgtagctgcagtcccgggtggattggagatggcattaagtgcactgatctggacgaatgttccaatggaacccatatgtgcagccagcatgcagactgcaagaataccatgggatcttaccgctgtctgtgcaaggaaggatacacaggtgatggcttcacttgtacagaccttgatgagtgctctgagaacctgaatctctgtggcaatggccagtgcctcaatgcaccaggaggataccgctgtgaatgcgacatgggcttcgtgcccagtgctgacgggaaagcctgtgaagatattgatgagtgctcccttccgaacatctgtgtctttggaacttgccacaacctccctggcctgttccgctgtgagtgtgagataggctacgaactggacagaagcggcgggaactgcacagatgtgaatgaatgcctggatccaaccacgtgcatcagtgggaactgtgtcaacactccaggcagctatatctgtgactgcccacctgattttgaactgaacccaactcgagttggctgtgttgatacccgctctggaaattgctatttggatattcgacctcgaggagacaatggagatacagcctgcagcaatgaaattggagttggtgtttccaaagcttcctgctgctgttctctgggtaaagcctggggtactccttgtgagatgtgtcctgctgtgaacacatccgagtacaaaattctttgtcctggaggggaaggtttccgaccaaatcctatcaccgttatattggaagatattgatgagtgccaggagctaccagggctgtgccaaggaggaaaatgtatcaacacctttgggagtttccagtgccgctgtccaaccggctactacctgaatgaagatacacgagtgtgtgatgatgtgaatgaatgtgagactcctggaatctgtggtccagggacatgttacaacaccgttggcaactacacctgtatctgtcctccagactacatgcaagtgaatgggggaaataattgcatggatatgagaagaagtttgtgctacagaaactactatgctgacaaccagacctgtgatggagaattgttattcaacatgaccaagaagatgtgctgctgttcctacaacattggccgggcgtggaacaagccctgtgaacagtgtcccatcccaagtacagatgagtttgctacactctgtggaagtcaaaggccaggctttgtcatcgacatttataccggtttacccgttgatattgatgagtgccgggagatcccaggggtctgtgaaaatggagtgtgtatcaacatggttggcagcttccgatgtgaatgtccagtgggattcttctataatgacaagttgttggtttgtgaagatattgacgagtgtcagaacggcccagtgtgccagcgcaacgccgaatgcatcaacactgcaggcagctaccgctgtgactgtaagcccggctaccgcttcacctccacaggacagtgcaatgatcgtaatgaatgtcaagaaatccccaatatatgcagtcatgggcagtgcattgacacagttggaagcttttattgcctttgccacactggttttaaaacaaatgatgaccaaaccatgtgcttggacataaatgaatgtgaaagagatgcctgtgggaatggaacttgccggaacacaattggttccttcaactgccgctgcaatcatggtttcatcctttctcacaacaatgactgtatagatgttgatgaatgtgcaagtggaaatgggaatctttgcagaaatggccaatgcattaatacagtggggtctttccagtgccagtgcaatgaaggctatgaggtggctccagatgggaggacctgtgtggatatcaatgaatgtcttctagaacccagaaaatgtgcaccaggtacctgtcaaaacttggatgggtcctacagatgcatttgcccacctggatacagtcttcaaaatgagaagtgtgaagatattgatgagtgtgtcgaagagccagaaatttgtgccctgggcacatgcagtaacactgaaggcagcttcaaatgtctgtgtccagaagggttttccttgtcctccagtggaagaaggtgccaagatttgcgaatgagctactgttatgcgaagtttgaaggaggaaagtgttcatcacccaaatccagaaatcactccaagcaggaatgctgctgtgccttgaagggagaaggctggggagacccctgcgagctctgccccacggaacctgatgaggccttccgccagatatgtccttatggaagtgggatcatcgtgggacctgatgattcagcagttgatatggacgaatgcaaagaacccgatgtctgtaaacatggacagtgcatcaatacagatggttcctatcgctgcgagtgtccctttggttatattctagcagggaatgaatgtgtagatactgatgaatgttctgttggcaatccttgtggaaatggaacctgcaagaatgtgattggaggttttgaatgcacctgcgaggagggatttgagcccggtccaatgatgacatgtgaagatataaatgaatgtgcccagaatcctctgctctgtgccttccgatgtgtgaacacttatgggtcatatgaatgcaaatgtcccgtgggatatgtgctcagagaagaccgtaggatgtgcaaagatgaggatgagtgtgaagagggaaaacatgactgtactgaaaaacaaatggaatgcaagaacctcattggcacatatatgtgcatctgtggacccgggtatcagcggagacctgatggagaaggctgtgtagatgagaatgaatgtcagacgaagccagggatctgtgagaatgggcgctgcctcaacacccgtgggagctacacctgtgagtgtaatgatgggtttaccgccagccccaaccaggacgagtgccttgacaatcgggaagggtactgcttcacagaggtgctacaaaacatgtgtcagatcggctccagcaacaggaaccccgtcaccaaatcggaatgctgctgtgacggagggagaggctggggtccccactgtgagatctgccctttccaggggactgtggctttcaagaaactctgtccccatggccgaggattcatgaccaatggagcagatatcgatgaatgcaaggttattcacgatgtttgccgaaatggggaatgtgtcaatgacagaggatcatatcattgcatttgtaaaactgggtacactccagatataactgggacttcctgtgtagatctgaacgagtgcaaccaggctcccaaaccctgcaattttatctgcaaaaacacagaagggagttaccagtgttcatgcccgaaaggctacattctgcaagaggatggaaggagctgcaaagatcttgatgagtgtgcaaccaagcaacacaactgccagttcctatgtgttaacaccattggcggcttcacatgcaaatgtcctcccggatttacccaacaccatacgtcctgcattgataacaatgaatgcacctctgacatcaatctgtgcgggtctaagggcatttgccagaacactcctggaagcttcacctgtgaatgccagcggggattctcacttgatcagaccggctccagctgtgaagacgtggacgagtgtgagggtaaccaccgctgccagcatggctgccagaacatcattgggggctacaggtgcagctgcccccagggctacctccagcactaccagtggaaccagtgtgttgatgaaaacgaatgcctcagcgctcacatctgcggaggagcctcctgtcacaacaccctggggagctacaagtgcatgtgtcccgccggcttccagtatgaacagttcagtggaggatgccaagacatcaatgaatgtggctctgcgcaggccccctgcagctatggctgttccaataccgagggcggttacctgtgtggctgtccacctggttacttccgcataggccaagggcactgtgtttctggaatgggcatgggccgaggaaacccagagccacctgtcagtggtgaaatggatgacaattcactctccccagaggcttgttacgagtgtaagatcaatggctaccccaaacggggcaggaaacggagaagcacaaacgaaactgatgcctccaatatcgaggatcagtctgagacagaagccaatgtgagtcttgcaagttgggatgttgagaagacagccatctttgctttcaatatttcccacgtcagtaacaaggttcgaatcctagaactccttccagctcttacaactctgacgaatcacaacagatacttgatcgaatctggaaatgaagatggcttctttaaaatcaaccaaaaggaagggatcagctacctccacttcacaaagaagaagccagtggctggaacctattcattacaaatcagtagtactccactttataaaaagaaagaacttaaccaactagaagacaaatatgacaaagactacctcagtggtgaactgggtgataatctgaagatgaaaatccaggttttgcttcattaattcaccatccagagaccaaataattaaaagaaaaacaaatatagataggtagaactatattttcccccaatcagaatcatcatatcataggtacaatctttcaccaagtaaatttgtataaataagcactattctttgtattaccaaagcaaggtacaggtgactaccctagttcaaaacaaccactttctcaggcttctcatgtgtgtagctaagctaccttgtcatatgtgttgattcttgaaaactgggacgtgtatttccattgggggttggccatttatgctgacatgccatccttccagcaaacgtacgggaatgtgctttcaattgatggactactctattttttgcaaatttgtaaactttgcttctccaaatacaagtactaggttgtccatttatggtacctatttggtgctagtaaattttcaaactagatttataaatgcactgtaatatgtacacaacttagaaaccaaattacaagtattcagttccaatacttcattaatttcaatcaaccaaagttagttcagtagcttatctcagttatgagtataatacattacatgtaaattaagtgtgtgtatactgtaatcgtgctattttttatcattgaaacatttataaactagaataataatgcccttaatgtgagggtttgtaatggtgcttattaagaccaaagacttgttaaatgtatacaccaagtggtaatgaaatttcggtgactggcccacacgtgcatagaggtctgggaggaccaggaaacagcctcagtggccagaggatcaccagtgcatccttcatcacagcatgtgcaatatgccaagattaccctcggtcattcctgtcaacaaggggtcaatgtcataaatgtcacaataaaacaatctcttcttttttttagtttaccccttggctttgtgttcttgcatggatttggggttggaggggccattccggaggctaaataaagtctcctggatttaaattatcctgggtctcttacttatggcttatgaaagtaccaaatgtataaccactagaagaaaatttaacatatgagtcgatcccttgttttatccattgaaagtagcagagtctggtgtcattaacctgacttgcttgtgagaaatttagattgtagagtcatttctgaaacatgacctaattcatcttgtgacttttaaatagtcttaaataccaagttcagtcattgtcttagagcacatgaatttcattataatagatttatcatgcccccctctcaaatatacacagttttggcaagccttaggtgttctgttccatttttttttcccctaaacatctttcgttagtcaatgctcatctaattacaaagggataatcccagactgtatccaattgctgtaacttttggtttcttaatgtcataatttttaaagtctgttttattttaagtgcaatattgagtatttagctgttaggctcaatccgtcgatatgaaataattttttaaatccctaagggcaggaaagcatttcgtggtagtgaaaataagaggaaataagatggcatgaaggtggtgggcggagaaactaggtaggacacaggaaagtgctctcaaaaatctttgaagagctcagctgaaaaaaatggagtagatttggctcatactattccggaaggcaaaaccagggtcagctgatgtcagccccagtttaatacacacggtcccaattatagagctactcactgaaagaatgggtttccttgcattgtggtgagctccctgtcacaagatagaagagtttcagtctaggcttaatggcaaccattggacaaagatgctttcttccacctaacaggccattaacatcttaaaggtatttttgtatctctaattttgtttataataggtgctcaacagaatgagctgaatggctgttacaaagggggtttgtaccttgggtaagagattaaaatataactcaaaatttccttctaacgctgcacctatggaaccatgtgatagaggtgtattaaaattgttatcgaagaatatatagcatatggtaaacaacagtttgcatatggaaaatgtctttgataatttaaccagaactgcattatattcaataacggattttctttataacaaacaacaggggaaaatggagttggcacacagtggatcactttgatatttttaatagtccaagtctggattttatttattcctgagccaacaattttgaacagcatattttccatgtttctgactgtaacaaaacattttcctcattgttccattgtaaatattcctcttgttggaactctttttaatcctgagatttaaacctgtacctttcaattgtctgtgacctttcaatttcactttcaatagttgaagaacttggctttgtaaatctctcagaagcttgaaaatatcttgtctctaccccctcagcccatttcatttgccaataattattttgtaagtagggttgaaatgaactcagctggccttgtgaaatgtttaaacttgcacaaacaactacatttttgttcaacaaatagcagtttactcagccaaaatcactttggatattgccattacaaatactgttaaacttcagaaatcatgtctgtaaattagatgagccaaaataaaggacaattgggttgatgctg

SEQ ID NO: 1038 - protein, 2871 aa, Homo sapiens
MRRGRLLEIALGFTVLLASYTSHGADANLEAGNVKETRASRAKRRGGGGHDALKGPNVCGSRYNAYCCPGWKTLPGGNQCIVPICRHSCGDGFCSRPNMCTCPSGQIAPSCGSRSIQHCNIRCMNGGSCSDDHCLCQKGYIGTHCGQPVCESGCLNGGRCVAPNRCACTYGFTGPQCERDYRTGPCFTVISNQMCQGQLSGIVCTKTLCCATVGRAWGHPCEMCPAQPHPCRRGFIPNIRTGACQDVDECQAIPGLCQGGNCINTVGSFECKCPAGHKLNEVSQKCEDIDECSTIPGICEGGECTNTVSSYFCKCPPGFYTSPDGTRCIDVRPGYCYTALTNGRCSNQLPQSITKMQCCCDAGRCWSPGVTVAPEMCPIRATEDFNKLCSVPMVIPGRPEYPPPPLGPIPPVLPVPPGFPPGPQIPVPRPPVEYLYPSREPPRVLPVNVTDYCQLVRYLCQNGRCIPTPGSCRCECNKGFQLDLRGECIDVDECEKNPCAGGECINNQGSYTCQCRAGYQSTLTRTECRDIDECLQNGRICNNGRCINTDGSFHCVCNAGFHVTRDGKNCEDMDECSIRNMCLNGMCINEDGSFKCICKPGFQLASDGRYCKDINECETPGICMNGRCVNTDGSYRCECFPGLAVGLDGRVCVDTHMRSTCYGGYKRGQCIKPLFGAVTKSECCCASTEYAFGEPCQPCPAQNSAEYQALCSSGPGMTSAGSDINECALDPDICPNGICENLRGTYKCICNSGYEVDSTGKNCVDINECVLNSLLCDNGQCRNTPGSFVCTCPKGFIYKPDLKTCEDIDECESSPCINGVCKNSPGSFICECSSESTLDPTKTICIETIKGTCWQTVIDGRCEININGATLKSQCCSSLGAAWGSPCTLCQVDPICGKGYSRIKGTQCEDIDECEVFPGVCKNGLCVNTRGSFKCQCPSGMTLDATGRICLDIRLETCFLRYEDEECTLPIAGRHRMDACCCSVGAAWGTEECEECPMRNTPEYEELCPRGPGFATKEITNGKPFFKDINECKMIPSLCTHGKCRNTIGSFKCRCDSGFALDSEERNCTDIDECRISPDLCGRGQCVNTPGDFECKCDEGYESGFMMMKNCMDIDECQRDPLLCRGGVCHNTEGSYRCECPPGHQLSPNISACIDINECELSAHLCPNGRCVNLIGKYQCACNPGYHSTPDRLFCVDIDECSIMNGGCETFCTNSEGSYECSCQPGFALMPDQRSCTDIDECEDNPNICDGGQCTNIPGEYRCLCYDGFMASEDMKTCVDVNECDLNPNICLSGTCENTKGSFICHCDMGYSGKKGKTGCTDINECEIGAHNCGKHAVCTNTAGSFKCSCSPGWIGDGIKCTDLDECSNGTHMCSQHADCKNTMGSYRCLCKEGYTGDGFTCTDLDECSENLNLCGNGQCLNAPGGYRCECDMGFVPSADGKACEDIDECSLPNICVFGTCHNLPGLFRCECEIGYELDRSGGNCTDVNECLDPTTCISGNCVNTPGSYICDCPPDFELNPTRVGCVDTRSGNCYLDIRPRGDNGDTACSNEIGVGVSKASCCCSLGKAWGTPCEMCPAVNTSEYKILCPGGEGFRPNPITVILEDIDECQELPGLCQGGKCINTFGSFQCRCPTGYYLNEDTRVCDDVNECETPGICGPGTCYNTVGNYTCICPPDYMQVNGGNNCMDMRRSLCYRNYYADNQTCDGELLFNMTKKMCCCSYNIGRAWNKPCEQCPIPSTDEFATLCGSQRPGFVIDIYTGLPVDIDECREIPGVCENGVCINMVGSFRCECPVGFFYNDKLLVCEDIDECQNGPVCQRNAECINTAGSYRCDCKPGYRFTSTGQCNDRNECQEIPNICSHGQCIDTVGSFYCLCHTGFKTNDDQTMCLDINECERDACGNGTCRNTIGSFNCRCNHGFILSHNNDCIDVDECASGNGNLCRNGQCINTVGSFQCQCNEGYEVAPDGRTCVDINECLLEPRKCAPGTCQNLDGSYRCICPPGYSLQNEKCEDIDECVEEPEICALGTCSNTEGSFKCLCPEGFSLSSSGRRCQDLRMSYCYAKFEGGKCSSPKSRNHSKQECCCALKGEGWGDPCELCPTEPDEAFRQICPYGSGIIVGPDDSAVDMDECKEPDVCKHGQCINTDGSYRCECPFGYILAGNECVDTDECSVGNPCGNGTCKNVIGGFECTCEEGFEPGPMMTCEDINECAQNPLLCAFRCVNTYGSYECKCPVGYVLREDRRMCKDEDECEEGKHDCTEKQMECKNLIGTYMCICGPGYQRRPDGEGCVDENECQTKPGICENGRCLNTRGSYTCECNDGFTASPNQDECLDNREGYCFTEVLQNMCQIGSSNRNPVTKSECCCDGGRGWGPHCEICPFQGTVAFKKLCPHGRGFMTNGADIDECKVIHDVCRNGECVNDRGSYHCICKTGYTPDITGTSCVDLNECNQAPKPCNFICKNTEGSYQCSCPKGYILQEDGRSCKDLDECATKQHNCQFLCVNTIGGFTCKCPPGFTQHHTSCIDNNECTSDINLCGSKGICQNTPGSFTCECQRGFSLDQTGSSCEDVDECEGNHRCQHGCQNIIGGYRCSCPQGYLQHYQWNQCVDENECLSAHICGGASCHNTLGSYKCMCPAGFQYEQFSGGCQDINECGSAQAPCSYGCSNTEGGYLCGCPPGYFRIGQGHCVSGMGMGRGNPEPPVSGEMDDNSLSPEACYECKINGYPKRGRKRRSTNETDASNIEDQSETEANVSLASWDVEKTAIFAFNISHVSNKVRILELLPALTTLTNHNRYLIESGNEDGFFKINQKEGISYLHFTKKKPVAGTYSLQISSTPLYKKKELNQLEDKYDKDYLSGELGDNLKMKIQVLLH

SEQ ID NO: 1039 - DNA, 12227 bp, Homo sapiens
accccgggcaggtggagcgctcgcggctgctcgcggcgagcccgggagtgatggcgaggcccctgcgggcggccagcgcctgaggcgccccgccccgccccgccccgcgcggccctccccgcccggccctgccctgccctgctccctgccggcggctgcgggcgcttcctagtccgctcgggcggccgcccaggcgaggtgcggcctccgcacaggcggggggcgtaggcgcgcggggcccgccatggctgcgtcggagctctacacaaagtttgccagggtttggatacctgatccagaggaagtctggaagtcagcagagctgctcaaagattataagccaggagataaagtcctcctgcttcacctcgaggaaggaaaggatttggaataccatctagatccaaagaccaaggagctgcctcacttacgaaatcctgacatacttgttggtgaaaatgacctcacagccctcagctatcttcatgagcctgctgtgctccataatctcagagtccgctttattgattccaaacttatttatacgtattgtggtatagtcctagtagctataaatccctatgaacagctgcctatttatggagaagatattattaatgcatacagtggtcagaacatgggtgatatggatccacatatctttgcagtagctgaagaagcttacaagcaaatggccagagatgaacgaaatcagtccatcatcgtaagtggagagtctggggcaggaaaaacagtctcagctaagtatgccatgcgatactttgcaactgtgagtggttctgccagtgaggccaatgtggaggaaaaggtcttggcctccaaccccatcatggagtccattggaaatgctaaaacaaccaggaatgataatagcagccgttttgggaagtatattgagattggttttgataagagatatcgaatcattggtgccaatatgagaacttatcttttagagaaatccagagtggtattccaggcagaagaggagagaaactatcatatcttctatcagctttgtgcctcagcaaagttacctgaatttaaaatgctacgattaggaaatgcagataactttaattacacaaaacaaggaggcagtcctgtgattgaaggagtggatgatgcaaaggagatggcacatactaggcaggcctgcactttgctaggaattagtgaatctcatcaaatgggaattttccgaatacttgctggcatccttcacttaggcaatgttggatttacatcccgagatgcagacagctgcacaatacctcccaagcatgaacctctctgcatcttctgtgaactcatgggtgtggactatgaggagatgtgtcactggctctgccatcggaaactggctactgccacagagacatacatcaagcccatctccaagctgcaggccacaaatgcccgcgatgctttggccaagcacatctatgccaagctctttaactggattgtagataatgtcaatcaggctctccattctgctgtcaaacagcactcttttattggtgtgctagacatttacggatttgaaacatttgagataaatagttttgaacagttttgcataaattatgcaaatgaaaaactacagcaacaattcaatatgcatgtcttcaaattggagcaagaagaatatatgaaggaacaaattccatggacactcatagatttttatgataatcagccttgtattaatcttatagaatcaaaactaggcattctagatttactggatgaggaatgcaagatgcctaaaggcacagatgacacctgggcccaaaaattgtacaacacacatttgaacaaatgtgcactctttgaaaagcctcgtctatcaaacaaagctttcatcatccaacattttgctgacaaagtggaataccagtgtgaaggatttctcgaaaagaataaagacaccgtttttgaagaacaaattaaagttcttaaatcaagcaagtttaagatgctaccagaactatttcaagatgatgagaaggccatcagtccaacttcagccacctcctcagggcgcacacccctcacacgaactcctgcaaagcccaccaaaggcagaccaggccaaatggccaaagagcacaagaaaacagtggggcatcagttcagaaactccctgcacctgcttatggagacactcaatgccactacccctcactatgtgcgctgtatcaagcctaatgacttcaagttcccattcacgtttgatgagaagagggcagtgcagcagctgagagcatgtggtgtcctggaaaccatccgaatcagtgcggccggtttcccctcacggtggacttaccaagaatttttcagccgctaccgtgtcctaatgaagcagaaagatgtgctgagtgacagaaagcaaacatgcaagaatgtgttagagaaactgatactggacaaggacaaataccagtttggtaagacaaagatctttttccgtgccggtcaagtggcctatctagaaaaattgagagctgacaaactgagagctgcctgcatccggatccagaagaccatccgagggtggctgctgagaaagaagtacctacgcatgcggaaggcagccatcaccatgcagagatacgtgcggggctaccaggcccgatgctatgctaagtttctgcgcagaaccaaggcagcaaccatcattcaaaagtactggcgcatgtatgtggtccgcaggaggtacaagattagacgagctgccactatcgttcttcagtcttacttgcgaggcttcttggccagaaataggtatcgcaagatactccgtgagcacaaagcagtcatcattcagaagcgagtccggggctggctggcccgcacacactacaagaggagcatgcatgccatcatctaccttcagtgctgcttcaggcggatgatggccaagcgtgagctaaagaagctcaaaatcgaggctcgctcagtggagcgctataagaagctgcacatcggcatggagaacaagatcatgcagctgcagcgcaaagttgatgagcagaacaaagactacaaatgccttgtggagaaactaaccaatctggaaggaatatacaactctgagactgagaaactacgaagtgacttagaacgtcttcaactaagtgaagaggaagcgaaagttgccactgggcgggtccttagtctgcaggaagaaattgccaagctccggaaagacctggagcaaactcgttcagagaaaaaatgcattgaggaacatgcagatcgatacaaacaagaaacagagcagctggtatcaaatctgaaggaagaaaatactttgctgaagcaagaaaaagaagccctcaatcaccgcatcgtgcagcaggctaaggagatgacagaaactatggagaagaagttagtagaagaaacgaaacaactggaactcgaccttaatgatgaaaggctgagatatcagaaccttctgaatgagttcagtcgcctggaagaaagatatgatgacctcaaggaagagatgacccttatggtgcatgtgcctaagcctggacacaagagaacagactccacccacagcagcaacgagtctgaatatatctttagctctgaaattgcagaaatggaagacattccatcaaggacagaggaaccaagtgagaagaaggtacctctggacatgtcattgttccttaagctccagaagcgggtcacagagctggagcaggagaagcaggtgatgcaggatgagctggaccgcaaggaggagcaggtgctccgcagcaaggccaaggaagaagaaagaccacaaattagaggtgcagaactggaatatgagtcactcaagcgtcaagaactagaatcagaaaacaaaaaactgaagaatgagctaaatgagttgcgcaaggccctcagtgagaaaagtgccccagaggtgaccgccccaggtgcacctgcctaccgtgtcctcatggagcagctgacctctgtgagcgaggagcttgatgtccgcaaggaggaagtcctcatcttaaggtctcaactggtgagccagaaagaggccatccaacccaaggatgacaagaatacaatgacagattccacaatacttttggaagatgtacaaaaaatgaaagataaaggtgaaatagcacaagcatacattggtttgaaagaaacaaatagatcatctgctctggattaccatgagttgaatgaggatggagagctgtggctggtttatgaagggttaaaacaagccaacaggctcctggaatcccagctgcagtcacagaagaggagccatgagaatgaggccgaggccctccgtggggagatccagagcctgaaggaggagaacaaccgacagcagcagctgctggcccagaacctgcagctgcccccagaggcccgcattgaggccagcctgcagcacgagatcacccggctgaccaacgaaaacttggatttgatggaacaacttgaaaaacaggataagacggtccgtaaactgaaaaaacaactgaaagtatttgccaaaaaaattggcgaactagaagtgggccagatggagaacatatccccaggacagatcattgatgaacccatccgaccagtcaacattcccaggaaagaaaaggatttccaagggatgctggaatacaagaaggaggatgagcaaaaacttgttaagaacctgattctggaactgaagccacgtggtgtagcagtcaatttgattccaggattaccggcatatatcctgttcatgtgtgttcgacatgctgactacctgaatgatgatcagaaagtaaggtcgttgctaacatcaacaattaacagcatcaaaaaagtattgaagaaaagaggtgatgattttgaaaccgtctccttctggctctctaacacatgccgatttttgcactgcttgaaacagtacagtggagaagagggctttatgaagcacaacacatctcgccagaatgaacactgcctcaccaattttgacctggctgagtatcggcaggtgctgagtgacttggccattcagatctaccagcagctcgtgcgggtgttagagaacatccttcagccaatgattgtctcaggcatgctggaacatgaaacgattcagggcgtgtctggggtgaagcccacagggttgagaaagcgaacctccagtatcgccgatgagggcacctacacactggactccatcctccggcagctcaactccttccactcggtcatgtgtcagcatggcatggaccctgaactgatcaagcaggtggtcaagcagatgttctacatcataggggccatcaccctgaacaaccttctcctgcggaaggacatgtgctcctggagtaaaggcatgcagatcaggtacaatgtcagtcaactggaagaatggctgcgtgacaagaatctgatgaatagtggggctaaagaaaccctggaacctctcattcaggctgctcaacttttgcaagtgaaaaagaaaacagatgatgatgcagaagccatttgttctatgtgcaatgctttaactactgcccagattgtgaaagtgttgaatttgtatactccagttaatgagtttgaagaaagagtctctgtgtcgttcattcgtactatacagatgcgtttacgagacaggaaagactctccccagctgctcatggatgctaaacacatctttcctgtcacctttcctttcaacccatcttccctcgcactagaaaccatccagattccagccagcctcggcctgggcttcatttcacgggtctgaaagtgatgtccaggcaaaaattgacaatacatttcttgcccgaaataagaacccattatttccagtgagttactgaaaatacatttttaaagagaaagtactgattatctcccaaatgagaagtcattaactggaaatctccctagaatactttcatcactttggaaacaaagataggctctttcgtgctgtgttatctttatagcaacactcatccttaaccaactaggtaccgtgagtttacatacaggagaatgatggaaggaagggaggaaggaaaggaggagaaaaatgtgtcttcagctggcagcatttattttaaatccttagcactgagtttgaatggtataaaaagtataacttccatagatgagctgttgttaggaaggcaccaaagaacctcctctgcactaaacaggagaatggaaagaaaagtctccattgagtacatatcatgtcagtttagtaatcaattatgttgatattgttaaactggttcaaagaaataaactggcaatatgtaaagtaattcctcatttgtgtcactatgatatagagatattaaaggaatgttggtttgctaaatagtatagatgtccatttgtactatagtttactgagcattttaaattgctgctacatactgtcttcttaaaatgtaagtgatattaggcactacaataagtttctcttgtcaattctgtttacaattcaatcagatcacagttttaactggattatatgcaaatacctacagattcacctgcacaagtagcagacactggaaagtcatgtagtaatatgacaaaatgcttgacatttaggggtaggattagacaaagtggctattgttgatgtcattatttattcaggatgtattacattgatgtgctcattaattttccctgggtggatattgcgtcagggtacagtgttctgtgaagtgacttatttttaactaccagatctgattccttcagtgcatattttcaaccttgacaggttttctctcttcttaatttattaagaattaatctcggctgggcgcggtggctcacgcctgtaatcccagcactttgggaagccaaggtgggcggatcacttcaggttaggagttggagaccagcctggccaacatggcgaaaccctgtctctactaaaaatacaaaaattagccgggcgtggtggcacttgcctgtaatcccagctactcgggaggctgaggcacgagaatcgattaaacctgggaggcggagattgcaatgagatcgaaccactgcactccagcctgggtgacagagagagacactgccttggaaaaaaaaagaatctcactcactatctagagaggattgtcagaatattcacgattcaggtcttgaaactttgattatgcaaaagaaggtatataataaatatttcattatgattcagtttttaaggctttgcagcttctataagtgttctcagatgccactagataattttaaaagcatcatattagaaatactttaagaagacttatataagaaatagaagattgttgaattttacagaggatttggttcattaagacccagattctgtaagttttcattctgaaattctagttaaacatattcaccatttttcttaggaatcttatacaataaatccttcaggttgcacaaaagcaaattattagttttcattagaaactctggttctgaattacaatcataggttatataaatttaactgttagatggtctataaatcttattaaaatatgtgcaatatttatggaagtcaaacagcttcatatcagtgataaagattgttattaaaagataaatactgtctgttaatttacatgggcctcaagttcctcgtttataaaataagagagttggacactgattcttaacatctcctccacatttaaaattctctcttctcagcccttagattctagagagaaaaagctgcagttactcagtaagtccattctctgatggaaagaccagtgtgtagtgcctgtcaattccttaggattaatcaaatgtaaaatcacaagtttgtgtagctgtaacctttcttaaatgtacatgatttatgtacatgcttttagaaggtcctactatatttgtattataattagtttaagtaatttttattacatcatgtattgctttattcagtttgaatacatttatttatttatttgcagtatcaaccagaaacactaccaattgcatcaaattctcccagtttttcctggttgtcaatgcggttttcaatgcacaattaagtcatagccatttggttcgtaccaaatgtgtcagaatctaacagcatccgataggctgtaagttggggagttgctaagaaaatgcaacgtggtacaggctgtccgcctcagccctggaaatctcccagacctcccccagcttcatcctgtgtagcacgactcaacgtgcaccctgaatcttctcaggtcttccaggtcatgctgtagctgtcactgccatgcagcccttttttttactccggacagctcatgtactgaagcgtcatgaaagaaaggctgtggtctgagcccttctctcccatctcctgtctttgtcctgtcaagtgctggagccagagctcctacagctgcccttggtggtttctcctgttcagcgatggtggcacaaaggttctgctattccagggctccagcttcctcccaggtctacccagagctccagatgggggtctgaattaacctctcttggtggcctggagatttttagtcattgacaagaataccttgtaaccagggaaccccaaggcccagtaaatgattctgtataccattttcttgaaggtacaagaagattctgccgactatggggatctttgggccagtttgaggattgctttccctctgaggttctttctctctgtcagccacactttctcacccaacttcagacacaccctgccagcctttcccctactcattcactcttccccttccctcaacttaatcgtctatcccgttgcctgctgtttgactgtgcactgaaggcaggtggatggagtcagtcctcagttgcccctgctggccttcctggtgcttaccatcagcccaatctttgcacagtccttgttgttcttacttctctgcatgcattccttcagaagatcagtcatcaactttttcttaattcctctgtgacacacaatgggaattcaaaggaagagatcttaaaagtcacaacagttctttatcttaataatcccctccccattcaccttactacatgcagactcacctcacacccttacaacttgaagctgaaaatttaaaagtaatttccctttttgcagcttttcctcaggttaaggctttgatctgcctgagagtaactctaaaaggagggaagataaatatgggataaaatccacaaagtgtagcttctaattcctttggaagtttaaaaaatttccacatatctgatgcttcttttgtcaggtgcagaagcacaaaaacatattccgaagccaactgatagggaatttggggattattgtcagtttggagaatttgctgtgttatttcttcatttccatggatagctcatagttggctctttctgggtgagtaattatgtgtaatatagatcaaatcttttactaaggttacagctacatgttaggggaggctatgaaaatactatattattataatttcagtgcagtgattgttgtgagaaataactttcatggtaaccctaggaaaatgggcacctgccaccatcctgagaagtcctcacacaatgccctttctctcttacacacacacacacacacatacacacacacacacccccgtcactaattcatagagttccttagcaggcatagtcaaggatcctctgggtaatgtcagctgcttagtgataaaacagagccaaaactagtgcatcctgttgaaagtaatgcagaaacagtacctgggtccagatatgctttcctgcggcgctttcctctgttacctcgtttcatcctcacagcagcatggacggtaggtggggtcgcttctacaatcatttctgatgatagcttgggaatagagataggggcagtgacttgcctgatgtcgcacagccctctggctgtcctgctttcccatatggagcagtggtggtgtgggcacctgtgatgcaggagactttaaaaatgtcgtgaggtcacgtgctgcccctcctggtacgtgtggaatgcccctggccagcaaggggtgcttttttatcagagttggcagctggcatgtgggaaccgagcaagtgctgcgtaccaagttacttgttttaaggagaccaagtgctcagcgccaggtggttttcttttttgtcatagttacttgctataactcagcttgacttctgtcatgaatcagtgctctctgggaggatgcaatactctgtttgggcattaattggtagcaggttgtctcaaccaaaaagacaggaaacagcaaaagcctctctgaaattaagaggaaagttactctccccacacccatcagagtctttattggagccaccaggtgagctgtgcagcctggacaggcctgcagctataggccaccttcccagtttaggtcctcagcacaggggagcccaagtcactgggtgccttccgagggctgtcactgggcaggccatatacaagtcagtgtgtgcgtgggcactgcagtgtgtgcatgccgtaggtgttgatgggtgctaggaggggtgtcgtgtgcatgcgcgttgaagaggatctgtattgccgtgacctctgttcatggatgagtgcattgtaatttgttctcaggctgtgctgtgagggccgccttaacccttgctcccttcccttctagagctgccttaagttctccagaacttttcttctgtaaaggatatcttgcctggaagggatatcttgccctgtttctcaaggttttgtgagagttttgactggatgtggccctgcatgaccctccttctcctgtacttcctctttcctttccaaatgggaattagaactgtggggcagcaacagtctcagagccagtgagaggccagcttagagaatgcttctgagttagtgggactctgtgtcacaagtaagcaaatgaatatatgaaagaaattatggagataagttagattcttggtaatacttaaatgtcttgctttctactaaccttttgttactaaaggtaaagggtataactcaaactttttgtggacattcttttcaaaattttttaagaaccctgtactataaaaggttgagtaaaaacaggaaagcgtgctataagttcaaatctgttgtattaccctaaattagataaaccaacctgaattatagtagatttctcaatagatgaggaactgaaaaatactatgtaaaatatcttccaaaatgctttttatactttttttatttgtaatttggtctatctaaaatgttcgttagcttaacttaatgggcgttattggattcatatgactaacgtttcctcagtattgtaatgcttgaaatatttgaaagaaaaaatgttgttttttagttgaaactggtatatataattcagtgcttggcaggttagtatatttttatgcatttttcagagtcagcagtttcaaatcttattgttatcatgttataaaattttagcccacatttcaggctccgtaaatcatttgagccattattttttcccaacaaatggtgaattttttctttaaatgtggatatatatgttgtaatttatgattcctggttatgtatttttgtgggatcctgcagtaaaattgacttttttgtgtctttgggagatttaaattgcgctaacagtgttgcgcaaaaatgagttcatgccatttaacatattgtattttaattattaactgtattaatttactatgaaatggacatccttttaactaaaatggaattgaacattgcagttttcaaatatttttccttgttgggtctggaaaaggaattctactttgatctgcatagaaaattttgatacaattttttgaaagttcttaggtgaaacatttacccattaaaaaggaagcagaaatactgagacatgaaaggcattatcaactaactctagactctagaacccattctagcatatctcacgtgcaatttttaaaaataagttaataattcatctcatatcaacaaaagcctttgaaacatgggttttcactagatatcacctagtgctaagataaaaaccaaaacaatatcagaattacatttatgctctaaatttgtagttgtccattgttgtgcttagtaaatgtgtgtcattaatgctgtattctcctagctattatggaaacttgtttaaataaagatatggatataaaga

SEQ ID NO: 1040 - protein, 1855 aa, Homo sapiens
MAASELYTKFARVWIPDPEEVWKSAELLKDYKPGDKVLLLHLEEGKDLEYHLDPKTKELPHLRNPDILVGENDLTALSYLHEPAVLHNLRVRFIDSKLIYTYCGIVLVAINPYEQLPIYGEDIINAYSGQNMGDMDPHIFAVAEEAYKQMARDERNQSIIVSGESGAGKTVSAKYAMRYFATVSGSASEANVEEKVLASNPIMESIGNAKTTRNDNSSRFGKYIEIGFDKRYRIIGANMRTYLLEKSRVVFQAEEERNYHIFYQLCASAKLPEFKMLRLGNADNFNYTKQGGSPVIEGVDDAKEMAHTRQACTLLGISESHQMGIFRILAGILHLGNVGFTSRDADSCTIPPKHEPLCIFCELMGVDYEEMCHWLCHRKLATATETYIKPISKLQATNARDALAKHIYAKLFNWIVDNVNQALHSAVKQHSFIGVLDIYGFETFEINSFEQFCINYANEKLQQQFNMHVFKLEQEEYMKEQIPWTLIDFYDNQPCINLIESKLGILDLLDEECKMPKGTDDTWAQKLYNTHLNKCALFEKPRLSNKAFIIQHFADKVEYQCEGFLEKNKDTVFEEQIKVLKSSKFKMLPELFQDDEKAISPTSATSSGRTPLTRTPAKPTKGRPGQMAKEHKKTVGHQFRNSLHLLMETLNATTPHYVRCIKPNDFKFPFTFDEKRAVQQLRACGVLETIRISAAGFPSRWTYQEFFSRYRVLMKQKDVLSDRKQTCKNVLEKLILDKDKYQFGKTKIFFRAGQVAYLEKLRADKLRAACIRIQKTIRGWLLRKKYLRMRKAAITMQRYVRGYQARCYAKFLRRTKAATIIQKYWRMYVVRRRYKIRRAATIVLQSYLRGFLARNRYRKILREHKAVIIQKRVRGWLARTHYKRSMHAIIYLQCCFRRMMAKRELKKLKIEARSVERYKKLHIGMENKIMQLQRKVDEQNKDYKCLVEKLTNLEGIYNSETEKLRSDLERLQLSEEEAKVATGRVLSLQEEIAKLRKDLEQTRSEKKCIEEHADRYKQETEQLVSNLKEENTLLKQEKEALNHRIVQQAKEMTETMEKKLVEETKQLELDLNDERLRYQNLLNEFSRLEERYDDLKEEMTLMVHVPKPGHKRTDSTHSSNESEYIFSSEIAEMEDIPSRTEEPSEKKVPLDMSLFLKLQKRVTELEQEKQVMQDELDRKEEQVLRSKAKEEERPQIRGAELEYESLKRQELESENKKLKNELNELRKALSEKSAPEVTAPGAPAYRVLMEQLTSVSEELDVRKEEVLILRSQLVSQKEAIQPKDDKNTMTDSTILLEDVQKMKDKGEIAQAYIGLKETNRSSALDYHELNEDGELWLVYEGLKQANRLLESQLQSQKRSHENEAEALRGEIQSLKEENNRQQQLLAQNLQLPPEARIEASLQHEITRLTNENLDLMEQLEKQDKTVRKLKKQLKVFAKKIGELEVGQMENISPGQIIDEPIRPVNIPRKEKDFQGMLEYKKEDEQKLVKNLILELKPRGVAVNLIPGLPAYILFMCVRHADYLNDDQKVRSLLTSTINSIKKVLKKRGDDFETVSFWLSNTCRFLHCLKQYSGEEGFMKHNTSRQNEHCLTNFDLAEYRQVLSDLAIQIYQQLVRVLENILQPMIVSGMLEHETIQGVSGVKPTGLRKRTSSIADEGTYTLDSILRQLNSFHSVMCQHGMDPELIKQVVKQMFYIIGAITLNNLLLRKDMCSWSKGMQIRYNVSQLEEWLRDKNLMNSGAKETLEPLIQAAQLLQVKKKTDDDAEAICSMCNALTTAQIVKVLNLYTPVNEFEERVSVSFIRTIQMRLRDRKDSPQLLMDAKHIFPVTFPFNPSSLALETIQIPASLGLGFISRV

SEQ ID NO: 1041 - DNA, 4729 bp, Homo sapiens
cgagactcagccagaggagtacggattaagtggccgaagaaagaggagtgaggcaggggagcgaggcggacgctccgagcgcatcggactcacctgggccggcggcgagcggcgagtacgagtggactcttgccctccgcagcatgcgccccgcctgctaagtcgccgccgtctcgccctcacctagcaccgccaatcccgcctggatggagtcccctctgggttcccattggctcctgtgagtgcttgggtgtcgggagcctgtttttggcgaggggaaccaacttttgaagttcgcccagaagactgcgttccagccccagttccccggcagcgggacccggcgaagacgcgaccgcggcgcgagtcaccatgggaagcaaaggtgtctaccagtaccactggcaaagccacaatgtcaagcacagtggtgtggacgacatggtgctactgtccaagatcacagagaactccatcgtggagaatctgaagaagagatacatggatgactacatttttacatatataggatctgtattaatctcagtcaaccctttcaagcagatgccatattttggggaaaaggaaattgaaatgtaccaaggagcggcacagtatgaaaacccaccacatatctatgcccttgcagataatatgtacagaaacatgatcattgacagagagaaccagtgcgtcattatcagtggtgaaagtggtgctggaaaaacagtggctgccaaatatatcatgagctacatctccagagtgtctggaggagggaccaaagtccagcacgtgaaggacattatcctgcagtccaacccgctgctggaggccttcgggaacgccaagaccgtccggaacaacaactccagccgatttggaaaatactttgaaatccagttcagtccaggtggggaaccagatggtggaaagatctccaacttccttctggaaaaatctagggtggtgatgaggaacccaggagagcggagttttcacatattttaccagctcatcgagggcgcctctgcagagcagaaacacagccttggcatcaccagcatggactattattactacctgagcctctcgggctcatacaaggttgatgacattgacgacaggcgggagtttcaggaaactctgcacgccatgaatgtgattgggatctttgcagaagagcaaacgctggtgttgcagatagtggcgggtattctccacctgggaaacatcagcttcaaagaagttggcaactacgcggctgtggagagtgaagagtttttagcttttcctgcatatctgctagggataaaccaggaccggttgaaagaaaagctaacaagccggcagatggatagcaagtggggaggcaaatccgaatccatccacgtgaccctcaacgtagagcaggcctgttacacccgggatgcgctcgccaaggccctgcacgcccgggtctttgatttcttggtagattccatcaataaagccatggagaaagaccatgaagaatacaacattggcgtcctagacatctatggctttgaaatattccagaaaaatggctttgaacagttttgtatcaattttgttaatgaaaaactgcagcagatttttattgaactgacattaaaggcagaacaggaagaatatgttcaagagggaataagatggacacccattgagtactttaataataaaatcgtatgtgacctcatagagaacaaagtgaaccctcctggcatcatgagcatcctggatgacgtgtgcgccacgatgcatgcggtgggtgagggggcagatcagacgctgctccagaaacttcagatgcagattgggagtcatgagcacttcaacagttggaaccaaggcttcatcattcatcattatgctgggaaggtatcctatgacatggatggcttttgtgaaaggaaccgggatgtgctttttatggatctcatcgagcttatgcagagcagcgagctgcctttcataaagtctttatttccggaaaatctgcaggctgacaagaaagggcgcccaactactgccggaagcaaaataaagaaacaagccaatgaccttgtgagcaccctgatgaaatgtacgccccactacattcgctgcatcaagccaaacgaaaccaagaagcccagagactgggaggaaagcagggtaaagcatcaagtcgaatatttgggtctgaaagagaacattcgagtgagaagagctggctatgcctatcggcgcatcttccaaaaattcctacagaggtatgccattctgaccaaagccacctggccttcttggcagggagaggagaagcaaggcgtcctgcacctgctgcagtcggtcaacatggacagcgaccagttccagctggggaggagtaaagtgttcatcaaagcccccgagtctctatttcttttagaagagatgagagagagaaagtatgatgggtatgctcgagtgatacagaaatcatggaggaaattcgtggcccggaagaaatacgttcaaatgagagaagaagcctcagacctcttattgaacaagaaggagagaaggagaaacagtattaacaggaactttataggggattatattgggatggaagagcacccagaactccagcagttcgtgggcaagagggagaagattgatttcgcagacacagtcaccaagtatgacaggaggttcaagggtgtaaagcgagacctgctccttaccccaaagtgcttgtacttaatcggacgagaaaaagtcaaacagggcccagacaagggcctggtgaaagaagtcctgaagcggaaaatcgagatagaacggatcttgtctgtgtccctcagtactatgcaggatgacatttttattctccatgagcaagagtatgacagtttgcttgaatctgtcttcaaaactgaattcctaagcctcttagcaaagcgttacgaggagaagacccagaagcaactacctctgaaattcagcaatacgcttgaactgaagttgaaaaaggaaaactggggcccctggagtgcagggggctcccggcaagtgcagttccaccaagggtttggggacctggctgtcctcaagcccagtaacaaagtgctgcaggtcagcatcggacctggactgcccaagaactcccgtcctaccagaaggaacactacccaaaatacaggttattccagtgggactcaaaatgccaactacccagtgagagctgcccctcctcccccaggataccatcagaacggagtcatcagaaaccagtatgtgccatatccccatgctcctggaagccagaggtccaatcagaaaagcctgtacacctccatggcccgcccgcccttgcctcggcagcagtctaccagttcagaccgagtgtcacagacgccagagagcctggatttcctcaaggtcccggaccagggagctgcaggggtcaggagacaaacaaccagtcggcctcccccagcagggggcagacccaagccccagcccaagcccaagcctcaggtgccacagtgcaaggctttgtatgcctatgacgctcaggacacagacgaactcagctttaatgccaatgacattattgatattatcaaagaagatccttctggctggtggacgggtcgactacgaggcaagcagggcctgttccccaacaactatgtgaccaagatctgaggtgcccgtgactctgacacatggggcagaggagctccaggcacagaccaggggaggggatatttaggggctccccttacaatccacaatgagcaattgcttctccaaggcctggagctattctggtaccttccccatggaggacactgaaaaggctgggttggggacagggagtatcactccataagtgatcctaaaaggtagcctcttcataggaacccaggaggacaaaaccaccatgcattaagatttatttattgtatttaaacctggtgagaggacaagtgaggtctgctcagaccttgtaggcttctatcaaaacagcaccctgcttgctcaccaggcctagagaatggctgtaggtggccgctgacaagtgcctttagttgaagagcacatttctttcatctctcttgtccatacctgatagacacattcctctctgccaccttccttcagggaggacccgccctctgcagactgggcttagcgtgagcaggcacttcccatgtacgtgccaagggtaagctggcctgctgagcccagggcgacagaggggcactggtttacactttgccgggaccatcagggccgccaagcaggtcaggggctgggggctgggggctgggctgctggctttgctttctctgggtcttcaattagaatgtggctggcccatattggtttgtgtttaaatgctgtacttactacaagaaggatcttttttcaagctgtacatttataaaaacagatcatatactgtatatataaaaatcttgagatggtagaaacatgtatgaatgtactaagtagtattccactgtactcattcataaggtaggttttcttacaaaactcacaccaggtacttaaagatgtgctctgcttttttccaactacggagtgtcactgctttctaggtcagtccctgcagactcttctcaactctttccctataggaaacttactccgcgtcctgcccccacctcctaaataaataaaggaatcggcgaacaaaaaaaaaaaaaaa

SEQ ID NO: 1042 - protein, 1108 aa, Homo sapiens
MGSKGVYQYHWQSHNVKHSGVDDMVLLSKITENSIVENLKKRYMDDYIFTYIGSVLISVNPFKQMPYFGEKEIEMYQGAAQYENPPHIYALADNMYRNMIIDRENQCVIISGESGAGKTVAAKYIMSYISRVSGGGTKVQHVKDIILQSNPLLEAFGNAKTVRNNNSSRFGKYFEIQFSPGGEPDGGKISNFLLEKSRVVMRNPGERSFHIFYQLIEGASAEQKHSLGITSMDYYYYLSLSGSYKVDDIDDRREFQETLHAMNVIGIFAEEQTLVLQIVAGILHLGNISFKEVGNYAAVESEEFLAFPAYLLGINQDRLKEKLTSRQMDSKWGGKSESIHVTLNVEQACYTRDALAKALHARVFDFLVDSINKAMEKDHEEYNIGVLDIYGFEIFQKNGFEQFCINFVNEKLQQIFIELTLKAEQEEYVQEGIRWTPIEYFNNKIVCDLIENKVNPPGIMSILDDVCATMHAVGEGADQTLLQKLQMQIGSHEHFNSWNQGFIIHHYAGKVSYDMDGFCERNRDVLFMDLIELMQSSELPFIKSLFPENLQADKKGRPTTAGSKIKKQANDLVSTLMKCTPHYIRCIKPNETKKPRDWEESRVKHQVEYLGLKENIRVRRAGYAYRRIFQKFLQRYAILTKATWPSWQGEEKQGVLHLLQSVNMDSDQFQLGRSKVFIKAPESLFLLEEMRERKYDGYARVIQKSWRKFVARKKYVQMREEASDLLLNKKERRRNSINRNFIGDYIGMEEHPELQQFVGKREKIDFADTVTKYDRRFKGVKRDLLLTPKCLYLIGREKVKQGPDKGLVKEVLKRKIEIERILSVSLSTMQDDIFILHEQEYDSLLESVFKTEFLSLLAKRYEEKTQKQLPLKFSNTLELKLKKENWGPWSAGGSRQVQFHQGFGDLAVLKPSNKVLQVSIGPGLPKNSRPTRRNTTQNTGYSSGTQNANYPVRAAPPPPGYHQNGVIRNQYVPYPHAPGSQRSNQKSLYTSMARPPLPRQQSTSSDRVSQTPESLDFLKVPDQGAAGVRRQTTSRPPPAGGRPKPQPKPKPQVPQCKALYAYDAQDTDELSFNANDIIDIIKEDPSGWWTGRLRGKQGLFPNNYVTKI

SEQ ID NO: 1043 - DNA, 1680 bp, Homo sapiens
agagtgctgaaggtcctgccaacggctctcttggcgtctcaacgttcggatcagcagcttttttccattctctctctccacttcttcagtgagcagccatgagttggactgtgcctgttgtgcgggccagccagagagtgagctcggtgggagcgaatttcctatgcctggggatggccctgtgtccgcgtcaagcaacgcgcatcccgctcaacggcacctggctcttcacccccgtgagcaagatggcgactgtgaagagtgagcttattgagcgtttcacttccgagaagcccgttcatcacagtaaggtctccatcataggaactggatcggtgggcatggcctgcgctatcagcatcttattaaaaggcttgagtgatgaacttgcccttgtggatcttgatgaagacaaactgaagggtgagacgatggatcttcaacatggcagccctttcacgaaaatgccaaatattgtttgtagcaaagattactttgtcacagcaaactccaacctagtgattatcacagcaggtgcacgccaagaaaagggagaaacgcgccttaatttagtccagcgaaatgtggccatcttcaagttaatgatttccagtattgtccagtacagcccccactgcaaactgattattgtttccaatccagtggatatcttaacttatgtagcttggaagttgagtgcatttcccaaaaaccgtattattggaagcggctgtaatctggatactgctcgttttcgtttcttgattggacaaaagcttggtatccattctgaaagctgccatggatggatcctcggagagcatggagactcaagtgttcctgtgtggagtggagtgaacatagctggtgtccctttgaaggatctgaactctgatataggaactgataaagatcctgagcaatggaaaaatgtccacaaagaagtgactgcaactgcctatgagattattaaaatgaaaggttatacttcttgggccattggcctatctgtggccgatttaacagaaagtattttgaagaatcttaggagaatacatccagtttccaccataattaagggcctctatggaatagatgaagaagtattcctcagtattccttgtatcctgggagagaacggtattaccaaccttataaagataaagctgacccctgaagaagaggcccatctgaaaaaaagtgcaaaaacactctgggaaattcagaataagcttaagctttaaagttgcctaaaactaccattccgaaattattgaagagatcatagatacaggattatataacgaaattttgaataaacttgaattcctaaaagatggaaacaggaaagtaggtagagtgattttcctatttatttagtcctccagctcttttattgagcatccacgtgctggacgatacttatttacaattcctaagtatttttggtacctctgatgtagcagcacttgccatgttatatatatgtagttggcatttggttcccaaaaagtaggatgtaggtatttattgtgttctagaaattccgactcttttcattagatatatgctatttctttcattcttgctggtttatacctatgttcatttatatgctgtaaaaaagtagtagcttcttctacaatgtaaaaataaatgtacatacaaaaaaaaaaaaaa

SEQ ID NO: 1044 - protein, 381 aa, Homo sapiens
MSWTVPVVRASQRVSSVGANFLCLGMALCPRQATRIPLNGTWLFTPVSKMATVKSELIERFTSEKPVHHSKVSIIGTGSVGMACAISILLKGLSDELALVDLDEDKLKGETMDLQHGSPFTKMPNIVCSKDYFVTANSNLVIITAGARQEKGETRLNLVQRNVAIFKLMISSIVQYSPHCKLIIVSNPVDILTYVAWKLSAFPKNRIIGSGCNLDTARFRFLIGQKLGIHSESCHGWILGEHGDSSVPVWSGVNIAGVPLKDLNSDIGTDKDPEQWKNVHKEVTATAYEIIKMKGYTSWAIGLSVADLTESILKNLRRIHPVSTIIKGLYGIDEEVFLSIPCILGENGITNLIKIKLTPEEEAHLKKSAKTLWEIQNKLKL

SEQ ID NO: 1045 - DNA, 1644 bp, Homo sapiens
gctcagcatttggggacgctctcagctctcggcgcacggcccaggttatcttgtagcatagcaacttcggatttcactctacccggagagtttcccgcttggttgaacacattggcctcaggaagcttccttcaaaatgtctactgttcacgaaatcctgtgcaagctcagcttggagggtgatcactctacacccccaagtgcatatgggtctgtcaaagcctatactaactttgatgctgagcgggatgctttgaacattgaaacagccatcaagaccaaaggtgtggatgaggtcaccattgtcaacattttgaccaaccgcagcaatgcacagagacaggatattgccttcgcctaccagagaaggaccaaaaaggaacttgcatcagcactgaagtcagccttatctggccacctggagacggtgattttgggcctattgaagacacctgctcagtatgacgcttctgagctaaaagcttccatgaaggggctgggaaccgacgaggactctctcattgagatcatctgctccagaaccaaccaggagctgcaggaaattaacagagtctacaaggaaatgtacaagactgatctggagaaggacattatttcggacacatctggtgacttccgcaagctgatggttgccctggcaaagggtagaagagcagaggatggctctgtcattgattatgaactgattgaccaagatgctcgggatctctatgacgctggagtgaagaggaaaggaactgatgttcccaagtggatcagcatcatgaccgagcggagcgtgccccacctccagaaagtatttgataggtacaagagttacagcccttatgacatgttggaaagcatcaggaaagaggttaaaggagacctggaaaatgctttcctgaacctggttcagtgcattcagaacaagcccctgtattttgctgatcggctgtatgactccatgaagggcaaggggacgcgagataaggtcctgatcagaatcatggtctcccgcagtgaagtggacatgttgaaaattaggtctgaattcaagagaaagtacggcaagtccctgtactattatatccagcaagacactaagggcgactaccagaaagcgctgctgtacctgtgtggtggagatgactgaagcccgacacggcctgagcgtccagaaatggtgctcaccatgcttccagctaacaggtctagaaaaccagcttgcgaataacagtccccgtggccatccctgtgagggtgacgttagcattacccccaacctcattttagttgcctaagcattgcctggccttcctgtctagtctctcctgtaagccaaagaaatgaacattccaaggagttggaagtgaagtctatgatgtgaaacactttgcctcctgtgtactgtgtcataaacagatgaataaactgaatttgtactttagaaacacgtactttgtggccctgctttcaactgaattgtttgaaaattaaacgtgcttggggttcagctggtgaggctgtccctgtaggaagaaagctctgggactgagctgtacagtatggttgcccctatccaagtgtcgctatttaagttaaatttaaatgaaataaaataaaataaaatcaaaaaaaaaa

SEQ ID NO: 1046 - protein, 339 aa, Homo sapiens
MSTVHEILCKLSLEGDHSTPPSAYGSVKAYTNFDAERDALNIETAIKTKGVDEVTIVNILTNRSNAQRQDIAFAYQRRTKKELASALKSALSGHLETVILGLLKTPAQYDASELKASMKGLGTDEDSLIEIICSRTNQELQEINRVYKEMYKTDLEKDIISDTSGDFRKLMVALAKGRRAEDGSVIDYELIDQDARDLYDAGVKRKGTDVPKWISIMTERSVPHLQKVFDRYKSYSPYDMLESIRKEVKGDLENAFLNLVQCIQNKPLYFADRLYDSMKGKGTRDKVLIRIMVSRSEVDMLKIRSEFKRKYGKSLYYYIQQDTKGDYQKALLYLCGGDD

SEQ ID NO: 1047 - DNA, 1635 bp, Homo sapiens
gctcagcatttggggacgctctcagctctcggcgcacggcccaggtaagcggggcgcgccctgcccgcccgcgatgggccgccagctagcggggtgcggagacgctgggaagaaggcttccttcaaaatgtctactgttcacgaaatcctgtgcaagctcagcttggagggtgatcactctacacccccaagtgcatatgggtctgtcaaagcctatactaactttgatgctgagcgggatgctttgaacattgaaacagccatcaagaccaaaggtgtggatgaggtcaccattgtcaacattttgaccaaccgcagcaatgcacagagacaggatattgccttcgcctaccagagaaggaccaaaaaggaacttgcatcagcactgaagtcagccttatctggccacctggagacggtgattttgggcctattgaagacacctgctcagtatgacgcttctgagctaaaagcttccatgaaggggctgggaaccgacgaggactctctcattgagatcatctgctccagaaccaaccaggagctgcaggaaattaacagagtctacaaggaaatgtacaagactgatctggagaaggacattatttcggacacatctggtgacttccgcaagctgatggttgccctggcaaagggtagaagagcagaggatggctctgtcattgattatgaactgattgaccaagatgctcgggatctctatgacgctggagtgaagaggaaaggaactgatgttcccaagtggatcagcatcatgaccgagcggagcgtgccccacctccagaaagtatttgataggtacaagagttacagcccttatgacatgttggaaagcatcaggaaagaggttaaaggagacctggaaaatgctttcctgaacctggttcagtgcattcagaacaagcccctgtattttgctgatcggctgtatgactccatgaagggcaaggggacgcgagataaggtcctgatcagaatcatggtctcccgcagtgaagtggacatgttgaaaattaggtctgaattcaagagaaagtacggcaagtccctgtactattatatccagcaagacactaagggcgactaccagaaagcgctgctgtacctgtgtggtggagatgactgaagcccgacacggcctgagcgtccagaaatggtgctcaccatgcttccagctaacaggtctagaaaaccagcttgcgaataacagtccccgtggccatccctgtgagggtgacgttagcattacccccaacctcattttagttgcctaagcattgcctggccttcctgtctagtctctcctgtaagccaaagaaatgaacattccaaggagttggaagtgaagtctatgatgtgaaacactttgcctcctgtgtactgtgtcataaacagatgaataaactgaatttgtactttagaaacacgtactttgtggccctgctttcaactgaattgtttgaaaattaaacgtgcttggggttcagctggtgaggctgtccctgtaggaagaaagctctgggactgagctgtacagtatggttgcccctatccaagtgtcgctatttaagttaaatttaaatgaaataaaataaaataaaatcaaaaaaaaaa

SEQ ID NO: 1048 - protein, 357 aa, Homo sapiens
MGRQLAGCGDAGKKASFKMSTVHEILCKLSLEGDHSTPPSAYGSVKAYTNFDAERDALNIETAIKTKGVDEVTIVNILTNRSNAQRQDIAFAYQRRTKKELASALKSALSGHLETVILGLLKTPAQYDASELKASMKGLGTDEDSLIEIICSRTNQELQEINRVYKEMYKTDLEKDIISDTSGDFRKLMVALAKGRRAEDGSVIDYELIDQDARDLYDAGVKRKGTDVPKWISIMTERSVPHLQKVFDRYKSYSPYDMLESIRKEVKGDLENAFLNLVQCIQNKPLYFADRLYDSMKGKGTRDKVLIRIMVSRSEVDMLKIRSEFKRKYGKSLYYYIQQDTKGDYQKALLYLCGGDD

SEQ ID NO: 1049 - DNA, 1563 bp, Homo sapiens
gctcagcatttggggacgctctcagctctcggcgcacggcccagcttccttcaaaatgtctactgttcacgaaatcctgtgcaagctcagcttggagggtgatcactctacacccccaagtgcatatgggtctgtcaaagcctatactaactttgatgctgagcgggatgctttgaacattgaaacagccatcaagaccaaaggtgtggatgaggtcaccattgtcaacattttgaccaaccgcagcaatgcacagagacaggatattgccttcgcctaccagagaaggaccaaaaaggaacttgcatcagcactgaagtcagccttatctggccacctggagacggtgattttgggcctattgaagacacctgctcagtatgacgcttctgagctaaaagcttccatgaaggggctgggaaccgacgaggactctctcattgagatcatctgctccagaaccaaccaggagctgcaggaaattaacagagtctacaaggaaatgtacaagactgatctggagaaggacattatttcggacacatctggtgacttccgcaagctgatggttgccctggcaaagggtagaagagcagaggatggctctgtcattgattatgaactgattgaccaagatgctcgggatctctatgacgctggagtgaagaggaaaggaactgatgttcccaagtggatcagcatcatgaccgagcggagcgtgccccacctccagaaagtatttgataggtacaagagttacagcccttatgacatgttggaaagcatcaggaaagaggttaaaggagacctggaaaatgctttcctgaacctggttcagtgcattcagaacaagcccctgtattttgctgatcggctgtatgactccatgaagggcaaggggacgcgagataaggtcctgatcagaatcatggtctcccgcagtgaagtggacatgttgaaaattaggtctgaattcaagagaaagtacggcaagtccctgtactattatatccagcaagacactaagggcgactaccagaaagcgctgctgtacctgtgtggtggagatgactgaagcccgacacggcctgagcgtccagaaatggtgctcaccatgcttccagctaacaggtctagaaaaccagcttgcgaataacagtccccgtggccatccctgtgagggtgacgttagcattacccccaacctcattttagttgcctaagcattgcctggccttcctgtctagtctctcctgtaagccaaagaaatgaacattccaaggagttggaagtgaagtctatgatgtgaaacactttgcctcctgtgtactgtgtcataaacagatgaataaactgaatttgtactttagaaacacgtactttgtggccctgctttcaactgaattgtttgaaaattaaacgtgcttggggttcagctggtgaggctgtccctgtaggaagaaagctctgggactgagctgtacagtatggttgcccctatccaagtgtcgctatttaagttaaatttaaatgaaataaaataaaataaaatcaaaaaaaaaa

SEQ ID NO: 1050 - protein, 339 aa, Homo sapiens; identical to SEQ ID NO: 1046

SEQ ID NO: 1051 - DNA, 515 bp, Homo sapiens
acgctacagccgccgaaatgttgatgcctaagaagaaccggattgccatttatgaactcctttttaaggagggagccatggtggccaagaaggatgtctacacgcctaagcagccagagttggcagacaagaatgtgcccaaccttcatgtcatgaaggccatgcagtctctcaagtcccgaggctacatgaaggaacagtttgcctggagacatttctactggtaccttaccaatgagggtatccaccatctccgtgattaccttcatctgcccccggagattgtgcctgccaccctatgccacagccgtccagagactggcaggcctcggcctaaaggtctggagggtgagtgacctgcaagactcacaagaggggaagccaacagggatacctacagatggaatgctgtgctccctggtgctgacaagaaagccgatgctgggagtgggtcagcaaccgaattccagtttagaggcagatttggtcgtggacatggtcagccatctcagtaa

SEQ ID NO: 1052 - DNA, 15216 bp, Homo sapiens
gtctttccctttgacaagtcgctgctgctgcagcaaaaataaaggacgcgaccgccgcagcctctgcggagccgggctcgggtcgccggagccgcgccccaccccgccagctccagagccacgactaatggctgaaggataaatcaacatggcaactatgattccaccagtgaagctgaaatggcttgaacacttgaacagctcctggattacagaggacagtgaatctattgctacaagagagggagttgctgttctgtattctaaactggttagcaataaggaagtagtacctttgccccaacaagttttatgcctcaaaggaccacagttgccagactttgaacgtgagtctctttcaagtgatgagcaggaccactatttggatgcccttcttagcagccagctagcattggcaaagatggtatgttcagattccccatttgccggggcacttagaaaacgactgcttgtactccagcgtgtcttttatgcactttctaataaataccatgacaaaggcaaggtgaagcagcagcagcattctccggagagcagttctggttcagcagatgtccattctgttagtgaacgcccccggtcaagcactgatgcacttatagaaatgggtgttcgaactggtctaagtttattatttgcgcttctaagacaaagttggatgatgcctgtgtcaggacctggtctcagtctttgcaacgatgtcattcatactgcaattgaagttgtgagctctttgccaccattatcattagcaaatgaaagcaagattcctcctatgggcttggactgcttatcgcaagtaacaacatttcttaaaggagtcactattcctaattctggggcagacactttaggtcgtagattagcttctgagttgctgcttggtttggcagctcaacgaggctcattgcgatatcttcttgaatggatagaaatggctttgggggcttcggcagttgtacacaccatggagaaaggcaaactactctcaagccaggaaggaatgatcagctttgactgctttatgaccatattaatgcagatgaggcgttctttgggttcatctgctgatcggagtcagtggagagaaccaaccagaacatcggatggcttgtgctccctttacgaggcagcattatgtctctttgaagaggtttgcagaatggcttctgattattcgagaacatgtgctagcccagatagcattcagactggtgatgctcccattgtctccgaaacctgtgaggtttatgtttgggggagcaatagcagccatcagttggtagaaggtacacaggagaaaatactgcaacccaaactggctcctagtttctctgatgcacagaccattgaagctggacagtactgcacttttgtcatttctacggatggctctgttagagcttgcgggaaaggcagctatgggagactgggccttggagactccaataatcagtcaactttaaaaaagttaacattcgagcctcacagatccattaaaaaggtttcatcttctaaaggatctgatggtcacactttagcctttacgacagaaggagaagtcttcagttggggagatggtgattatgggaaactggggcatggaaatagttcaacacagaaatatcccaagcttattcagggacctctacaaggaaaggtagttgtttgtgtgtcagctggatacagacatagtgctgctgtcacagaggatggggaattatacacatggggtgaaggagactttggaagattaggtcatggtgacagcaatagtcgtaacattccaacattagtaaaagacatcagcaatgtaggagaggtttcttgtggcagttcacatactattgctctgtctaaagatgggagaactgtatggtcttttggaggaggagacaatggtaaacttggtcatggtgataccaacagagtgtataaacctaaagttattgaagctttacaaggaatgttcattcgcaaagtttgtgctgggagccagtcttcacttgctttgacatcaacagggcaggtctatgcttggggctgtggagcttgtctaggttgtggttcttcagaagctactgctttgagacccaagcttattgaagaactggctgccacaagaatagttgatgtttctattggagacagtcattgtttggctctttctcatgataatgaagtttatgcctggggcaataactcaatggggcaatgtggtcagggaaattccacaggtcctattactaaaccaaagaaagtgagtggcttagatggcatagctattcagcagatttcggctggaacatcacatagtctggcatggactgctcttcctagggacagacaagttgttgcatggcaccgaccttattgtgtagatcttgaagagagtaccttctcacacctgcgttcttttcttgagagatactgtgataaaataaacagtgagattcccccactccctttcccttcatcaagagaacaccacagttttctcaagctgtgcctgaagctactttcaaatcaccttgctcttgcacttgcgggaggggtagctaccagcattctcgggaggcaggcaggtccacttcgaaatttgctcttcagactgatggactcaactgtcccagatgaaatccaagaggtggtaattgaaactttatcagtgggagcaaccatgctgttacctccattacgagaacggatggaattacttcattctcttttacctcaaggacctgatagatgggaaagcttatctaaaggacagagaatgcaactggatatcatcctgacaagtttgcaagatcatacccacgtagcctccctacttggctatagttcaccctctgatgctgctgacctatcttctgtgtgtactggctacggaaatctgtcagatcaaccttacggcactcagagctgccatccagatacccacctggctgaaattttgatgaagaccctcttaagaaatttaggattttatacagatcaagcatttggagagctagaaaagaatagtgataaatttctacttggaacatcatcatcagaaaacagtcagcctgctcatcttcatgaactgctatgttcactacagaaacagctgctggcattttgccatatcaataacattagtgagaactcaagcagtgtggcattgcttcataaacatcttcagcttttgttgcctcatgccacagatatttattcacgttctgcaaatttgctcaaagaaagtccttggaatggcagtgttggagaaaaattaagagatgtgatatacgtctcagctgctggcagtatgctctgccagattgttaactccctgctgttactccctgtgtcagtggctcggcctttattgagttacctcctcgacttgttgccacctcttgattgccttaatagactcctgccagctgctgatcttttagaagaccaggagttacagtggcctcttcatggagggccagaactaattgatcctgctggtctgccattacctcagccagctcagtcctgggtatggcttgtggatctagaaagaacaattgctctccttattgggcggtgtcttggtggcatgcttcagggctcccctgtgtctccagaggaacaggacactgcatattggatgaaaacgccactgttcagtgacggtgtagaaatggacactcctcaattggataaatgtatgagttgcctgttagaagtagcactttctggaaatgaagaacagaagccttttgattataaattgcggcctgaaattgctgtctatgtagacttggcattgggttgttctaaagagcctgcccgaagcctttggatcagcatgcaggactatgctgttagtaaagattgggacagtgcaactttaagtaatgagtcactcttggacactgtgtctagatttgttcttgcagctcttctgaaacacacaaatttacttagtcaagcatgtggagaaagccgatatcaacctggtaaacacttatcagaagtgtaccgttgtgtatacaaagttcgaagtcgtttacttgcttgcaagaaccttgaacttattcaaacaaggtcatcatcacgggacagatggatatcagaaaaccaggactctgcagatgttgatcctcaggagcattcatttactcgaactattgatgaagaagctgaaatggaagaacaggctgagagagaccgggaagaggggcatccggagccagaggatgaagaggaggaacgggaacatgaagtgatgacagctggcaaaatctttcagtgtttcctctcagcccgtgaagtagctcgtagccgagaccgagatagaatgaacagtggggcagggtctggggctcgagctgatgatccacctcctcagtctcagcaagagcgaagggtcagcacagaccttcctgagggtcaggatgtgtacactgctgcatgcaactccgtgatccatcggtgtgccctgttaatattaggagtaagtcctgtgatagatgagcttcagaagcgaagagaagaaggacagttgcagcaaccttcaacaagtgcctctgaagggggtggacttatgaccaggagtgaaagtcttactgcagagagccggctagtccacacaagcccaaattatagactgatcaaatcgaggagtgaatctgatttgtctcagcctgaatcagatgaagagggttacgcactgagtggcagacgaaatgttgatttggatttggcagcatctcacagaaagagaggtcctatgcacagtcaattggaatccctgagtgactcttgggctcgcctgaaacatagcagagactggttatgcaactcctcctattcctttgagtcagattttgatcttaccaagtctttgggagttcacactttgattgaaaatgttgtaagctttgtgagtggagatgtggggaatgccccaggttttaaagagccagaggaaagtatgtctacaagtccccaggcctccatcattgcaatggaacagcagcagttaagggcagaacttcgtttagaggcacttcatcagatcctcgttctattgtctgggatggaagaaaaaggtagcatctcactggcaggaagcagattgagttcaggcttccagtcctccacactactcacgtctgtgaggctgcagttcctagcagggtgttttggtttaggcactgttggacacacaggaggcaagggagagagtggccgattgcatcactatcaggatgggatcagagcagctaagagaaatattcagattgaaatccaggtagctgtgcataaaatttatcaacagttgtctgctaccctggaaagagccctgcaagcaaacaagcatcacattgaagcccagcaacgtctgcttctggttacagtttttgccctaagtgttcattatcaaccagtagatgtttctttggcaatttccactggtctgctaaacgtattgtcacagttgtgtggtacagacaccatgctaggacagcccctgcagttgttgccaaagacgggtgtttcccagcttagcacagctttgaaagtggccagtacaaggttgctccagattctagccatcactactgggacctatgctgataaactgagtcccaaagtagttcaatccttgttggatctactctgtagtcagttgaagaatttattgtcccaaactggtgtactacatatggcctctttcggagaaggggagcaagaagacggtgaagaagaagaaaaaaaagttgactccagtggagaaactgagaagaaagatttcagagctgctcttaggaaacaacatgcagccgaactccatctaggggattttttagtttttcttcgcagagttgtatcttcaaaagcaattcaatcaaaaatggcttccccaaagtggaccgaagtgcttctaaatatagcatctcagaaatgttcttcaggtatccctctggttggtaacttaagaacaaggctccttgcacttcatgtccttgaagctgtgctgccagcttgtgaatctggtgtagaagatgatcaaatggcccagattgttgagcgcttattttcccttctctctgattgtatgtgggagacacccattgctcaggccaaacatgctattcagataaaggaaaaagaacaagaaataaaactacagaagcagggcgagttggaagaagaagatgagaatcttcctatccaagaagtatcctttgacccggagaaagctcagtgttgcctagtggagaatggacagattttaactcacggcagtggagggaaaggatatggattggcatctacaggagtaacttctgggtgctatcagtggaagttttatattgtgaaggaaaacagaggtaatgaaggcacgtgtgttggagtttctcgctggccagtacatgactttaatcaccgcactacctcggatatgtggctctatagggcctacagtggtaacctctatcacaatggagaacagactctcacattgtccagctttactcaaggagatttcattacctgtgtgttagacatggaagccaggaccatttcttttgggaaaaatggagaggaacccaaattagcttttgaagatgtggatgcagcagagttgtacccatgtgtgatgttctatagtagcaatccaggggaaaaggtgaaaatttgtgatatgcagatgcgtggcacaccccgagacttacttccaggagaccctatttgtagtccagtagcagcagtgctggctgaggccactattcagctcatccgtatccttcaccgaacagaccgttggacttactgcattaacaaaaaaatgatggaaaggcttcacaaaattaagatatgtattaaagagtcaggtcagaagctaaagaaaagccgctcggttcagagccgagaggaaaatgaaatgagagaggagaaggagagcaaagaggaagagaaaggtaaacatactaggcatggcctcgctgacctctcagagctgcagctgaggactctttgcatagaggtgtggcccgtgctggctgtgataggaggagttgatgctggtcttagagttggaggtcggtgtgttcacaagcaaactgggcgccatgccacgctgctgggagtggtcaaagagggcagcacgtctgccaaggtccaatgggatgaagcagaaattactatcagcttcccaactttttggtcgcctagtgatactccattgtataatctggaaccctgtgaaccattgccgtttgatgtggcgcgattccgaggcctgacggcttctgtgctgctggacctaacatatctcactggcgttcatgaagacatgggcaaacagagcaccaaacgacatgaaaagaaacaccgacatgaatccgaggagaaaggggatgttgagcagaaacctgagagtgaatccgctttagatatgcgaacaggcctaacatctgatgacgtcaaaagtcagagtaccacaagctccaaatcagaaaatgaaatcgcttcattttctttagatccaacactgccaagtgtggaatcccaacatcaaataacagaagggaaaagaaaaaatcatgaacacatgtccaaaaaccatgatgtagcccagtcagaaatcagagcagtccagctgtcctatctttacctcggtgctatgaagtcacttagtgcccttcttggctgtagtaaatatgctgagctgttgctgataccaaaagttctggctgaaaatggccacaactcagactgtgcaagttctccagttgttcatgaagacgtggagatgcgagcagccctgcagttcttgatgcgacacatggtgaagcgagcagtcatgcggtcacccataaagagagcattgggattagctgatctggaacgagcgcaagccatgatctataaattagtggttcatgggcttttggaagaccagtttgggggcaaaattaagcaagagattgatcaacaagctgaagaaagtgaccctgcccagcaggcacagacaccagttactactagcccatcagcctcaagcacgacctcctttatgagcagctctctggaggacaccacaactgccaccactccagtcactgacacagaaacagtgcctgcatccgagtccccgggagtgatgcctcttagtcttctcaggcaaatgttctctagttacccaactaccactgtacttcccacacgtcgggcacagactcctccaatatcttcgttaccaacctctccttctgatgaagtaggaaggaggcaaagtttaacttctcctgattcccagtcagcaaggccagctaaccgcacagccttgtcagacccaagcagtagactttcaacttctcctcctcctccagcaattgcagttcccttgctggaaatggggttctctcttcggcagattgccaaagccatggaagctacaggtgctaggggagaggctgatgcccagaatatcactgtccttgccatgtggatgatagagcaccctgggcatgaggatgaagaggagccccagtcgggcagcacagcagactctaggcctggagcagccgttctaggcagtggcgggaagtcaaatgatccctgttatttgcagtcacctggagacataccatcagctgatgctgctgaaatggaggaaggttttagtgaaagccctgataatttggatcatacagagaatgcagcttctggaagtggaccatcagctagaggtcgctcagcggtaacaagaagacacaagtttgacttagctgctcgcacactgctagcaagagcagcgggattataccgctctgtgcaggcccacaggaatcaaagtcggagagaaggaatatctttgcagcaagacccaggggcgttgtatgactttaatttagatgaggaattggaaattgatcttgatgatgaggcgatggaagctatgtttggacaagacctgaccagtgacaatgatattctgggaatgtggatcccagaggtactggattggcctacctggcatgtttgtgagtctgaagacagggaagaagtggtggtgtgtgaactgtgtgaatgcagcgtcgtcagcttcaatcagcacatgaagagaaaccatccaggctgtgggcgcagtgcaaaccgccagggctatcgcagcaatggttcctatgtggatggctggtttggcggtgaatgtgggagtggaaatccgtactacctgttatgtggcacctgcagggagaagtacttagccatgaagaccaaatctaagtcaacaagttctgaaaggtacaagggacaagctccagatctaattggcaagcaagacagtgtgtatgaagaagactgggacatgttggatgttgatgaagatgaaaagctaactggtgaagaagaatttgaattacttgctggaccgcttggtttaaatgaccggcgcattgtaccagaaccagttcagttccctgacagcgatccactgggagcatcagtagcaatggtcacagccaccaacagtatggaagagactctgatgcaaataggttgccatggctccgtagaaaagagctcctctgggagaataacgttaggagagcaggcagctgccctagcaaaccctcatgaccgtgtggtggctttaaggagagtgactgctgctgctcaggttcttctggccagaaccatggtcatgagagcgctgtctcttctctcagtcagtggttccagttgtagcctggctgctggtcttgagtctctggggctaacagatatccgaacgctagttcgattaatgtgcttggcagcagcagggagagctggcctctccaccagcccttctgccatggctagcacctcagaacgatcacgaggtgggcatagcaaggctaacaagcctatctcttgcctggcctatttgagcacagcagtgggatgtctggcatcaaatgctcctagtgctgccaaactgcttgtacagttgtgtacacagaacttgatttctgctgcaacaggtgtaaatctaaccacagttgatgactcaattcagcgaaagtttctacccagctttctccgaggaattgctgaagagaacaagcttgtgacctccccaaactttgttgtaacacaggcccttgtggcattgctagcagacaaaggggccaaactaagacctaactatgataagtcagaagttgaaaagaaaggccctctggagttggctaatgccctggcagcctgctgcctctcctccaggctgtcctcacagcatcggcaatgggcagctcagcaactcgtgcgcactcttgctgcacacgaccgtgacaaccaaactactctgcagacacttgctgatatgggaggagatcttagaaaatgctcctttatcaaattggaggctcatcagaacagagtaatgacatgtgtttggtgtaataaaaaaggtcttttggctacaagtggcaatgatggcaccatccgcgtatggaatgttaccaagaagcaatattcactgcaacagacctgtgtgttcaacagattggaaggggatgctgaggaaagcctgggatcacccagtgatccaagtttctcaccagtttcctggagtatcagtggcaaatatctagcaggcgctttggaaaagatggtgaatatctggcaagttaatggaggaaaaggattagtagatattcagcctcattgggtatctgccctggcttggccagaagagggtccggctacagcctggtcaggagagtctccagaattgttgttggtgggacggatggatggatctctgggactgattgaagttgttgatgtgtccaccatgcaccgtcgagaattggagcattgctatcgaaaggatgtgtctgttacttgcattgcatggttcagtgaagacagaccatttgcagtgggatattttgatggaaaactgttactgggaacaaaggaaccacttgagaaaggaggcattgttctaattgatgcacataaggatactcttattagcatgaagtgggaccctacaggtcatattcttatgacatgtgccaaagaagacagtgtgaaactctggggctctatttcgggatgctggtgctgtctacattcactctgccatccatctattgtaaatggcattgcttggtgccgccttccagggaaaggatccaagttgcagttactgatggctactggctgtcagagtggcttagtatgtgtttggcgcattcctcaagatactacacagaccaatgtgactagtgcagaaggatggtgggagcaggaatcaaattgccaggatggatataggaaatcatcaggagccaagtgtgtttatcagctgcggggacacatcactcctgttcggactgttgcctttagttctgatgggttggccctggtgtctggtggactaggtgggctcatgaacatttggtctttaagggatggctctgtcttgcaaactgttgtgataggctctggagctattcagaccacagtatggattccagaagttggagtagctgcttgctcaaatagatcaaaggatgttttggtcgtgaattgtacagcagaatgggcagctgccaatcatgttttggcaacctgtaggacagcattgaaacagcagggtgttctgggattgaacatggctccctgcatgagagcatttttggagcggctccccatgatgcttcaggagcagtatgcctatgaaaagcctcatgtggtttgtggtgaccaacttgttcatagcccctatatgcaatgcttggcttcccttgctgtgggacttcatctggatcagctgttgtgtaaccctccagtgccaccacaccaccagaactgtctccctgaccctgcatcctggaatccaaatgaatgggcctggttagaatgtttctcaaccactataaaagctgccgaagccctgaccaatggagcccagtttccagaatcttttaccgttccagatctagaacctgttccagaggatgaacttgtatttctaatggataacagtaaatggattaacggcatggatgaacaaattatgtcttgggcaacttccagacctgaggactggcacctgggaggtaaatgtgatgtctacttatggggtgctggtaggcatggacagctggcagaagctggaagaaatgtaatggtacctgcagcagctccctcattctcacaggcccaacaggtcatttgtggtcagaattgtacctttgtcatccaggccaatggcacagtgttggcttgtggggaaggaagttatggcagattaggacaaggaaattcagatgaccttcatgtgctgacagttatttcagccttacaaggctttgtggtgacccagctggtgacttcctgtggttctgatgggcactctatggccctaactgaaagtggtgaggtctttagctggggagatggtgactatggtaaacttggccatgggaacagcgacaggcagcggcggcccaggcagatcgaggccttacaaggagaagaagtggtgcagatgtcttgtggcttcaagcactcagcagtggtcacttcagatggcaaactgttcacctttgggaatggtgactatggtcgtctgggtcttggaaatacctctaacaaaaaacttccagagagagtgactgcactggagggatatcagattggacaggtggcctgtggattaaaccacactttggcagtgtcagcagatggttccatggtgtgggcttttggagatggagactatggaaaactaggcttaggaaattccactgcaaaatcttcacctcagaaaattgacgtcctttgtggaattggaataaaaaaggttgcttgtggaactcagttttctgttgctttgaccaaagatggtcatgtgtatacctttggtcaagatcgcctgataggcttgccagaggggcgtgctcgcaatcacaatcgaccgcaacaaatccctgtcctggctggagtaatcatagaagatgtggcagttggagctgaacacacacttgctttggcatcaaatggagatgtgtatgcctgggggagcaattcagaagggcagctcggcttaggccataccaaccatgttcgagaaccaaccctggtaacaggtctgcaagggaaaaatgttcggcagatctcggctggccgctgccacagtgctgcatggacagcaccacctgtcccaccaagagcaccaggtgtgtcagtacctctgcagctgggcctgcctgacacagtgcccccccagtatggggcgctgagagaagtcagcattcacacggtgcgggccaggctccggctgctctaccacttctctgacctcatgtactcatcctggagactgctgaaccttagccccaacaaccagaacagcacatcccattataatgctggaacttggggcattgtacagggacaacttcggcctttgttagccccaagagtctacactctgccaatggtgcgctccataggaaaaaccatggttcaaggcaaaaactatggacctcagataactgtaaagaggatatcaaccagaggacggaagtgtaagcctatttttgtccaaatagcgagacaagtagttaagctgaatgcttcagacctccgcctgccttcccgagcgtggaaggttaagctggttggagaaggggctgatgatgctggaggagtgtttgatgacaccatcacagagatgtgccaggaacttgaaactggtattgttgaccttcttataccctctcccaatgccaccgcagaagtgggttacaatagggacaggttcctttttaacccttctgcctgcctcgatgaacacttaatgcagtttaagtttttaggaattttaatgggggttgccattcgcacaaagaagcctctggacctccacttggcccctctggtgtggaagcagctgtgctgtgtcccactcaccctagaggacctggaggaggtggatctgctctacgtgcagactctcaacagcattcttcacattgaagacagtgggattaccgaggagagtttccatgagatgattcctcttgattcttttgttggccagagtgctgatggcaaaatggttcctataatccctggtggaaatagtatcccactcacattttccaacaggaaggaatatgtggagagggccattgaatatcgacttcatgagatggacagacaggtggctgcagtccgagaagggatgtcctggattgttcctgtgccgctgctgtccctcctcacagcaaaacaactggagcagatggtgtgtgggatgcccgagatctctgtggaagtcttgaagaaagtggtgcggtaccgtgaggtggatgagcagcatcagctggtgcagtggttctggcacacgctggaagagttctccaatgaggagcgggtgcttttcatgaggtttgtgtcaggaagatctcgactaccagccaacactgctgacatttctcagagatttcaaatcatgaaggttgataggccttacgacagtctgcctacctcacagacctgcttcttccagctgaggctgcccccgtactccagccagctggtcatggccgagcgcctgcgctatgccatcaacaactgccgctcaatcgacatggacaactacatgctctcgagaaacgtggacaacgccgagggctccgacactgactactgaccgtgcgggtgctctcaccctcccttctctccctcaataatgctcacttctgatttgatgttgatatacttttatggtaactacatagatgttataagaacataaaccaacattataaacaatggccacatttagttactctaaatgtaacaaagaaattagatgtttttatttttctgtgattgtacaaaaacaacaaaaacgaagtgctctcagtcaggtttttccctccatatttttggtcacttttgataagtttgcatgaaaccattttggtgcatttttagttgggaatggtacatttttgtaaatccacccagtgaacatgaaattgtacattgtgtataattgttcattagaaaggacagttttacatgaatattcatatatttattttgttttaatttgaattgcctgttcagggttccttatgcagagaaataaagcagattcaggaattggaaaaaaaaaaaaaaaaaaaa

SEQ ID NO: 1053 - protein, 4861 aa, Homo sapiens
MATMIPPVKLKWLEHLNSSWITEDSESIATREGVAVLYSKLVSNKEVVPLPQQVLCLKGPQLPDFERESLSSDEQDHYLDALLSSQLALAKMVCSDSPFAGALRKRLLVLQRVFYALSNKYHDKGKVKQQQHSPESSSGSADVHSVSERPRSSTDALIEMGVRTGLSLLFALLRQSWMMPVSGPGLSLCNDVIHTAIEVVSSLPPLSLANESKIPPMGLDCLSQVTTFLKGVTIPNSGADTLGRRLASELLLGLAAQRGSLRYLLEWIEMALGASAVVHTMEKGKLLSSQEGMISFDCFMTILMQMRRSLGSSADRSQWREPTRTSDGLCSLYEAALCLFEEVCRMASDYSRTCASPDSIQTGDAPIVSETCEVYVWGSNSSHQLVEGTQEKILQPKLAPSFSDAQTIEAGQYCTFVISTDGSVRACGKGSYGRLGLGDSNNQSTLKKLTFEPHRSIKKVSSSKGSDGHTLAFTTEGEVFSWGDGDYGKLGHGNSSTQKYPKLIQGPLQGKVVVCVSAGYRHSAAVTEDGELYTWGEGDFGRLGHGDSNSRNIPTLVKDISNVGEVSCGSSHTIALSKDGRTVWSFGGGDNGKLGHGDTNRVYKPKVIEALQGMFIRKVCAGSQSSLALTSTGQVYAWGCGACLGCGSSEATALRPKLIEELAATRIVDVSIGDSHCLALSHDNEVYAWGNNSMGQCGQGNSTGPITKPKKVSGLDGIAIQQISAGTSHSLAWTALPRDRQVVAWHRPYCVDLEESTFSHLRSFLERYCDKINSEIPPLPFPSSREHHSFLKLCLKLLSNHLALALAGGVATSILGRQAGPLRNLLFRLMDSTVPDEIQEVVIETLSVGATMLLPPLRERMELLHSLLPQGPDRWESLSKGQRMQLDIILTSLQDHTHVASLLGYSSPSDAADLSSVCTGYGNLSDQPYGTQSCHPDTHLAEILMKTLLRNLGFYTDQAFGELEKNSDKFLLGTSSSENSQPAHLHELLCSLQKQLLAFCHINNISENSSSVALLHKHLQLLLPHATDIYSRSANLLKESPWNGSVGEKLRDVIYVSAAGSMLCQIVNSLLLLPVSVARPLLSYLLDLLPPLDCLNRLLPAADLLEDQELQWPLHGGPELIDPAGLPLPQPAQSWVWLVDLERTIALLIGRCLGGMLQGSPVSPEEQDTAYWMKTPLFSDGVEMDTPQLDKCMSCLLEVALSGNEEQKPFDYKLRPEIAVYVDLALGCSKEPARSLWISMQDYAVSKDWDSATLSNESLLDTVSRFVLAALLKHTNLLSQACGESRYQPGKHLSEVYRCVYKVRSRLLACKNLELIQTRSSSRDRWISENQDSADVDPQEHSFTRTIDEEAEMEEQAERDREEGHPEPEDEEEEREHEVMTAGKIFQCFLSAREVARSRDRDRMNSGAGSGARADDPPPQSQQERRVSTDLPEGQDVYTAACNSVIHRCALLILGVSPVIDELQKRREEGQLQQPSTSASEGGGLMTRSESLTAESRLVHTSPNYRLIKSRSESDLSQPESDEEGYALSGRRNVDLDLAASHRKRGPMHSQLESLSDSWARLKHSRDWLCNSSYSFESDFDLTKSLGVHTLIENVVSFVSGDVGNAPGFKEPEESMSTSPQASIIAMEQQQLRAELRLEALHQILVLLSGMEEKGSISLAGSRLSSGFQSSTLLTSVRLQFLAGCFGLGTVGHTGGKGESGRLHHYQDGIRAAKRNIQIEIQVAVHKIYQQLSATLERALQANKHHIEAQQRLLLVTVFALSVHYQPVDVSLAISTGLLNVLSQLCGTDTMLGQPLQLLPKTGVSQLSTALKVASTRLLQILAITTGTYADKLSPKVVQSLLDLLCSQLKNLLSQTGVLHMASFGEGEQEDGEEEEKKVDSSGETEKKDFRAALRKQHAAELHLGDFLVFLRRVVSSKAIQSKMASPKWTEVLLNIASQKCSSGIPLVGNLRTRLLALHVLEAVLPACESGVEDDQMAQIVERLFSLLSDCMWETPIAQAKHAIQIKEKEQEIKLQKQGELEEEDENLPIQEVSFDPEKAQCCLVENGQILTHGSGGKGYGLASTGVTSGCYQWKFYIVKENRGNEGTCVGVSRWPVHDFNHRTTSDMWLYRAYSGNLYHNGEQTLTLSSFTQGDFITCVLDMEARTISFGKNGEEPKLAFEDVDAAELYPCVMFYSSNPGEKVKICDMQMRGTPRDLLPGDPICSPVAAVLAEATIQLIRILHRTDRWTYCINKKMMERLHKIKICIKESGQKLKKSRSVQSREENEMREEKESKEEEKGKHTRHGLADLSELQLRTLCIEVWPVLAVIGGVDAGLRVGGRCVHKQTGRHATLLGVVKEGSTSAKVQWDEAEITISFPTFWSPSDTPLYNLEPCEPLPFDVARFRGLTASVLLDLTYLTGVHEDMGKQSTKRHEKKHRHESEEKGDVEQKPESESALDMRTGLTSDDVKSQSTTSSKSENEIASFSLDPTLPSVESQHQITEGKRKNHEHMSKNHDVAQSEIRAVQLSYLYLGAMKSLSALLGCSKYAELLLIPKVLAENGHNSDCASSPVVHEDVEMRAALQFLMRHMVKRAVMRSPIKRALGLADLERAQAMIYKLVVHGLLEDQFGGKIKQEIDQQAEESDPAQQAQTPVTTSPSASSTTSFMSSSLEDTTTATTPVTDTETVPASESPGVMPLSLLRQMFSSYPTTTVLPTRRAQTPPISSLPTSPSDEVGRRQSLTSPDSQSARPANRTALSDPSSRLSTSPPPPAIAVPLLEMGFSLRQIAKAMEATGARGEADAQNITVLAMWMIEHPGHEDEEEPQSGSTADSRPGAAVLGSGGKSNDPCYLQSPGDIPSADAAEMEEGFSESPDNLDHTENAASGSGPSARGRSAVTRRHKFDLAARTLLARAAGLYRSVQAHRNQSRREGISLQQDPGALYDFNLDEELEIDLDDEAMEAMFGQDLTSDNDILGMWIPEVLDWPTWHVCESEDREEVVVCELCECSVVSFNQHMKRNHPGCGRSANRQGYRSNGSYVDGWFGGECGSGNPYYLLCGTCREKYLAMKTKSKSTSSERYKGQAPDLIGKQDSVYEEDWDMLDVDEDEKLTGEEEFELLAGPLGLNDRRIVPEPVQFPDSDPLGASVAMVTATNSMEETLMQIGCHGSVEKSSSGRITLGEQAAALANPHDRVVALRRVTAAAQVLLARTMVMRALSLLSVSGSSCSLAAGLESLGLTDIRTLVRLMCLAAAGRAGLSTSPSAMASTSERSRGGHSKANKPISCLAYLSTAVGCLASNAPSAAKLLVQLCTQNLISAATGVNLTTVDDSIQRKFLPSFLRGIAEENKLVTSPNFVVTQALVALLADKGAKLRPNYDKSEVEKKGPLELANALAACCLSSRLSSQHRQWAAQQLVRTLAAHDRDNQTTLQTLADMGGDLRKCSFIKLEAHQNRVMTCVWCNKKGLLATSGNDGTIRVWNVTKKQYSLQQTCVFNRLEGDAEESLGSPSDPSFSPVSWSISGKYLAGALEKMVNIWQVNGGKGLVDIQPHWVSALAWPEEGPATAWSGESPELLLVGRMDGSLGLIEVVDVSTMHRRELEHCYRKDVSVTCIAWFSEDRPFAVGYFDGKLLLGTKEPLEKGGIVLIDAHKDTLISMKWDPTGHILMTCAKEDSVKLWGSISGCWCCLHSLCHPSIVNGIAWCRLPGKGSKLQLLMATGCQSGLVCVWRIPQDTTQTNVTSAEGWWEQESNCQDGYRKSSGAKCVYQLRGHITPVRTVAFSSDGLALVSGGLGGLMNIWSLRDGSVLQTVVIGSGAIQTTVWIPEVGVAACSNRSKDVLVVNCTAEWAAANHVLATCRTALKQQGVLGLNMAPCMRAFLERLPMMLQEQYAYEKPHVVCGDQLVHSPYMQCLASLAVGLHLDQLLCNPPVPPHHQNCLPDPASWNPNEWAWLECFSTTIKAAEALTNGAQFPESFTVPDLEPVPEDELVFLMDNSKWINGMDEQIMSWATSRPEDWHLGGKCDVYLWGAGRHGQLAEAGRNVMVPAAAPSFSQAQQVICGQNCTFVIQANGTVLACGEGSYGRLGQGNSDDLHVLTVISALQGFVVTQLVTSCGSDGHSMALTESGEVFSWGDGDYGKLGHGNSDRQRRPRQIEALQGEEVVQMSCGFKHSAVVTSDGKLFTFGNGDYGRLGLGNTSNKKLPERVTALEGYQIGQVACGLNHTLAVSADGSMVWAFGDGDYGKLGLGNSTAKSSPQKIDVLCGIGIKKVACGTQFSVALTKDGHVYTFGQDRLIGLPEGRARNHNRPQQIPVLAGVIIEDVAVGAEHTLALASNGDVYAWGSNSEGQLGLGHTNHVREPTLVTGLQGKNVRQISAGRCHSAAWTAPPVPPRAPGVSVPLQLGLPDTVPPQYGALREVSIHTVRARLRLLYHFSDLMYSSWRLLNLSPNNQNSTSHYNAGTWGIVQGQLRPLLAPRVYTLPMVRSIGKTMVQGKNYGPQITVKRISTRGRKCKPIFVQIARQVVKLNASDLRLPSRAWKVKLVGEGADDAGGVFDDTITEMCQELETGIVDLLIPSPNATAEVGYNRDRFLFNPSACLDEHLMQFKFLGILMGVAIRTKKPLDLHLAPLVWKQLCCVPLTLEDLEEVDLLYVQTLNSILHIEDSGITEESFHEMIPLDSFVGQSADGKMVPIIPGGNSIPLTFSNRKEYVERAIEYRLHEMDRQVAAVREGMSWIVPVPLLSLLTAKQLEQMVCGMPEISVEVLKKVVRYREVDEQHQLVQWFWHTLEEFSNEERVLFMRFVSGRSRLPANTADISQRFQIMKVDRPYDSLPTSQTCFFQLRLPPYSSQLVMAERLRYAINNCRSIDMDNYMLSRNVDNAEGSDTDY

SEQ ID NO: 1054 - DNA, 2628 bp, Homo sapiens
gaccgcggcagctcagcctcccgccgattgtatgttccaggcctcaatgaggagtccaaacatggagccattcaagcagcagaaggtggaggacttttatgacatcggagaggagctggggagtggccagtttgccatcgtgaagaagtgccgggagaagagcacggggcttgagtatgcagccaagttcatcaagaagcggcagagccgggcgagccggcgcggtgtgagccgggaggagatcgagcgggaggtgagcatcctgcggcaggtgctgcaccacaatgtcatcacgctgcacgacgtctatgagaaccgcaccgacgtggtgctcatccttgagctagtgtctggaggagagctcttcgatttcctggcccagaaggagtcactgagtgaggaggaggccaccagcttcattaagcagatcctggatggggtgaactaccttcacacaaagaaaattgctcactttgatctcaagccagaaaacattatgttgttagacaagaatattcccattccacacatcaagctgattgactttggtctggctcacgaaatagaagatggagttgaatttaagaatatttttgggacgccggaatttgttgctccagaaattgtgaactacgagcccctgggtctggaggctgacatgtggagcataggcgtcatcacctacatcctcttaagtggagcatcccctttcctgggagacacgaagcaggaaacactggcaaatatcacagcagtgagttacgactttgatgaggaattcttcagccagacgagcgagctggccaaggactttattcggaagcttctggttaaagagacccggaaacggctcacaatccaagaggctctcagacacccctggatcacgccggtggacaaccagcaagccatggtgcgcagggagtctgtggtcaatctggagaacttcaggaagcagtatgtccgcaggcggtggaagctttccttcagcatcgtgtccctgtgcaaccacctcacccgctcgctgatgaagaaggtgcacctgaggccggatgaggacctgaggaactgtgagagtgacactgaggaggacatcgccaggaggaaagccctccacccacggaggaggagcagcacctcctaactggcctgacctgcagtggccgccagggaggtctgggcccagcggggctcccttctgtgcagacttttggacccagctcagcaccagcacccgggcgtcctgagcactttgcaagagagatgggcccaaggaattcagaagagcttgcaggcaagccaggagaccctgggagctgtggctgtcttctgtggaggaggctccagcattcccaaagctcttaattctccataaaatgggctttcctctgtctgccatcctcagagtctggggtgggagtgtggacttaggaaaacaatataaaggacatcctcatcatcacggggtgaaggtcagactaaggcagccttcttcacaggctgagggggttcagaaccagcctggccaaaaattacaccagagagacagagtcctccccattgggaacagggtgattgaggaaagtgaaccttgggtgtgagggaccaatcctgtgacctcccagaaccatggaagccaggacgtcaggctgaccaacacctcagaccttctgaagcagcccattgctggcccgccatgttgtaattttgctcatttttattaaacttctggtttacctgatgcttggcttcttttagggctacccccatctcatttcctttagcccgtgtgcctgtaactctgagggggggcacccagtggggtgctgagtgggcagaatctcagaaggtcctcctgaaccgtccgcgcaggcctgcagtgggcctgcctcctccttgcttccctaacaggaaggtgtccagttcaagagaacccacccagagactgggagtggtggctcacgcctataatccctgcgctttggcagtccgaggcaggggaattgcttgaactcaggagttggagaccagcctgggcaacatggcaaaacgcagtctgtacaaaaaatacaaaaaattagccaggtgtaggggtaggcacctggcatcccagctactccaggggctgaggtgacagcattgcttaagcccagaaggtcgaggctgcagtgagctgagatcacgccactgcactccagtctgggtgacagagagagaccatatccaaaaaaaaaaaaagttgccagagacgagtatgcccatgctccctctacctcactgccaccactcctgctgttaggagctgagtgtgtctccctaaaatttctatgttgaagtcttaacccttggtaccacagaatatcactgtatttggagatggggtctttagaaaggcacttaaattaaaatgagctcactgatatgggccccgatgcaatataattggtgtccttataagaaggggaggttaggacacgcaggaaagaccacatgaaggcccaggagtgggagggggaatagccatcgacaaactaagggggcctcagaggaaaccaaccctgctgacacctcaatcttagactctggcctcaaaaattgtaagaaaataaacttctgtcttttaagcca

SEQ ID NO: 1055 - protein, 370 aa, Homo sapiens
MFQASMRSPNMEPFKQQKVEDFYDIGEELGSGQFAIVKKCREKSTGLEYAAKFIKKRQSRASRRGVSREEIEREVSILRQVLHHNVITLHDVYENRTDVVLILELVSGGELFDFLAQKESLSEEEATSFIKQILDGVNYLHTKKIAHFDLKPENIMLLDKNIPIPHIKLIDFGLAHEIEDGVEFKNIFGTPEFVAPEIVNYEPLGLEADMWSIGVITYILLSGASPFLGDTKQETLANITAVSYDFDEEFFSQTSELAKDFIRKLLVKETRKRLTIQEALRHPWITPVDNQQAMVRRESVVNLENFRKQYVRRRWKLSFSIVSLCNHLTRSLMKKVHLRPDEDLRNCESDTEEDIARRKALHPRRRSSTS

SEQ ID NO: 1056 - DNA, 138 bp, Homo sapiens
atggaggggaacagggatgaagctgagaaatgtgtcgacatcgtccaggaggctctgaatgctggcaaccgcgagaaggcccagcgtttcctgcagaaggccgagaagctctacccactgcccttggcctgcgcataa

SEQ ID NO: 1057 - protein, 45 aa, Homo sapiens [sequence omitted]

SEQ ID NO: 1058 - DNA, 723 bp, Homo sapiens
atggtggtaaccaggaacagttcccttcccccaccacacacccccccaaaaagactagaaaaaaaactggtcaacttggacgctggccgcgctcacgcagaacccgtgcccgcgggccggggaaggctgaacagaccctgggaggaaaagtgggcctgcaggcaccccgggctccccccgccgcctgtctcagataccgagcaggtgggattccgggaagccacctccgacttacgagccccccacgcgtccgacgcagaggcgcgggtgctactctcagcaccgccgcgccatcccggggcggaccgagccgcggagcacctcccggatctcaggagctctcgggcggagatctcggccatccgtgcctcctccccgaacccacccgccccgctcccgcgcccccggctgtcacctctccgggccgtgacagctccacctgccaccgctgcccgggtcgccgcccccgcactcaccacccagctggctcccgtgcgagcagcggatcgagctcggagagcggcgccggaatcccgcacgcgcggtagcggaacacgaggggctgaatgccgcggcgctctgagcccgcttagctcatccccagcccggcgctccgcccttcgcggcacccccgcccgcccgcccaggcctgccgtctcagtcagacgggactccccctcccctcgcggccgccactgcctccgcctctttctccgactctag

SEQ ID NO: 1059 - protein, 240 aa, Homo sapiens
MVVTRNSSLPPPHTPPKRLEKKLVNLDAGRAHAEPVPAGRGRLNRPWEEKWACRHPGLPPPPVSDTEQVGFREATSDLRAPHASDAEARVLLSAPPRHPGADRAAEHLPDLRSSRAEISAIRASSPNPPAPLPRPRLSPLRAVTAPPATAARVAAPALTTQLAPVRAADRARRAAPESRTRGSGTRGAECRGALSPLSSSPARRSALRGTPARPPRPAVSVRRDSPSPRGRHCLRLFLRL

SEQ ID NO: 1060 - DNA, 2393 bp, Homo sapiens
agcggcagggaggggctcttcacccagtccggcagttgaagctcggcgctcgggttacccctgcagcgacgccccctggtcccacagataccactgctgctcccgccctttcgctcctcggccgcgcaatgggcacccgcgacgacgagtacgactacctctttaaagttgtccttattggagattctggtgttggaaagagtaatctcctgtctcgatttactcgaaatgagtttaatctggaaagcaagagcaccattggagtagagtttgcaacaagaagcatccaggttgatggaaaaacaataaaggcacagatatgggacacagcagggcaagagcgatatcgagctataacatcagcatattatcgtggagctgtaggtgccttattggtttatgacattgctaaacatctcacatatgaaaatgtagagcgatggctgaaagaactgagagatcatgctgatagtaacattgttatcatgcttgtgggcaataagagtgatctacgtcatctcagggcagttcctacagatgaagcaagagcttttgcagaaaagaatggtttgtcattcattgaaacttcggccctagactctacaaatgtagaagctgcttttcagacaattttaacagagatttaccgcattgtttctcagaagcaaatgtcagacagacgcgaaaatgacatgtctccaagcaacaatgtggttcctattcatgttccaccaaccactgaaaacaagccaaaggtgcagtgctgtcagaacatctaaggcatttctcttctcccctagaaggctgtgtatagtccatttcccaggtctgagatttaaatatatttgtaattcttgtgtcacttttgtgttttattacttcatacttatgaatttttccatgtcctaagtcttttgattttagctttataaaatcatccacttgtcccgaatgactgcagctttttttcatgctatggcttcactagccttagtttaataaactgaatgtttggattcctcagttattgtttacttttcatcatggaagcctgtcactgtatgtaggacataatagaacttgatcacttgaagctcagacctattggtcttgatcaaatcaaactaagaagaccttagaaataagctaccattttgccacagagcagcttataggtaatacactcttctctcagtgcagtgtacatttccacaaatctaagaattgccctataaacatagcaggattttgagagcttgaaaattttccattattctggacatgaatttctaaaatgccttaataggtttatgtagttgagtaaattttgttttttaatttttgtaagcatcaaagttgattagagaggggggcactttttctggagaattctcttagtaaacacaaaagattgttacggtttcattagtagtatggttgtggggccataagttaaacagtgctgcctggtaggctgggaactgaagagacttgtggtattccatctcgggtgcctctgttggcaatgatcaggcagcccaaaagatttaaatgatctataataatttccaagcggtagattatgtggcattttattgctcaggcaataattggtttaatgctggtagtgtcaaattttgaagtgttaattttgtcttagaaccttccagtaagtgaaatacaacctagttttatcaccatatccaccagcaggcatggataattattttaacaatgctaatatttgagttttgcagtatattatagaatatagtccagttaaatctttggtttcagtatgtctgaagagtacagtgagaggttaatttctgctcaagtggtaccacttaaaggcatgtattcttttagtatgtaaaatgaaatagtaccttgagtttaaatagaatgcatttaggcattgtagagatctgaaatagttttcttccactacattgttgaaatcaatgaagcaattagtttctcattcagaaatgtgcacactaatatttagttttgctttctcgtggataatattaagcacttactctgcagtttcctggaagttgtgtcaactgcagtgatactattcaggatggtgggaaatccccaaaaatatgtatgtgtgggcttgcttagattactatatttcatagttaatcttttgtctcttgcggtgctcatgatgtgtggggcacacggaaggcattgctgtagtcagtcattttggttttcttctatagccattttattattttagtgtattagttatgaagataatattatctatttgtaaattgctactttgtattttatgcatgctctgtaatttgatttttttttagttattgatttggattatattcacattctaataaacagttatagggggatta

SEQ ID NO: 1061 - protein, 216 aa, Homo sapiens
MGTRDDEYDYLFKVVLIGDSGVGKSNLLSRFTRNEFNLESKSTIGVEFATRSIQVDGKTIKAQIWDTAGQERYRAITSAYYRGAVGALLVYDIAKHLTYENVERWLKELRDHADSNIVIMLVGNKSDLRHLRAVPTDEARAFAEKNGLSFIETSALDSTNVEAAFQTILTEIYRIVSQKQMSDRRENDMSPSNNVVPIHVPPTTENKPKVQCCQNI

SEQ ID NO: 1062 - DNA, 3997 bp, Homo sapiens
gatcgccgagccggccaccatgcccggcagaccgcgccactaggcgctcctcgcggctcccacccggcggcggcggcggcggcggcggcgtccgcgatggtttcagacgctgaaggattttgcatctgatcgctcggcgtttcaaagaagcagcgatcggagatggatgtctctctttgcccagccaagtgtagtttctggcggattttcttgctgggaagcgtctggctggactatgtgggctccgtgctggcttgccctgcaaattgtgtctgcagcaagactgagatcaattgccggcggccggacgatgggaacctcttccccctcctggaagggcaggattcagggaacagcaatgggaacgccagtatcaacatcacggacatctcaaggaatatcacttccatacacatagagaactggcgcagtcttcacacgctcaacgccgtggacatggagctctacaccggacttcaaaagctgaccatcaagaactcaggacttcggagcattcagcccagagcctttgccaagaacccccatttgcgttatataaacctgtcaagtaaccggctcaccacactctcgtggcagctcttccagacgctgagtcttcgggaattgcagttggagcagaactttttcaactgcagctgtgacatccgctggatgcagctctggcaggagcagggggaggccaagctcaacagccagaacctctactgcatcaacgctgatggctcccagcttcctctcttccgcatgaacatcagtcagtgtgaccttcctgagatcagcgtgagccacgtcaacctgaccgtacgagagggtgacaatgctgttatcacttgcaatggctctggatcaccccttcctgatgtggactggatagtcactgggctgcagtccatcaacactcaccagaccaatctgaactggaccaatgttcatgccatcaacttgacgctggtgaatgtgacgagtgaggacaatggcttcaccctgacgtgcattgcagagaacgtggtgggcatgagcaatgccagtgttgccctcactgtctactatcccccacgtgtggtgagcctggaggagcctgagctgcgcctggagcactgcatcgagtttgtggtgcgtggcaaccccccaccaacgctgcactggctgcacaatgggcagcctctgcgggagtccaagatcatccatgtggaatactaccaagagggagagatttccgagggctgcctgctcttcaacaagcccacccactacaacaatggcaactataccctcattgccaaaaacccactgggcacagccaaccagaccatcaatggccacttcctcaaggagccctttccagagagcacggataactttatcttgtttgacgaagtgagtcccacacctcctatcactgtgacccacaaaccagaagaagacacttttggggtatccatagcagttggacttgctgcttttgcctgtgtcctgttggtggttctcttcgtcatgatcaacaaatatggtcgacggtccaaatttggaatgaagggtcccgtggctgtcatcagtggtgaggaggactcagccagcccactgcaccacatcaaccacggcatcaccacgccctcgtcactggatgccgggcccgacactgtggtcattggcatgactcgcatccctgtcattgagaacccccagtacttccgtcagggacacaactgccacaagccggacacgtgggtcttttcaaacatagacaatcatgggatattaaacttgaaggacaatagagatcatctagtcccatcaactcactatatatatgaggaacctgaggtccagagtggggaagtgtcttacccaaggtcacatggtttcagagaaattatgttgaatccaataagccttcccggacattccaagcctcttaaccatggcatctatgttgaggatgtcaatgtttatttcagcaaaggacgtcatggcttttaaaaactccttttaagcctccttgttttgatgtcaccttggtaggctgggccctctgagaggttggaagctctaggcattgttctctttggatccagggatgctaagtagaaactgcatgagccaccagtgccccggcaccctttaacaccaccagatgggtgttttcccccatccaccactggcagggttgccccttccctccaatcatcactgtgctccttttttcccggcctacgaggcagctcctgccactatctttagagccaataaagagaattaaaaacctgtgcaccaggagcatcttttaaatacactagccattctcttgctttacaaaaacaacctaaccatcacaagaaagcctgatgaagtccagccgtgctccagcctcactttccctgcttggaagcgtggggtctccctggctctcccaggataccatgctgtcctcttagtgacctcgtcgccctgcaacctccagtggggaagagtcacagagagcacctaagcagaggtggagacggcgcggtaagaggagggggagccaggctcaagtattggcaccaagttaggtctcagaggaaagaatggaaaccaatcactttacatttttatttttattttcggtggaaaaatcatccttttttgggacatacttgccccctacttcctcttctctctggaacggctcacaatgagtgtgacattagaaaactccttgcagaggagagtttctccaggctcttcctgggcccttagatctgcagttccgacaagctttggctgcaggaggttttacccatgaactggccatcctactaggaccacaagggaccaagggaatcagggacaaaggcccttcctgccagcccatgatcccgggattggctctcttcccctacttccacttattcttgactctgagaacttttggaacccaatggaatcagcatttcaaggtcaagatgaactgaaggggaagagaagtaaaacttggcctcctccagcccctctcatggcaccaatggaagtgtcctcctgttctctggtcaatatgtgtgtttactttgcttgctttgactcatgccttactccatggccaccctctcccaaagagggggctcgcttcccccattttcaacttgatccactgaggagagggaagggggtgactttcccttcttcagtaggaaaggcacatttgtagggcctgaaactctcccgtatttgctgactcattggtggagtagacttctggctcccagctccactggcccatggggcctccattgtatgaagtcagcataggctgcccacctaatggtggagagcatgaaactgggagcatcctgtggggggcttgtgggggaaaaaggtggttgttttaacccaccgttgttttggggtggtgttgcacactagtagagaatagagtctatgcctttggcaaatttaactgggagtttggattcccacttaagggttttacttcttgggtcctgtggatggtggttcttcgtgtcaggatcccagcccgattctgcaaatgcctccatggggtttaaaaacatgaggctttccaagttcttgcccagtatctggggcagcctccagagtatcacctgggagttcaggttctctccagggctccaggtgtgtgtttatctcgccccctccagctctcctcatcctgctccccattgctccatgtcaggctgttccccattgtgccctgctgatgctttgggtccagggcctcctcccaagtgtggctttaaggagtaagcttgaggatgatgttttttaattattgtaaatcattacctcatttccagcctcccaggctccatccatcccagcatcttttattctgccattttcctcaccttgtgctatgacaatggggcgttgtgtttccacagagacttataggagtgttcagtgtatagtttcttaataaacactttattttctaatgaaaaaaaaaaaaaaaaaa

SEQ ID NO: 1063 - protein, 612 aa, Homo sapiens
MDVSLCPAKCSFWRIFLLGSVWLDYVGSVLACPANCVCSKTEINCRRPDDGNLFPLLEGQDSGNSNGNASINITDISRNITSIHIENWRSLHTLNAVDMELYTGLQKLTIKNSGLRSIQPRAFAKNPHLRYINLSSNRLTTLSWQLFQTLSLRELQLEQNFFNCSCDIRWMQLWQEQGEAKLNSQNLYCINADGSQLPLFRMNISQCDLPEISVSHVNLTVREGDNAVITCNGSGSPLPDVDWIVTGLQSINTHQTNLNWTNVHAINLTLVNVTSEDNGFTLTCIAENVVGMSNASVALTVYYPPRVVSLEEPELRLEHCIEFVVRGNPPPTLHWLHNGQPLRESKIIHVEYYQEGEISEGCLLFNKPTHYNNGNYTLIAKNPLGTANQTINGHFLKEPFPESTDNFILFDEVSPTPPITVTHKPEEDTFGVSIAVGLAAFACVLLVVLFVMINKYGRRSKFGMKGPVAVISGEEDSASPLHHINHGITTPSSLDAGPDTVVIGMTRIPVIENPQYFRQGHNCHKPDTWVFSNIDNHGILNLKDNRDHLVPSTHYIYEEPEVQSGEVSYPRSHGFREIMLNPISLPGHSKPLNHGIYVEDVNVYFSKGRHGF

SEQ ID NO: 1064 - DNA, 2860 bp, Homo sapiens
gatcgccgagccggccaccatgcccggcagaccgcgccactaggcgctcctcgcggctcccacccggcggcggcggcggcggcggcggcgtccgcgatggtttcagacgctgaaggattttgcatctgatcgctcggcgtttcaaagaagcagcgatcggagatggatgtctctctttgcccagccaagtgtagtttctggcggattttcttgctgggaagcgtctggctggactatgtgggctccgtgctggcttgccctgcaaattgtgtctgcagcaagactgagatcaattgccggcggccggacgatgggaacctcttccccctcctggaagggcaggattcagggaacagcaatgggaacgccagtatcaacatcacggacatctcaaggaatatcacttccatacacatagagaactggcgcagtcttcacacgctcaacgccgtggacatggagctctacaccggacttcaaaagctgaccatcaagaactcaggacttcggagcattcagcccagagcctttgccaagaacccccatttgcgttatataaacctgtcaagtaaccggctcaccacactctcgtggcagctcttccagacgctgagtcttcgggaattgcagttggagcagaactttttcaactgcagctgtgacatccgctggatgcagctctggcaggagcagggggaggccaagctcaacagccagaacctctactgcatcaacgctgatggctcccagcttcctctcttccgcatgaacatcagtcagtgtgaccttcctgagatcagcgtgagccacgtcaacctgaccgtacgagagggtgacaatgctgttatcacttgcaatggctctggatcaccccttcctgatgtggactggatagtcactgggctgcagtccatcaacactcaccagaccaatctgaactggaccaatgttcatgccatcaacttgacgctggtgaatgtgacgagtgaggacaatggcttcaccctgacgtgcattgcagagaacgtggtgggcatgagcaatgccagtgttgccctcactgtctactatcccccacgtgtggtgagcctggaggagcctgagctgcgcctggagcactgcatcgagtttgtggtgcgtggcaaccccccaccaacgctgcactggctgcacaatgggcagcctctgcgggagtccaagatcatccatgtggaatactaccaagagggagagatttccgagggctgcctgctcttcaacaagcccacccactacaacaatggcaactataccctcattgccaaaaacccactgggcacagccaaccagaccatcaatggccacttcctcaaggagccctttccagagagcacggataactttatcttgtttgacgaagtgagtcccacacctcctatcactgtgacccacaaaccagaagaagacacttttggggtatccatagcagttggacttgctgcttttgcctgtgtcctgttggtggttctcttcgtcatgatcaacaaatatggtcgacggtccaaatttggaatgaagggtcccgtggctgtcatcagtggtgaggaggactcagccagcccactgcaccacatcaaccacggcatcaccacgccctcgtcactggatgccgggcccgacactgtggtcattggcatgactcgcatccctgtcattgagaacccccagtacttccgtcagggacacaactgccacaagccggacacgtatgtgcagcacattaagaggagagacatcgtgctgaagcgagaactgggtgagggagcctttggaaaggtcttcctggccgagtgctacaacctcagcccgaccaaggacaagatgcttgtggctgtgaaggccctgaaggatcccaccctggctgcccggaaggatttccagagggaggccgagctgctcaccaacctgcagcatgagcacattgtcaagttctatggagtgtgcggcgatggggaccccctcatcatggtctttgaatacatgaagcatggagacctgaataagttcctcagggcccatgggccagatgcaatgatccttgtggatggacagccacgccaggccaagggtgagctggggctctcccaaatgctccacattgccagtcagatcgcctcgggtatggtgtacctggcctcccagcactttgtgcaccgagacctggccaccaggaactgcctggttggagcgaatctgctagtgaagattggggacttcggcatgtccagagatgtctacagcacggattattacaggctctttaatccatctggaaatgatttttgtatatggtgtgaggtgggaggacacaccatgctccccattcgctggatgcctcctgaaagcatcatgtaccggaagttcactacagagagtgatgtatggagcttcggggtgatcctctgggagatcttcacctatggaaagcagccatggttccaactctcaaacacggaggtcattgagtgcattacccaaggtcgtgttttggagcggccccgagtctgccccaaagaggtgtacgatgtcatgctggggtgctggcagagggaaccacagcagcggttgaacatcaaggagatctacaaaatcctccatgctttggggaaggccaccccaatctacctggacattcttggctagtggtggctggtggtcatgaattcatactctgttgcctcctctctccctgcctcacatctcccttccacctcacaactccttccatccttgactgaagcgaacatcttcatataaactcaagtgcctgctacacatacaacactgaaaaaaggaaaaaaaaagaaagaaaaaaaaaccc

SEQ ID NO: 1065 - protein, 839 aa, Homo sapiens
MDVSLCPAKCSFWRIFLLGSVWLDYVGSVLACPANCVCSKTEINCRRPDDGNLFPLLEGQDSGNSNGNASINITDISRNITSIHIENWRSLHTLNAVDMELYTGLQKLTIKNSGLRSIQPRAFAKNPHLRYINLSSNRLTTLSWQLFQTLSLRELQLEQNFFNCSCDIRWMQLWQEQGEAKLNSQNLYCINADGSQLPLFRMNISQCDLPEISVSHVNLTVREGDNAVITCNGSGSPLPDVDWIVTGLQSINTHQTNLNWTNVHAINLTLVNVTSEDNGFTLTCIAENVVGMSNASVALTVYYPPRVVSLEEPELRLEHCIEFVVRGNPPPTLHWLHNGQPLRESKIIHVEYYQEGEISEGCLLFNKPTHYNNGNYTLIAKNPLGTANQTINGHFLKEPFPESTDNFILFDEVSPTPPITVTHKPEEDTFGVSIAVGLAAFACVLLVVLFVMINKYGRRSKFGMKGPVAVISGEEDSASPLHHINHGITTPSSLDAGPDTVVIGMTRIPVIENPQYFRQGHNCHKPDTYVQHIKRRDIVLKRELGEGAFGKVFLAECYNLSPTKDKMLVAVKALKDPTLAARKDFQREAELLTNLQHEHIVKFYGVCGDGDPLIMVFEYMKHGDLNKFLRAHGPDAMILVDGQPRQAKGELGLSQMLHIASQIASGMVYLASQHFVHRDLATRNCLVGANLLVKIGDFGMSRDVYSTDYYRLFNPSGNDFCIWCEVGGHTMLPIRWMPPESIMYRKFTTESDVWSFGVILWEIFTYGKQPWFQLSNTEVIECITQGRVLERPRVCPKEVYDVMLGCWQREPQQRLNIKEIYKILHALGKATPIYLDILG

SEQ ID NO: 1066 - DNA, 2818 bp, Homo sapiens
gatcgccgagccggccaccatgcccggcagaccgcgccactaggcgctcctcgcggctcccacccggcggcggcggcggcggcggcggcgtccgcgatggtttcagacgctgaaggattttgcatctgatcgctcggcgtttcaaagaagcagcgatcggagatggatgtctctctttgcccagccaagtgtagtttctggcggattttcttgctgggaagcgtctggctggactatgtgggctccgtgctggcttgccctgcaaattgtgtctgcagcaagactgagatcaattgccggcggccggacgatgggaacctcttccccctcctggaagggcaggattcagggaacagcaatgggaacgccagtatcaacatcacggacatctcaaggaatatcacttccatacacatagagaactggcgcagtcttcacacgctcaacgccgtggacatggagctctacaccggacttcaaaagctgaccatcaagaactcaggacttcggagcattcagcccagagcctttgccaagaacccccatttgcgttatataaacctgtcaagtaaccggctcaccacactctcgtggcagctcttccagacgctgagtcttcgggaattgcagttggagcagaactttttcaactgcagctgtgacatccgctggatgcagctctggcaggagcagggggaggccaagctcaacagccagaacctctactgcatcaacgctgatggctcccagcttcctctcttccgcatgaacatcagtcagtgtgaccttcctgagatcagcgtgagccacgtcaacctgaccgtacgagagggtgacaatgctgttatcacttgcaatggctctggatcaccccttcctgatgtggactggatagtcactgggctgcagtccatcaacactcaccagaccaatctgaactggaccaatgttcatgccatcaacttgacgctggtgaatgtgacgagtgaggacaatggcttcaccctgacgtgcattgcagagaacgtggtgggcatgagcaatgccagtgttgccctcactgtctactatcccccacgtgtggtgagcctggaggagcctgagctgcgcctggagcactgcatcgagtttgtggtgcgtggcaaccccccaccaacgctgcactggctgcacaatgggcagcctctgcgggagtccaagatcatccatgtggaatactaccaagagggagagatttccgagggctgcctgctcttcaacaagcccacccactacaacaatggcaactataccctcattgccaaaaacccactgggcacagccaaccagaccatcaatggccacttcctcaaggagccctttccagagagcacggataactttatcttgtttgacgaagtgagtcccacacctcctatcactgtgacccacaaaccagaagaagacacttttggggtatccatagcagttggacttgctgcttttgcctgtgtcctgttggtggttctcttcgtcatgatcaacaaatatggtcgacggtccaaatttggaatgaagggtcccgtggctgtcatcagtggtgaggaggactcagccagcccactgcaccacatcaaccacggcatcaccacgccctcgtcactggatgccgggcccgacactgtggtcattggcatgactcgcatccctgtcattgagaacccccagtacttccgtcagggacacaactgccacaagccggacacgtatgtgcagcacattaagaggagagacatcgtgctgaagcgagaactgggtgagggagcctttggaaaggtcttcctggccgagtgctacaacctcagcccgaccaaggacaagatgcttgtggctgtgaaggccctgaaggatcccaccctggctgcccggaaggatttccagagggaggccgagctgctcaccaacctgcagcatgagcacattgtcaagttctatggagtgtgcggcgatggggaccccctcatcatggtctttgaatacatgaagcatggagacctgaataagttcctcagggcccatgggccagatgcaatgatccttgtggatggacagccacgccaggccaagggtgagctggggctctcccaaatgctccacattgccagtcagatcgcctcgggtatggtgtacctggcctcccagcactttgtgcaccgagacctggccaccaggaactgcctggttggagcgaatctgctagtgaagattggggacttcggcatgtccagagatgtctacagcacggattattacagggtgggaggacacaccatgctccccattcgctggatgcctcctgaaagcatcatgtaccggaagttcactacagagagtgatgtatggagcttcggggtgatcctctgggagatcttcacctatggaaagcagccatggttccaactctcaaacacggaggtcattgagtgcattacccaaggtcgtgttttggagcggccccgagtctgccccaaagaggtgtacgatgtcatgctggggtgctggcagagggaaccacagcagcggttgaacatcaaggagatctacaaaatcctccatgctttggggaaggccaccccaatctacctggacattcttggctagtggtggctggtggtcatgaattcatactctgttgcctcctctctccctgcctcacatctcccttccacctcacaactccttccatccttgactgaagcgaacatcttcatataaactcaagtgcctgctacacatacaacactgaaaaaaggaaaaaaaaagaaagaaaaaaaaaccc

SEQ ID NO: 1067 - protein, 825 aa, Homo sapiens
MDVSLCPAKCSFWRIFLLGSVWLDYVGSVLACPANCVCSKTEINCRRPDDGNLFPLLEGQDSGNSNGNASINITDISRNITSIHIENWRSLHTLNAVDMELYTGLQKLTIKNSGLRSIQPRAFAKNPHLRYINLSSNRLTTLSWQLFQTLSLRELQLEQNFFNCSCDIRWMQLWQEQGEAKLNSQNLYCINADGSQLPLFRMNISQCDLPEISVSHVNLTVREGDNAVITCNGSGSPLPDVDWIVTGLQSINTHQTNLNWTNVHAINLTLVNVTSEDNGFTLTCIAENVVGMSNASVALTVYYPPRVVSLEEPELRLEHCIEFVVRGNPPPTLHWLHNGQPLRESKIIHVEYYQEGEISEGCLLFNKPTHYNNGNYTLIAKNPLGTANQTINGHFLKEPFPESTDNFILFDEVSPTPPITVTHKPEEDTFGVSIAVGLAAFACVLLVVLFVMINKYGRRSKFGMKGPVAVISGEEDSASPLHHINHGITTPSSLDAGPDTVVIGMTRIPVIENPQYFRQGHNCHKPDTYVQHIKRRDIVLKRELGEGAFGKVFLAECYNLSPTKDKMLVAVKALKDPTLAARKDFQREAELLTNLQHEHIVKFYGVCGDGDPLIMVFEYMKHGDLNKFLRAHGPDAMILVDGQPRQAKGELGLSQMLHIASQIASGMVYLASQHFVHRDLATRNCLVGANLLVKIGDFGMSRDVYSTDYYRVGGHTMLPIRWMPPESIMYRKFTTESDVWSFGVILWEIFTYGKQPWFQLSNTEVIECITQGRVLERPRVCPKEVYDVMLGCWQREPQQRLNIKEIYKILHALGKATPIYLDILG

SEQ ID NO: 1068 - DNA, 9085 bp, Homo sapiens
agtagcgtctgggtccctggactaaagccgtcaaatgtaaccaattgctgaggagctctcccctaagaatcccgcctccactctgaggaacagcttcgctgatcaatggatcccctcctagacgcaatgagcgcgcggggcaagtggagaagcggctgaactgcccaatgaacaagcggtttccgtggttaggggcgtggcagaagcggtcgtcaggggcgtggcggcagttacttgggcggggccggtagcggcgggagctgcactggccaggggttccggctgtatatccatgagcgccgctggcagccggggagctgcaggaaccagactgggggcgagctgagcacctgtagtcaatcacacgcagaaataataatgatacttatgttagaagattgttttgagaagtgcatggagttactacatctgaagcatttagaacagtacctggcacagggttctgtcctcttcatttgcaagccactgctttatccacgagggtgctccctacttatgccagtgaattaatttttggcacagatgaatccttcatatttatctggatttagctggtagcatttgtctcctaagacttggtcacagaggaatccatgtgaccttcaggccttctgctctaaactggcaggagatcctgtttctactcacagcgtccgagggtctggtggccgagccctgaggggcgctgttgctcccaggtggcagaattcagcatcagagagccacacagctgaaagagatggatggcttttaggtttgtttgaataagagatctgacctgaccggcccaactgtacaactcttcaaggaaaattcgtatttgcagtgggaagaataagtaacattgatcaagatgaatgccatgctggagactcccgaactcccagccgtgtttgatggagtgaagctggctgcagtggctgctgtgctgtacgtgatcgtccggtgtttgaacctgaagagccccacagccccacctgacctctacttccaggactcggggctctcacgctttctgctcaagtcctgtcctcttctgaccaaagaatacattccaccgttgatctgggggaaaagtggacacatccagacagccttgtatgggaagatgggaagggtgaggtcgccacatccttatgggcaccggaagttcatcactatgtctgatggagccacttctacattcgacctcttcgagcccttggctgagcactgtgttggagatgatatcaccatggtcatctgccctggaattgccaatcacagcgagaagcaatacatccgcactttcgttgactacgcccagaaaaatggctatcggtgcgccgtgctgaaccacctgggtgccctgcccaacattgaattgacctcgccacgcatgttcacctatggctgcacgtgggaatttggagccatggtgaactacatcaagaagacatatcccctgacccagctggtcgtcgtgggcttcagcctgggtggtaacattgtgtgcaaatacttgggggagactcaggcaaaccaagagaaggtcctgtgctgcgtcagcgtgtgccaggggtacagtgcactgagggcccaggaaaccttcatgcaatgggatcagtgccggcggttctacaacttcctcatggctgacaacatgaagaagatcatcctctcgcacaggcaagctctttttggagaccatgttaagaaaccccagagcctggaagacacggacttgagccggctctacacagcaacatccctgatgcagattgatgacaatgtgatgaggaagtttcacggctataactccctgaaggaatactatgaggaagaaagttgcatgcggtacctgcacaggatttatgttcctctcatgctggttaatgcagctgacgatccgttggtgcatgaaagtcttctaaccattccaaaatctctttcagagaaacgagagaacgtcatgtttgtgctgcctctgcatgggggccacttgggcttctttgagggctctgtgctgttccccgagcccctgacatggatggataagctggtggtggagtacgccaacgccatttgccaatgggagcgtaacaagttgcagtgctctgacacggagcaggtggaggccgacctggagtgaggcctccggactctggcacgctccagcagccctcctctggaagctgcgtcccctcaccccctgtttcaggtctcccatctccctcagtgacctggatctgacctcacaccatcagcagggggcacccaccatgcacacctgtctcggagtaggcagctcttcctgggagctccaggctatttttgtgcttagttactggttttctccattgcattgttaggcatggtgacaagtgacagagttcttgccctctgtccagtttcagcatctggttgcttttaagccaagtacatctagtttccctattaaaaatgtgtctgaatagcgattttgctttgccaccaaaaggcttttccctgagaacagtgaaggatgtatgtcattttgtggtggttgtatgtgtccttacatagaccttaaaaagagctcacccttccaggccaatgctgaagacacagctccgcttgggagcctgagaacccaggcttcccaggccagagtgtggcttcttaaacggcaaaggaaattcctttgagtcacaagccaagttttcgccctgtctcctgagaccatttccctacgctttgctgctgctgagagttacgtgaggcacttgttaaaaattcagcctcccaggtccctcccctcggagaggctgattcactgggtctgggaaggagcctggggattttaatttttcacaagtgccccagatgattctcatcaccaagcaaattttggaaatgctgttcaacagcgcccttaaattggaaacatctttgcagctcgttttattgaaattcataatcaggggtgtcctctagctcccacggtctccagagcagcaaggccggctatggagctgccgtcgtgtgaccacagtgtgatgtctcagaagggctctgggtgggctgagcatctgggctgtgccctggctctgcttttcaccctggacaaagtcgctgtggacttcaatttcttcacctctaaaatgggggacttggaccaggtagattgctgagctcactaccaggttcaaagttcaatgacaaactcagtttactgaggtttgagagaacatccctccaggggagcctgggagctgctctcccagtctaagcatgtagatatcatcgtttgccttttgtgtgtgtgtgtcccttatttgataaaaagatgttttgagttgttttttttttaagcactcacttgtaattttagtttttaaacccaagtccctctaactttgcctttgataccaaacaattcaaaagttggatctgagtttggagaaagatatttccaacctaagtgggtattattttgaaaccagatttttaatttaatagcctatatttgtagtctgttggataggtgtttccaaagtgtgtcttctcaagtgaaaacgcaactctaggtttcaagtactccttttctccgatcctgtggtacttgaatatccaaaaaccctgcactttgaacaatcagctgttgctatctggaactaaacagaactatgagtaaaattgcctggatactttaaaaagatatttttcctccttcatctcctttgactccaggacagactggaatataagtagtgggtctgcatggatgtttcagggatcaaaggagccacctgggcgcctgagtgccaaccctcagggccacaggtgggtgtggtttgggcacgggtccaagtgactgtgacgggacccgtgggcatgggtccaggtctgtaacctgaagaagttgttttctgacaatcaccaaatcatccgaatgacatcaaaagcagcccttatctcagagactgagatttctgtggtctcaacttcgctttggtataatttctggcactcaccagcctctatcattatgactttccccccagtgtattatttctctaataggtttccttttcacgttcttttagcacagactggcactttaccctctcagtttggaagttagcccctctcctctgttacttttcccttcacccaactacagctgtgatctagaacattcatagtcatatttctgctactactaccttcatttatcaagactttttatgagaataggtaaaccaagcaataacttcctaggactgaatcaccaccccagaagagcgagaggctcctttcatatgcctgaggccacaccccttaacctgttctgacaaaatagtggctggcccatgtaccagctccattcagaaattcaggaagagaaaagacagccctgttgtcacacaaaccggtgtgggggagggtggagcctggtctgcacggcagtcctggtggcccctgtggaggacaggcagggctggcagcatagcctttgttgccacacaaccggaatttgctcccccaggactgtgggagccagtgtcccagctgaaatctttttagtgtgtggctctgaatggcactcacattccattttggctcacatgaaactaactgaagccctttgttcaagcttcaggctcttaggcatggaaatgagaatgtgactgtggctgtcttacaggaaaattcttgtttgtccctgaatgagagcacagaggcattgaattcacagagctgcaaacttgcctgataaatgagggagtggcagtttatagataggtcatcttttttccttcctccaggtgtccttgcctttcttcccaaagtcattcatttctgatgagtatatgaatccccctcttgctagtaaggttctatttgggctaaaacaaggctgaatttttaaagagtatttgaatatattttagaatcaaattgaggctataaattgcatcaatctggacaattccattgcaggaataatatgttaaaaaccaatggggagaagcacccacatctctcctgtagcactccgtgtctcataagcaatttgaagacacttacaagtaactgattccagtcaaattaggattaactgactcaaaaaatggtgtcaagtttctttaatgtttttatgttagaagtgagtttaacagacttgaagaaaactgttatcttttcctgctgtgagtttacacaaatgattccagagcagaatgaaagcagaaagctgttggttacaatattcttttaacctctctgcagcattttacacttactgggaaccttatgattcaccgtaagagtggaaatatacctgagttcgtgtcctaatggtctctaattcacattggatcgtgggcaaatcacctcacctctctgagcctgttccctcctcttagaccatctctaagaccacttcatctatttacacatcatttgcttgaacattgctgaacatctgcgtgaacttggcctctccagcccttgcaggtggaaacagctgtgtcaaggctcaaggctcacgctgaggggacttggagggagggggcttctgcattaagctttcctggtgaagacccttgatcttgtccaaagccctgtgtctttgactggcttctcttcagagtccccgttgtcatcgtaagacccttgctgtttggagggtggtcttgtgactgtggcagctgctggccgctggaatgaggagcctatctccatcctccagtgtgactcaggcagagcattgagaattcccagggcagaaatccttcctgctcaggctttcattctaaaactacagtcttcattaaagctgaactttctgggtagctgagcttatatgcccggcatctgaatgagagctctctttgtaactgtgtgacttgagatctagtttgccagctcctgggaaacaatacatgtgttcttgtttgtgtttgctcagcaagcagatgtctgagatgtaagaagcttttcttttcctgtggcattgattctgacttagagctgaagtaaaagatcactgaaacatcacgtcaagttgaagtcactcataggtctttgtcctttaggcaggacaggagagtcattaagaagcatttcactgtagcattctatcacaatatcatctggaattgttttctttgcccagaaagccttaacttgcctctagagaatccctggtattacaacgatattgcggcattagaattccaactcttctgctgtggaagtttgaagcgaagctgcagcaaaaccagagaatttcctcaagtggcctgtaggctccttgttatcttatgcccccacccctccctcaacaatatgagtgatccagaactggcccaaacacctcagctctggtccctttttgcccttcttggccttactctgttgttcaaagccactttggattgcttggatgcttcgaacagccatgaaaagtagcctgcctgtggcatttagaggccaagcaattgacagaaagggtttcttctacctctgttatctaagcagagggaagtaaacctctcaccgccccccacccctcactgcccccgattaccctagaattgctttcgccaaattgtagttgaagctaaggaaggggaatctggcccctgctgggagagggaactggaatgccacacaaggcaaggcctgcttccttccttcccctctgctgctgctgcctcggaacgctgcagcccaggcttcctcccacagtggcccttggaagcaggccgcagagtagacagctgctccttttggaagagtcagtcccctgtgttttctgaactgtttttcctagcatgtatgtgggtagagctttcatgcatctctagtaataataagctgaaattagttttttttttaattctccaatttaaaacttttaattaaaaagtaaattttaatgtcgaaaatgcaaacttggggagggcagaaagatcacacacaaggctgtcacttcatacttgcaggattgcacagcagccgggcagaggcgctcctcacttcccagatggggcggcgggcagcagagacgcacctcacttcctagacagtgcggcagccaggcacaggcacacctcacttcccagacagttgggcggccaggcaagcgctcctcacttcccagatggggcggctcccgggaagcggggctcctcacttcccagacagggtggccaggcagaggtgctcctcacttcccagaacaattctttatgaatttgataaaggactgaagtgcaactgaaagctgctagtgatgatctggtaatatacaatttgtccagtagccagtttgtttttattgtgttttctaaccataagagatcattaaaggcaaagcctgtatgacgctgtacacacacaaaaaaatggtcaccgcaggccatactaccaatgaaatggtaggtaaacaaatcttctggtcaagagaaaaaaaaaagaaatagcactctgcatgctttgctctacaagacgaatttccctagaaagaatccaatgaaggccgggcatagtggctcactcctgtaatcccagcactttggaggccgaggcgggtagatcacctgaggttaggagttcaagaccagcctggccaacatggtgaaaccccttctctactaaaaatgcaaaaattagctgggtgtggtggcgggcgcctgtaatcccagctactcgggaggctgaggtgggagaattgcttgaacccaggagacggaggttgcagtgagccgagatcacgcctctgcactccagcctgggcaacaagagtgagactccgtctccaaaaaaagaaaaggaatccagtgaaaatggctgcaattacaacaagaagtgaaggaagaagactggtgacatctctgaaggatgcagttgaggttgatccaggtttatccgaatatgctacctttctgagccttaaaccttcatctctcaggtgttgatttgcttctgatagcttcatcatttctccctgaagtcttttacactcttctgttagtttccttgtttcagtatcatgaagtgaagcactgtgtggttgtggcgtgggcccgtcttgcttagatgcattcagtgggacagctttgctgggttccatgtcattcaatttatcattttcattggggatctccatttggaatccattaattcatgaggttttgcctcattccacacagcttccatatctgaagtgtttagtggagcaaaaattgtaccataaacttgtgtttactcttttcattcggatcatagtcaaagggctgtagcattactgaaacagtcacagttgaccctgggtcaataattccactgttgggcctcacacagtaccggtgaggcacggtagtcttcactttgaaacacacttttctatccgatggatttcgcaatttaagatttgtagtgactacatctgtgaaggggcctttgaatttgaggtctatgggcgggtcgaggaccaggatctgctcgtgcttcgccgtggccccggaggcagacgccattggagagacagcgcagagcagggggcggcttgctcgctgggggcgggggacgatggcgagaggggagggggagcgagttcgcatctctccttttcctggttagactctgttcaaccacattcttatgttggcagatctgcttccagattgatttttagagcaccatcactttcacattcctgattctgattttgttttgttttgtttgggttttctgaaacttaaaatgctgccccgaaaatactatatttttgagtttgtgttctgaaagcctccgtgctgctggatctttggggggaaatacaggatccttcagcactgaggtgtttaagatttgcaactagcaatgcaattttttctaaatatggggatatttacctttattaagaaattatactaaacattgatgtccttgatcattttatgttctcatattacttttgattctactatgattgtgtggtggtgaacaaagatcattacaaacaaaaactgtaattttgttatatttgattcaatggaatttacctaaaaaataaagactaaaaatgtgg

SEQ ID NO: 1069 - protein, 425 aa, Homo sapiens
MNAMLETPELPAVFDGVKLAAVAAVLYVIVRCLNLKSPTAPPDLYFQDSGLSRFLLKSCPLLTKEYIPPLIWGKSGHIQTALYGKMGRVRSPHPYGHRKFITMSDGATSTFDLFEPLAEHCVGDDITMVICPGIANHSEKQYIRTFVDYAQKNGYRCAVLNHLGALPNIELTSPRMFTYGCTWEFGAMVNYIKKTYPLTQLVVVGFSLGGNIVCKYLGETQANQEKVLCCVSVCQGYSALRAQETFMQWDQCRRFYNFLMADNMKKIILSHRQALFGDHVKKPQSLEDTDLSRLYTATSLMQIDDNVMRKFHGYNSLKEYYEEESCMRYLHRIYVPLMLVNAADDPLVHESLLTIPKSLSEKRENVMFVLPLHGGHLGFFEGSVLFPEPLTWMDKLVVEYANAICQWERNKLQCSDTEQVEADLE

SEQ ID NO: 1070 - DNA, 8687 bp, Homo sapiens
agtagcgtctgggtccctggactaaagccgtcaaatgtaaccaattgctgaggagctctcccctaagaatcccgcctccactctgaggaacagcttcgctgatcaatggatcccctcctagacgcaatgagcgcgcggggcaagtggagaagcggctgaactgcccaatgaacaagcggtttccgtggttaggggcgtggcagaagcggtcgtcaggggcgtggcggcagttacttgggcggggccggtagcggcgggagctgcactggccaggggttccggctgtatatccatgagcgccgctggcagccggggagctgcaggaaccagactgggggcgagctgagcacctgtagtcaatcacacgcagcttttaggtttgtttgaataagagatctgacctgaccggcccaactgtacaactcttcaaggaaaattcgtatttgcagtgggaagaataagtaacattgatcaagatgaatgccatgctggagactcccgaactcccagccgtgtttgatggagtgaagctggctgcagtggctgctgtgctgtacgtgatcgtccggtgtttgaacctgaagagccccacagccccacctgacctctacttccaggactcggggctctcacgctttctgctcaagtcctgtcctcttctgaccaaagaatacattccaccgttgatctgggggaaaagtggacacatccagacagccttgtatgggaagatgggaagggtgaggtcgccacatccttatgggcaccggaagttcatcactatgtctgatggagccacttctacattcgacctcttcgagcccttggctgagcactgtgttggagatgatatcaccatggtcatctgccctggaattgccaatcacagcgagaagcaatacatccgcactttcgttgactacgcccagaaaaatggctatcggtgcgccgtgctgaaccacctgggtgccctgcccaacattgaattgacctcgccacgcatgttcacctatggctgcacgtgggaatttggagccatggtgaactacatcaagaagacatatcccctgacccagctggtcgtcgtgggcttcagcctgggtggtaacattgtgtgcaaatacttgggggagactcaggcaaaccaagagaaggtcctgtgctgcgtcagcgtgtgccaggggtacagtgcactgagggcccaggaaaccttcatgcaatgggatcagtgccggcggttctacaacttcctcatggctgacaacatgaagaagatcatcctctcgcacaggcaagctctttttggagaccatgttaagaaaccccagagcctggaagacacggacttgagccggctctacacagcaacatccctgatgcagattgatgacaatgtgatgaggaagtttcacggctataactccctgaaggaatactatgaggaagaaagttgcatgcggtacctgcacaggatttatgttcctctcatgctggttaatgcagctgacgatccgttggtgcatgaaagtcttctaaccattccaaaatctctttcagagaaacgagagaacgtcatgtttgtgctgcctctgcatgggggccacttgggcttctttgagggctctgtgctgttccccgagcccctgacatggatggataagctggtggtggagtacgccaacgccatttgccaatgggagcgtaacaagttgcagtgctctgacacggagcaggtggaggccgacctggagtgaggcctccggactctggcacgctccagcagccctcctctggaagctgcgtcccctcaccccctgtttcaggtctcccatctccctcagtgacctggatctgacctcacaccatcagcagggggcacccaccatgcacacctgtctcggagtaggcagctcttcctgggagctccaggctatttttgtgcttagttactggttttctccattgcattgttaggcatggtgacaagtgacagagttcttgccctctgtccagtttcagcatctggttgcttttaagccaagtacatctagtttccctattaaaaatgtgtctgaatagcgattttgctttgccaccaaaaggcttttccctgagaacagtgaaggatgtatgtcattttgtggtggttgtatgtgtccttacatagaccttaaaaagagctcacccttccaggccaatgctgaagacacagctccgcttgggagcctgagaacccaggcttcccaggccagagtgtggcttcttaaacggcaaaggaaattcctttgagtcacaagccaagttttcgccctgtctcctgagaccatttccctacgctttgctgctgctgagagttacgtgaggcacttgttaaaaattcagcctcccaggtccctcccctcggagaggctgattcactgggtctgggaaggagcctggggattttaatttttcacaagtgccccagatgattctcatcaccaagcaaattttggaaatgctgttcaacagcgcccttaaattggaaacatctttgcagctcgttttattgaaattcataatcaggggtgtcctctagctcccacggtctccagagcagcaaggccggctatggagctgccgtcgtgtgaccacagtgtgatgtctcagaagggctctgggtgggctgagcatctgggctgtgccctggctctgcttttcaccctggacaaagtcgctgtggacttcaatttcttcacctctaaaatgggggacttggaccaggtagattgctgagctcactaccaggttcaaagttcaatgacaaactcagtttactgaggtttgagagaacatccctccaggggagcctgggagctgctctcccagtctaagcatgtagatatcatcgtttgccttttgtgtgtgtgtgtcccttatttgataaaaagatgttttgagttgttttttttttaagcactcacttgtaattttagtttttaaacccaagtccctctaactttgcctttgataccaaacaattcaaaagttggatctgagtttggagaaagatatttccaacctaagtgggtattattttgaaaccagatttttaatttaatagcctatatttgtagtctgttggataggtgtttccaaagtgtgtcttctcaagtgaaaacgcaactctaggtttcaagtactccttttctccgatcctgtggtacttgaatatccaaaaaccctgcactttgaacaatcagctgttgctatctggaactaaacagaactatgagtaaaattgcctggatactttaaaaagatatttttcctccttcatctcctttgactccaggacagactggaatataagtagtgggtctgcatggatgtttcagggatcaaaggagccacctgggcgcctgagtgccaaccctcagggccacaggtgggtgtggtttgggcacgggtccaagtgactgtgacgggacccgtgggcatgggtccaggtctgtaacctgaagaagttgttttctgacaatcaccaaatcatccgaatgacatcaaaagcagcccttatctcagagactgagatttctgtggtctcaacttcgctttggtataatttctggcactcaccagcctctatcattatgactttccccccagtgtattatttctctaataggtttccttttcacgttcttttagcacagactggcactttaccctctcagtttggaagttagcccctctcctctgttacttttcccttcacccaactacagctgtgatctagaacattcatagtcatatttctgctactactaccttcatttatcaagactttttatgagaataggtaaaccaagcaataacttcctaggactgaatcaccaccccagaagagcgagaggctcctttcatatgcctgaggccacaccccttaacctgttctgacaaaatagtggctggcccatgtaccagctccattcagaaattcaggaagagaaaagacagccctgttgtcacacaaaccggtgtgggggagggtggagcctggtctgcacggcagtcctggtggcccctgtggaggacaggcagggctggcagcatagcctttgttgccacacaaccggaatttgctcccccaggactgtgggagccagtgtcccagctgaaatctttttagtgtgtggctctgaatggcactcacattccattttggctcacatgaaactaactgaagccctttgttcaagcttcaggctcttaggcatggaaatgagaatgtgactgtggctgtcttacaggaaaattcttgtttgtccctgaatgagagcacagaggcattgaattcacagagctgcaaacttgcctgataaatgagggagtggcagtttatagataggtcatcttttttccttcctccaggtgtccttgcctttcttcccaaagtcattcatttctgatgagtatatgaatccccctcttgctagtaaggttctatttgggctaaaacaaggctgaatttttaaagagtatttgaatatattttagaatcaaattgaggctataaattgcatcaatctggacaattccattgcaggaataatatgttaaaaaccaatggggagaagcacccacatctctcctgtagcactccgtgtctcataagcaatttgaagacacttacaagtaactgattccagtcaaattaggattaactgactcaaaaaatggtgtcaagtttctttaatgtttttatgttagaagtgagtttaacagacttgaagaaaactgttatcttttcctgctgtgagtttacacaaatgattccagagcagaatgaaagcagaaagctgttggttacaatattcttttaacctctctgcagcattttacacttactgggaaccttatgattcaccgtaagagtggaaatatacctgagttcgtgtcctaatggtctctaattcacattggatcgtgggcaaatcacctcacctctctgagcctgttccctcctcttagaccatctctaagaccacttcatctatttacacatcatttgcttgaacattgctgaacatctgcgtgaacttggcctctccagcccttgcaggtggaaacagctgtgtcaaggctcaaggctcacgctgaggggacttggagggagggggcttctgcattaagctttcctggtgaagacccttgatcttgtccaaagccctgtgtctttgactggcttctcttcagagtccccgttgtcatcgtaagacccttgctgtttggagggtggtcttgtgactgtggcagctgctggccgctggaatgaggagcctatctccatcctccagtgtgactcaggcagagcattgagaattcccagggcagaaatccttcctgctcaggctttcattctaaaactacagtcttcattaaagctgaactttctgggtagctgagcttatatgcccggcatctgaatgagagctctctttgtaactgtgtgacttgagatctagtttgccagctcctgggaaacaatacatgtgttcttgtttgtgtttgctcagcaagcagatgtctgagatgtaagaagcttttcttttcctgtggcattgattctgacttagagctgaagtaaaagatcactgaaacatcacgtcaagttgaagtcactcataggtctttgtcctttaggcaggacaggagagtcattaagaagcatttcactgtagcattctatcacaatatcatctggaattgttttctttgcccagaaagccttaacttgcctctagagaatccctggtattacaacgatattgcggcattagaattccaactcttctgctgtggaagtttgaagcgaagctgcagcaaaaccagagaatttcctcaagtggcctgtaggctccttgttatcttatgcccccacccctccctcaacaatatgagtgatccagaactggcccaaacacctcagctctggtccctttttgcccttcttggccttactctgttgttcaaagccactttggattgcttggatgcttcgaacagccatgaaaagtagcctgcctgtggcatttagaggccaagcaattgacagaaagggtttcttctacctctgttatctaagcagagggaagtaaacctctcaccgccccccacccctcactgcccccgattaccctagaattgctttcgccaaattgtagttgaagctaaggaaggggaatctggcccctgctgggagagggaactggaatgccacacaaggcaaggcctgcttccttccttcccctctgctgctgctgcctcggaacgctgcagcccaggcttcctcccacagtggcccttggaagcaggccgcagagtagacagctgctccttttggaagagtcagtcccctgtgttttctgaactgtttttcctagcatgtatgtgggtagagctttcatgcatctctagtaataataagctgaaattagttttttttttaattctccaatttaaaacttttaattaaaaagtaaattttaatgtcgaaaatgcaaacttggggagggcagaaagatcacacacaaggctgtcacttcatacttgcaggattgcacagcagccgggcagaggcgctcctcacttcccagatggggcggcgggcagcagagacgcacctcacttcctagacagtgcggcagccaggcacaggcacacctcacttcccagacagttgggcggccaggcaagcgctcctcacttcccagatggggcggctcccgggaagcggggctcctcacttcccagacagggtggccaggcagaggtgctcctcacttcccagaacaattctttatgaatttgataaaggactgaagtgcaactgaaagctgctagtgatgatctggtaatatacaatttgtccagtagccagtttgtttttattgtgttttctaaccataagagatcattaaaggcaaagcctgtatgacgctgtacacacacaaaaaaatggtcaccgcaggccatactaccaatgaaatggtaggtaaacaaatcttctggtcaagagaaaaaaaaaagaaatagcactctgcatgctttgctctacaagacgaatttccctagaaagaatccaatgaaggccgggcatagtggctcactcctgtaatcccagcactttggaggccgaggcgggtagatcacctgaggttaggagttcaagaccagcctggccaacatggtgaaaccccttctctactaaaaatgcaaaaattagctgggtgtggtggcgggcgcctgtaatcccagctactcgggaggctgaggtgggagaattgcttgaacccaggagacggaggttgcagtgagccgagatcacgcctctgcactccagcctgggcaacaagagtgagactccgtctccaaaaaaagaaaaggaatccagtgaaaatggctgcaattacaacaagaagtgaaggaagaagactggtgacatctctgaaggatgcagttgaggttgatccaggtttatccgaatatgctacctttctgagccttaaaccttcatctctcaggtgttgatttgcttctgatagcttcatcatttctccctgaagtcttttacactcttctgttagtttccttgtttcagtatcatgaagtgaagcactgtgtggttgtggcgtgggcccgtcttgcttagatgcattcagtgggacagctttgctgggttccatgtcattcaatttatcattttcattggggatctccatttggaatccattaattcatgaggttttgcctcattccacacagcttccatatctgaagtgtttagtggagcaaaaattgtaccataaacttgtgtttactcttttcattcggatcatagtcaaagggctgtagcattactgaaacagtcacagttgaccctgggtcaataattccactgttgggcctcacacagtaccggtgaggcacggtagtcttcactttgaaacacacttttctatccgatggatttcgcaatttaagatttgtagtgactacatctgtgaaggggcctttgaatttgaggtctatgggcgggtcgaggaccaggatctgctcgtgcttcgccgtggccccggaggcagacgccattggagagacagcgcagagcagggggcggcttgctcgctgggggcgggggacgatggcgagaggggagggggagcgagttcgcatctctccttttcctggttagactctgttcaaccacattcttatgttggcagatctgcttccagattgatttttagagcaccatcactttcacattcctgattctgattttgttttgttttgtttgggttttctgaaacttaaaatgctgccccgaaaatactatatttttgagtttgtgttctgaaagcctccgtgctgctggatctttggggggaaatacaggatccttcagcactgaggtgtttaagatttgcaactagcaatgcaattttttctaaatatggggatatttacctttattaagaaattatactaaacattgatgtccttgatcattttatgttctcatattacttttgattctactatgattgtgtggtggtgaacaaagatcattacaaacaaaaactgtaattttgttatatttgattcaatggaatttacctaaaaaataaagactaaaaatgtgg

SEQ ID NO: 1071 - protein, 425 aa, Homo sapiens; identical to SEQ ID NO: 1069

SEQ ID NO: 1072 - DNA, 6265 bp, Homo sapiens
cacaccacatttttagtctttattttttaggtaaattccattgaatcaaatataacaaaattacagtttttgtttgtaatgatctttgttcaccaccacacaatcatagtagaatcaaaagtaatatgagaacataaaatgatcaaggacatcaatgtttagtataatttcttaataaaggtaaatatccccatatttagaaaaaattgcattgctagttgcaaatcttaaacacctcagtgctgaaggatcctgtatttccccccaaagatccagcagcacggaggctttcagaacacaaactcaaaaatatagtattttcggggcagcattttaagtttcagaaaacccaaacaaaacaaaacaaaatcagaatcaggaatgtgaaagtgatggtgctctaaaaatcaatctggaagcagatctgccaacataagaatgtggttgaacagagtctaaccaggaaaaggagagatgcgaactcgctccccctcccctctcgccatcgtcccccgcccccagcgagcaagccgccccctgctctgcgctgtctctccaatggcgtctgcctccggggccacggcgaagcacgagcagatcctggtcctcgacccgcccatagacctcaaattcaaaggccccttcacagatgtagtcactacaaatcttaaattgcgaaatccatcggatagaaaagtgtgtttcaaagtgaagactaccgtgcctcaccggtactgtgtgaggcccaacagtggaattattgacccagggtcaactgtgactgtttcagtaatgctacagccctttgactatgatccgaatgaaaagagtaaacacaagtttatggtacaatttttgctccactaaacacttcagatatggaagctgtgtggaatgaggcaaaacctcatgaattaatggattccaaatggagatccccaatgaaaatgataaattgaatgacatggaacccagcaaagctgtcccactgaatgcatctaagcaagacgggcccacgccacaaccacacagtgcttcacttcatgatactgaaacaaggaaactaacagaagagtgtaaaagacttcagggagaaatgatgaagctatcagaagcaaatcaacacctgagagatgaaggtttaaggctcagaaaggtagcatattcggataaacctggatcaacctcaactgcatccttcagagatgtcaccagtcttcttccttcacttcttgttgtaattgcagccatcttcattggattctttctagggaaattcgtcttgtagagcaaagcatgcagagtgctatttcttttttttttctcttgaccagaagatttgtttacctaccatttcattggtagtatggcctgcggtgaccatttttttgtgtgtgtacagcgtcatacaggctttgcctttaatgatctcttatggttagaaaacacaataaaaacaaactggctactggacaaattgtatattaccagatcatcactagcagctttcagttgcacttcagtcctttatcaaattcataaagaattgttctgggaagtgaggagcacctctgcctggccaccctgtctgggaagtgaggagccccgcttcccgggagccgccccatctgggaagtgaggagcgcttgcctggccgcccaactgtctgggaagtgaggtgtgcctgtgcctggctgccgcactgtctaggaagtgaggtgcgtctctgctgcccgccgccccatctgggaagtgaggagcgcctctgcccggctgctgtgcaatcctgcaagtatgaagtgacagccttgtgtgtgatctttctgccctccccaagtttgcattttcgacattaaaatttactttttaattaaaagttttaaattggagaattaaaaaaaaaactaatttcagcttattattactagagatgcatgaaagctctacccacatacatgctaggaaaaacagttcagaaaacacaggggactgactcttccaaaaggagcagctgtctactctgcggcctgcttccaagggccactgtgggaggaagcctgggctgcagcgttccgaggcagcagcagcagaggggaaggaaggaagcaggccttgccttgtgtggcattccagttccctctcccagcaggggccagattccccttccttagcttcaactacaatttggcgaaagcaattctagggtaatcgggggcagtgaggggtggggggcggtgagaggtttacttccctctgcttagataacagaggtagaagaaaccctttctgtcaattgcttggcctctaaatgccacaggcaggctacttttcatggctgttcgaagcatccaagcaatccaaagtggctttgaacaacagagtaaggccaagaagggcaaaaagggaccagagctgaggtgtttgggccagttctggatcactcatattgttgagggaggggtgggggcataagataacaaggagcctacaggccacttgaggaaattctctggttttgctgcagcttcgcttcaaacttccacagcagaagagttggaattctaatgccgcaatatcgttgtaataccagggattctctagaggcaagttaaggctttctgggcaaagaaaacaattccagatgatattgtgatagaatgctacagtgaaatgcttcttaatgactctcctgtcctgcctaaaggacaaagacctatgagtgacttcaacttgacgtgatgtttcagtgatcttttacttcagctctaagtcagaatcaatgccacaggaaaagaaaagcttcttacatctcagacatctgcttgctgagcaaacacaaacaagaacacatgtattgtttcccaggagctggcaaactagatctcaagtcacacagttacaaagagagctctcattcagatgccgggcatataagctcagctacccagaaagttcagctttaatgaagactgtagttttagaatgaaagcctgagcaggaaggatttctgccctgggaattctcaatgctctgcctgagtcacactggaggatggagataggctcctcattccagcggccagcagctgccacagtcacaagaccaccctccaaacagcaagggtcttacgatgacaacggggactctgaagagaagccagtcaaagacacagggctttggacaagatcaagggtcttcaccaggaaagcttaatgcagaagccccctccctccaagtcccctcagcgtgagccttgagccttgacacagctgtttccacctgcaagggctggagaggccaagttcacgcagatgttcagcaatgttcaagcaaatgatgtgtaaatagatgaagtggtcttagagatggtctaagaggagggaacaggctcagagaggtgaggtgatttgcccacgatccaatgtgaattagagaccattaggacacgaactcaggtatatttccactcttacggtgaatcataaggttcccagtaagtgtaaaatgctgcagagaggttaaaagaatattgtaaccaacagctttctgctttcattctgctctggaatcatttgtgtaaactcacagcaggaaaagataacagttttcttcaagtctgttaaactcacttctaacataaaaacattaaagaaacttgacaccattttttgagtcagttaatcctaatttgactggaatcagttacttgtaagtgtcttcaaattgcttatgagacacggagtgctacaggagagatgtgggtgcttctccccattggtttttaacatattattcctgcaatggaattgtccagattgatgcaatttatagcctcaatttgattctaaaatatattcaaatactctttaaaaattcagccttgttttagcccaaatagaaccttactagcaagagggggattcatatactcatcagaaatgaatgactttgggaagaaaggcaaggacacctggaggaaggaaaaaagatgacctatctataaactgccactccctcatttatcaggcaagtttgcagctctgtgaattcaatgcctctgtgctctcattcagggacaaacaagaattttcctgtaagacagccacagtcacattctcatttccatgcctaagagcctgaagcttgaacaaagggcttcagttagtttcatgtgagccaaaatggaatgtgagtgccattcagagccacacactaaaaagatttcagctgggacactggctcccacagtcctgggggagcaaattccggttgtgtggcaacaaaggctatgctgccagccctgcctgtcctccacaggggccaccaggactgccgtgcagaccaggctccaccctcccccacaccggtttgtgtgacaacagggctgtcttttctcttcctgaatttctgaatggagctggtacatgggccagccactattttgtcagaacaggttaaggggtgtggcctcaggcatatgaaaggagcctctcgctcttctggggtggtgattcagtcctaggaagttattgcttggtttacctattctcataaaaagtcttgataaatgaaggtagtagtagcagaaatatgactatgaatgttctagatcacagctgtagttgggtgaagggaaaagtaacagaggagaggggctaacttccaaactgagagggtaaagtgccagtctgtgctaaaagaacgtgaaaaggaaacctattagagaaataatacactggggggaaagtcataatgatagaggctggtgagtgccagaaattataccaaagcgaagttgagaccacagaaatctcagtctctgagataagggctgcttttgatgtcattcggatgatttggtgattgtcagaaaacaacttcttcaggttacagacctggacccatgcccacgggtcccgtcacagtcacttggacccgtgcccaaaccacacccacctgtggccctgagggttggcactcaggcgcccaggtggctcctttgatccctgaaacatccatgcagacccactacttatattccagtctgtcctggagtcaaaggagatgaaggaggaaaaatatctttttaaagtatccaggcaattttactcatagttctgtttagttccagatagcaacagctgattgttcaaagtgcagggtttttggatattcaagtaccacaggatcggagaaaaggagtacttgaaacctagagttgcgttttcacttgagaagacacactttggaaacacctatccaacagactacaaatataggctattaaattaaaaatctggtttcaaaataatacccacttaggttggaaatatctttctccaaactcagatccaacttttgaattgtttggtatcaaaggcaaagttagagggacttgggtttaaaaactaaaattacaagtgagtgcttaaaaaaaaaacaactcaaaacatctttttatcaaataagggacacacacacacaaaaggcaaacgatgatatctacatgcttagactgggagagcagctcccaggctcccctggagggatgttctctcaaacctcagtaaactgagtttgtcattgaactttgaacctggtagtgagctcagcaatctacctggtccaagtcccccattttagaggtgaagaaattgaagtccacagcgactttgtccagggtgaaaagcagagccagggcacagcccagatgctcagcccacccagagcccttctgagacatcacactgtggtcacacgacggcagctccatagccggccttgctgctctggagaccgtgggagctagaggacacccctgattatgaatttcaataaaacgagctgcaaagatgtttccaatttaagggcgctgttgaacagcatttccaaaatttgcttggtgatgagaatcatctggggcacttgtgaaaaattaaaatccccaggctccttcccagacccagtgaatcagcctctccgaggggagggacctgggaggctgaatttttaacaagtgcctcacgtaactctcagcagcagcaaagcgtagggaaatggtctcaggagacagggcgaaaacttggcttgtgactcaaaggaatttcctttgccgtttaagaagccacactctggcctgggaagcctgggttctcaggctcccaagcggagctgtgtcttcagcattggcctggaagggtgagctctttttaaggtctatgtaaggacacatacaaccaccacaaaatgacatacatccttcact

SEQ ID NO: 1073 - DNA, 1752 bp, Homo sapiens
gagcccgatttaacggaaactgtgggcggtgagaagttccttatgacacactaatcccaacctgctgaccggaccacgcctccagcggagggaacctctagagctccaggacattcaggtaccaggtagccccaaggaggagctgccgacctggcagggaacaaccaagactggggttaaatctcacagcctgcaagtggaagagaagaacttgaacccaggtccaacttttgcgccacagcaggctgcctcttggtcctgacaggaagtcacaacttggccctgacttcctatcctagggaaggggccggctggagaggccaggacagagaaagcagatcccttctttttccaaggactctgtgtcttccataggcaacatgtcagaaggggtgggcacgttccgcatggtacctgaagaggaacaggagctccgtgcccaactggagcagctcacaaccaaggaccatggacctgtctttggcccgtgcagccagctgccccgccacaccttgcagaaggccaaggatgagctgaacgagagagaggagacccgggaggaggcagtgcgagagctgcaggagatggtgcaggcgcaggcggcctcgggggaggagctggcggtggccgtggcggagagggtgcaagagaaggacagcggcttcttcctgcgcttcatccgcgcacggaagttcaacgtgggccgtgcctatgagctgctcagaggctatgtgaatttccggctgcagtaccctgagctctttgacagcctgtccccagaggctgtccgctgcaccattgaagctggctaccctggtgtcctctctagtcgggacaagtatggccgagtggtcatgctcttcaacattgagaactggcaaagtcaagaaatcacctttgatgagatcttgcaggcatattgcttcatcctggagaagctgctggagaatgaggaaactcaaatcaatggcttctgcatcattgagaacttcaagggctttaccatgcagcaggctgctagtctccggacttcagatctcaggaagatggtggacatgctccaggattccttcccagcccggttcaaagccatccacttcatccaccagccatggtacttcaccacgacctacaatgtggtcaagcccttcttgaagagcaagctgcttgagagggtctttgtccacggggatgacctttctggtttctaccaggagatcgatgagaacatcctgccctctgacttcgggggcacgctgcccaagtatgatggcaaggccgttgctgagcagctctttggcccccaggcccaagctgagaacacagccttctgaaaacatctcctgccagctgaactgtagttagaatctctgggcctctcctcaactgtcctggacccaaggctaggaaagggctgcttgagatgactgtggtccccccttagactccctaagcccgagtgagctcaggtgtcaccctgttctcaagttgggggatgggtaataaaggagggggaattcccttgaacaagaagaactggggatagttatatttccacctgcccttgaagctttaagacagtgatttttgtgtaaggttgtatttcaaagactcgaattcattttctcagtcatttcctttgtaacagagttttacgacttagagtctgtgaaaacaggcaaggagcccgggttaaaatatccccctattcgcccccaaaatgcaataaaagaagataaaagagagaggata

SEQ ID NO: 1074 - protein, 317 aa, Homo sapiens
MSEGVGTFRMVPEEEQELRAQLEQLTTKDHGPVFGPCSQLPRHTLQKAKDELNEREETREEAVRELQEMVQAQAASGEELAVAVAERVQEKDSGFFLRFIRARKFNVGRAYELLRGYVNFRLQYPELFDSLSPEAVRCTIEAGYPGVLSSRDKYGRVVMLFNIENWQSQEITFDEILQAYCFILEKLLENEETQINGFCIIENFKGFTMQQAASLRTSDLRKMVDMLQDSFPARFKAIHFIHQPWYFTTTYNVVKPFLKSKLLERVFVHGDDLSGFYQEIDENILPSDFGGTLPKYDGKAVAEQLFGPQAQAENTAF

SEQ ID NO: 1075 - DNA, 4569 bp, Homo sapiens
tcttgttgttacgggtaacggaagtgtggcggcgttgggttgagcgggctttttggaagtttgtggcggagttctgtgatatgagcaacaatggaccagaagattttatctctagcagcagaaaaaacagcagacaaactgcaagaatttcttcaaaccctgagagaaggtgatttgactaatctccttcagaatcaagcagtgaaaggaaaagttgctggagcactcctgagagccatcttcaaaggttccccctgctctgaggaagctggaacacttaggagacgtaagatatacacttgttgtatccagttggtggaatcgggggatttgcagaaagaaatagcgtctgagatcataggattactgatgctggaggctcaccattttccaggaccattattggttgaattagccaatgagtttattagtgctgtcagagaaggcagcctagtgaatggaaaatctttggagttactacctatcattctcactgccctggctacgaaaaaggaaaatctggcttatggaaaaggtgtactgagtggggaagaatgtaagaaacagttgattaacaccctgtgttctggcaggtgggatcagcaatatgtaatccaactcacctccatgttcaaggatgtccctctgactgcagaagaggtggaatttgtggtggaaaaagcattgagcatgttctccaagatgaatcttcaagaaataccacctttggtctatcagcttctggttctctcctccaagggaagcagaaagagtgttttggaaggaatcatagccttcttcagtgcactagataagcagcacaatgaggaacagagtggtgacgagctattggatgttgtcactgtgccatcaggtgaacttcgtcatgtggaaggcaccattattctacacattgtgtttgccatcaaattggactatgaactaggcagagaactcgtgaaacacttaaaggtaggacagcaaggagattccaataataacttaagtcccttcagcattgctcttcttctgtctgtaacaagaatacaaagatttcaggaccaggtgcttgatcttttaaagacttcggttgtaaagagctttaaggatcttcaactcctccaaggctcaaaatttcttcagaatctagttcctcatagatcttatgtttcaaccatgatcttggaagtagtgaagaatagcgttcatagctgggaccatgttactcagggcctcgtagaacttggtttcattttgatggattcatatgggccaaagaaggttcttgatggaaaaactattgaaaccagcccaagtctttctagaatgccaaaccagcatgcatgtaagctcggagctaatatcctgttggaaacttttaagatccatgagatgatcagacaagaaattttggagcaggtcctcaacagggttgttaccagagcatcttctcccatcagtcatttcttagacctgctttcaaatatcgtcatgtatgcacccttagttcttcaaagttgttcttctaaagtcacagaagcttttgactatttgtcctttctgccccttcagactgtacaaaggctgcttaaggcagtgcagccccttctcaaagtcagcatgtcaatgagagactgcttgatacttgtccttcggaaagctatgtttgccaaccagcttgatgcccgaaaatctgcagttgctgggtttttgctgctcctgaagaactttaaagttttaggcagcctgtcatcctctcagtgcagtcagtctctcagtgtcagtcaggttcatgtggatgttcacagccattacaattctgtcgccaatgaaactttttgccttgagatcatggatagtttgaggagatgcttaagccagcaagctgatgttcgactcatgctttatgaggggttttatgatgttcttcgaaggaactctcagctggctaattcagtcatgcaaactctgctctcacagttaaaacagttctatgagccaaaacctgatctgctgcctcctctgaaattagaagcttgtattctgacccaaggagataagatctctctacaagaaccactggattatctgctgtgttgtattcagcattgtttggcctggtataagaatacagtcatacccttacagcagggagaggaggaagaggaggaggaagaggcattctacgaagacctagatgatatattggagtccattactaatagaatgattaagagtgagctggaagactttgaactggataaatcagcagatttttctcagagcaccagtattggcataaaaaataatatctgtgcttttcttgtgatgggagtttgtgaggttttaatagaatacaatttctccataagtagtttcagtaagaataggtttgaggacattctgagcttatttatgtgttacaaaaaactctctgacattcttaatgaaaaagcgggtaaagccaaaactaaaatggccaacaagacaagtgatagtcttttgtccatgaaatttgtgtccagtcttctcactgctcttttcagagtcttgctatggagatacacttcaattcctacttcagtggaagagtcgggaaagaaagagaaaggaaagagcatctcactgctgtgcttggagggtttacagaaaatattcagtgctgtgcaacagttctatcagcccaagattcagcagtttctcagagctctggatgtcacagataaggaaggagaagagagagaagatgcagatgtcagtgtcactcagagaacagcattccagatccggcaatttcagaggtccttgttgaatttacttagcagtcaagaggaagattttaatagcaaagaagccctcctgctagtcacggttcttaccagtttgtccaagttactggagccctcctctcctcagtttgtgcagatgttatcctggacatcaaagatttgcaaggaaaacagccgggaggatgccttgttttgcaagagcttgatgaacttgctcttcagcctgcatgtttcgtataagagtcctgtcattctgctgcgtgacttgtcccaggatatccacgggcatctgggagatatagaccaggatgtagaggtggagaaaacaaaccactttgcaatagtgaatttgagaacggctgcccccactgtctgtttacttgttctgagtcaggccgagaaggttctagaagaagtggactggctaatcaccaagcttaagggacaagtgagccaagaaaccttatcagaagaggcctcttctcaggcaaccctaccaaatcagcctgttgagaaagctatcatcatgcaactgggaactctgcttacatttttccacgagctggtgcagacagctctgccatcaggcagctgtgtggacaccttgttaaaggacttgtgcaaaatgtacaccacacttacagcccttgtcagatattatctccaggtgtgtcagagctccggaggaattccaaaaaatatggaaaagctggtgaagctgtctggttctcatctgacccccctgtgttattctttcatttcttacgtacagaataagagtaagagcctgaactatacgggagagaaaaaggagaaacctgctgccgttgccacagccatggccagagttcttcgggaaaccaagccaatccctaacctcatctttgccatagaacagtatgaaaaatttctcatccacctttctaagaagtccaaggtgaacctgatgcagcacatgaagctcagcacctcacgagacttcaagatcaaaggaaacatcctagacatggttcttcgagaggatggtgaagatgaaaatgaagagggcactgcatcagagcatgggggacagaacaaagaaccagccaagaagaaaaggaaaaaataaatgaaatgcctgagttaatgtgaactttggggcttctgcttcatttttacccaacaagcaacaatgccccttgtcctgtagtccacaccgatgttggcatcttggttctgaacccactgaattcaactgcaccttcagttagaaggaatcttcttggcaggtcctgctactgaaaaatggctggccttaggcaagcccttttgcaaaaagcacagctgaaagcctgagtttgggagcctgcaccaccccgatgaagctccacgggagcaaatacagagcctccaggcagtgctatggtccaggctggcttcgtttttccaaggagcctttggtgagttcaattatctggtaaatatccagcgcttcacctgaaagatagtgcaaattggttaggatgccacctcaagaactgtaactgagagctcagaagtgagcaaaggagcttaatgctaaggtcaaaaggagagtgaaaggttgagaacaattgccacgaacggtaatgttacatgttaggagggtctgttttctttttatataagtgtgtcttagatatattttaaatagaaaataagctttctgatttacttgtttggtatttaaagcacagtttgtttttctgtcacctatagagtgcaagaatgcactctatagaataaattatctttaaacatt

SEQ ID NO: 1076 - protein, 1268 aa, Homo sapiens
MDQKILSLAAEKTADKLQEFLQTLREGDLTNLLQNQAVKGKVAGALLRAIFKGSPCSEEAGTLRRRKIYTCCIQLVESGDLQKEIASEIIGLLMLEAHHFPGPLLVELANEFISAVREGSLVNGKSLELLPIILTALATKKENLAYGKGVLSGEECKKQLINTLCSGRWDQQYVIQLTSMFKDVPLTAEEVEFVVEKALSMFSKMNLQEIPPLVYQLLVLSSKGSRKSVLEGIIAFFSALDKQHNEEQSGDELLDVVTVPSGELRHVEGTIILHIVFAIKLDYELGRELVKHLKVGQQGDSNNNLSPFSIALLLSVTRIQRFQDQVLDLLKTSVVKSFKDLQLLQGSKFLQNLVPHRSYVSTMILEVVKNSVHSWDHVTQGLVELGFILMDSYGPKKVLDGKTIETSPSLSRMPNQHACKLGANILLETFKIHEMIRQEILEQVLNRVVTRASSPISHFLDLLSNIVMYAPLVLQSCSSKVTEAFDYLSFLPLQTVQRLLKAVQPLLKVSMSMRDCLILVLRKAMFANQLDARKSAVAGFLLLLKNFKVLGSLSSSQCSQSLSVSQVHVDVHSHYNSVANETFCLEIMDSLRRCLSQQADVRLMLYEGFYDVLRRNSQLANSVMQTLLSQLKQFYEPKPDLLPPLKLEACILTQGDKISLQEPLDYLLCCIQHCLAWYKNTVIPLQQGEEEEEEEEAFYEDLDDILESITNRMIKSELEDFELDKSADFSQSTSIGIKNNICAFLVMGVCEVLIEYNFSISSFSKNRFEDILSLFMCYKKLSDILNEKAGKAKTKMANKTSDSLLSMKFVSSLLTALFRVLLWRYTSIPTSVEESGKKEKGKSISLLCLEGLQKIFSAVQQFYQPKIQQFLRALDVTDKEGEEREDADVSVTQRTAFQIRQFQRSLLNLLSSQEEDFNSKEALLLVTVLTSLSKLLEPSSPQFVQMLSWTSKICKENSREDALFCKSLMNLLFSLHVSYKSPVILLRDLSQDIHGHLGDIDQDVEVEKTNHFAIVNLRTAAPTVCLLVLSQAEKVLEEVDWLITKLKGQVSQETLSEEASSQATLPNQPVEKAIIMQLGTLLTFFHELVQTALPSGSCVDTLLKDLCKMYTTLTALVRYYLQVCQSSGGIPKNMEKLVKLSGSHLTPLCYSFISYVQNKSKSLNYTGEKKEKPAAVATAMARVLRETKPIPNLIFAIEQYEKFLIHLSKKSKVNLMQHMKLSTSRDFKIKGNILDMVLREDGEDENEEGTASEHGGQNKEPAKKKRKK

SEQ ID NO: 1077 - DNA, 4465 bp, Homo sapiens
gcggaccggccgggtggaggccacacgctaccccgaggctgcgtaggccgcgcgaagggggacgccgtgccgtgggcctggggtcgggggagcagcagaccgggaagcaccgtgaggaccgaggatttggggtggaaggcaggcatggtcaaacccatttcactgacaggagagcagagacaggacgtgtctctctccacgtcttccagccagtaaaagaagccaagctggagcccaaagccaggtgttctgactcccagcgtgggggtccctgcaccaaccatgagccgcctgctctggaggaaggtggccggcgccaccgtcgggccagggccggttccagctccggggcgctgggtctccagctccgtccccgcgtccgaccccagcgacgggcagcggcggcggcagcagcagcagcagcagcagcagcagcagcaacagcagcctcagcagccgcaagtgctatcctcggagggcgggcagctgcggcacaacccattggacatccagatgctctcgagagggctgcacgagcaaatcttcgggcaaggaggggagatgcctggcgaggccgcggtgcgccgcagcgtcgagcacctgcagaagcacgggctctgggggcagccagccgtgcccttgcccgacgtggagctgcgcctgccgcccctctacggggacaacctggaccagcacttccgcctcctggcccagaagcagagcctgccctacctggaggcggccaacttgctgttgcaggcccagctgcccccgaagcccccggcttgggcctgggcggagggctggacccggtacggccccgagggggaggccgtacccgtggccatccccgaggagcgggccctggtgttcgacgtggaggtctgcttggcagagggaacttgccccacattggcggtggccatatccccctcggcctggtattcctggtgcagccagcggctggtggaagagcgttactcttggaccagccagctgtcgccggctgacctcatccccctggaggtccctactggtgccagcagccccacccagagagactggcaggagcagttagtggtggggcacaatgtttcctttgaccgagctcatatcagggagcagtacctgatccagggttcccgcatgcgtttcctggacaccatgagcatgcacatggccatctcagggctaagcagcttccagcgcagtctgtggatagcagccaagcagggcaaacacaaggtccagccccccacaaagcaaggccagaagtcccagaggaaagccagaagaggcccagcgatctcatcctgggactggctggacatcagcagtgtcaacagtctggcagaggtgcacagactttatgtaggggggcctcccttagagaaggagcctcgagaactgtttgtgaagggcaccatgaaggacattcgtgagaacttccaggacctgatgcagtactgtgcccaggacgtgtgggccacccatgaggttttccagcagcagctaccgctcttcttggagaggtgtccccacccagtgactctggccggcatgctggagatgggtgtctcctacctgcctgtcaaccagaactgggagcgttacctggcagaggcacagggcacttatgaggagctccagcgggagatgaagaagtcgttgatggatctggccaatgatgcctgccagctgctctcaggagagaggtacaaagaagacccctggctctgggacctggagtgggacctgcaagaatttaagcagaagaaagctaagaaggtgaagaaggaaccagccacagccagcaagttgcccatcgagggggctggggcccctggtgatcccatggatcaggaagacctcggcccctgcagtgaggaggaggagtttcaacaagatgtcatggcccgcgcctgcttgcagaagctgaaggggaccacagagctcctgcccaagcggccccagcaccttcctggacaccctggatggtaccggaagctctgcccccggctagacgaccctgcatggaccccgggccccagcctcctcagcctgcagatgcgggtcacacctaaactcatggcacttacctgggatggcttccctctgcactactcagagcgtcatggctggggctacttggtgcctgggcggcgggacaacctggccaagctgccgacaggtaccaccctggagtcagctggggtggtctgcccctacagagccatcgagtccctgtacaggaagcactgtctcgaacaggggaagcagcagctgatgccccaggaggccggcctggcggaggagttcctgctcactgacaatagtgccatatggcaaacggtagaagaactggattacttagaagtggaggctgaggccaagatggagaacttgcgagctgcagtgccaggtcaacccctagctctgactgcccgtggtggccccaaggacacccagcccagctatcaccatggcaatggaccttacaacgacgtggacatccctggctgctggtttttcaagctgcctcacaaggatggtaatagctgtaatgtgggaagcccctttgccaaggacttcctgcccaagatggaggatggcaccctgcaggctggcccaggaggtgccagtgggccccgtgctctggaaatcaacaaaatgatttctttctggaggaacgcccataaacgtatcagctcccagatggtggtgtggctgcccaggtcagctctgccccgtgctgtgatcaggcaccccgactatgatgaggaaggcctctatggggccatcctgccccaagtggtgactgccggcaccatcactcgccgggctgtggagcccacatggctcaccgccagcaatgcccggcctgaccgagtaggcagtgagttgaaagccatggtgcaggccccacctggctacacccttgtgggtgctgatgtggactcccaagagctgtggattgcagctgtgcttggagacgcccactttgccggcatgcatggctgcacagcctttgggtggatgacactgcagggcaggaagagcaggggcactgatctacacagtaagacagccactactgtgggcatcagccgtgagcatgccaaaatcttcaactacggccgcatctatggtgctgggcagccctttgctgagcgcttactaatgcagtttaaccaccggctcacacagcaggaggcagctgagaaggcccagcagatgtacgctgccaccaagggcctccgctggtatcggctgtcggatgagggcgagtggctggtgagggagttgaacctcccagtggacaggactgagggtggctggatttccctgcaggatctgcgcaaggtccagagagaaactgcaaggaagtcacagtggaagaagtgggaggtggttgctgaacgggcatggaaggggggcacagagtcagaaatgttcaataagcttgagagcattgctacgtctgacataccacgtaccccggtgctgggctgctgcatcagccgagccctggagccctcggctgtccaggaagagtttatgaccagccgtgtgaattgggtggtacagagctctgctgttgactacttacacctcatgcttgtggccatgaagtggctgtttgaagagtttgccatagatgggcgcttctgcatcagcatccatgacgaggttcgctacctggtgcgggaggaggaccgctaccgcgctgccctggccttgcagatcaccaacctcttgaccaggtgcatgtttgcctacaagctgggtctgaatgacttgccccagtcagtcgcctttttcagtgcagtcgatattgaccggtgcctcaggaaggaagtgaccatggattgtaaaaccccttccaacccaactgggatggaaaggagatacgggattccccagggtgaagcgctggatatttaccagataattgaactcaccaaaggctccttggaaaaacgaagccagcctggaccatagcactgcctggaggctctgtatttgctcccgtggagcttcatcggggtggtgcaggctcccaaactcaggctttcagctgtgctttttgcaaaagggcttgcctaaggccagccatttttcagtagcaggacctgccaagaagattccttctaactgaaggtgcagttgaattcagtgggttcagaaccaagatgccaacatcggtgtggactacaggacaaggggcattgttgcttgttgggtaaaaatgaagcagaagccccaaagttcacattaactcaggcatttcatttattttttccttttcttcttggctggttctttgttctgtcccccatgctctgatgcagtgccctagaaggggaaagaattaatgctctaacgtgataaacctgctccaaggcagtggaaataaaaagaaggaaaaaaaagaaaaaaaaaaaaaaaaaaaaaaaaaaaaaat

SEQ ID NO: 1078 - protein, 1239 aa, Homo sapiens
MSRLLWRKVAGATVGPGPVPAPGRWVSSSVPASDPSDGQRRRQQQQQQQQQQQQQPQQPQVLSSEGGQLRHNPLDIQMLSRGLHEQIFGQGGEMPGEAAVRRSVEHLQKHGLWGQPAVPLPDVELRLPPLYGDNLDQHFRLLAQKQSLPYLEAANLLLQAQLPPKPPAWAWAEGWTRYGPEGEAVPVAIPEERALVFDVEVCLAEGTCPTLAVAISPSAWYSWCSQRLVEERYSWTSQLSPADLIPLEVPTGASSPTQRDWQEQLVVGHNVSFDRAHIREQYLIQGSRMRFLDTMSMHMAISGLSSFQRSLWIAAKQGKHKVQPPTKQGQKSQRKARRGPAISSWDWLDISSVNSLAEVHRLYVGGPPLEKEPRELFVKGTMKDIRENFQDLMQYCAQDVWATHEVFQQQLPLFLERCPHPVTLAGMLEMGVSYLPVNQNWERYLAEAQGTYEELQREMKKSLMDLANDACQLLSGERYKEDPWLWDLEWDLQEFKQKKAKKVKKEPATASKLPIEGAGAPGDPMDQEDLGPCSEEEEFQQDVMARACLQKLKGTTELLPKRPQHLPGHPGWYRKLCPRLDDPAWTPGPSLLSLQMRVTPKLMALTWDGFPLHYSERHGWGYLVPGRRDNLAKLPTGTTLESAGVVCPYRAIESLYRKHCLEQGKQQLMPQEAGLAEEFLLTDNSAIWQTVEELDYLEVEAEAKMENLRAAVPGQPLALTARGGPKDTQPSYHHGNGPYNDVDIPGCWFFKLPHKDGNSCNVGSPFAKDFLPKMEDGTLQAGPGGASGPRALEINKMISFWRNAHKRISSQMVVWLPRSALPRAVIRHPDYDEEGLYGAILPQVVTAGTITRRAVEPTWLTASNARPDRVGSELKAMVQAPPGYTLVGADVDSQELWIAAVLGDAHFAGMHGCTAFGWMTLQGRKSRGTDLHSKTATTVGISREHAKIFNYGRIYGAGQPFAERLLMQFNHRLTQQEAAEKAQQMYAATKGLRWYRLSDEGEWLVRELNLPVDRTEGGWISLQDLRKVQRETARKSQWKKWEVVAERAWKGGTESEMFNKLESIATSDIPRTPVLGCCISRALEPSAVQEEFMTSRVNWVVQSSAVDYLHLMLVAMKWLFEEFAIDGRFCISIHDEVRYLVREEDRYRAALALQITNLLTRCMFAYKLGLNDLPQSVAFFSAVDIDRCLRKEVTMDCKTPSNPTGMERRYGIPQGEALDIYQIIELTKGSLEKRSQPGP

SEQ ID NO: 1079 - DNA, 2032 bp, Homo sapiens
gtgcatccctgccccttctgggtacccgtaggcgctcccgggcgctggcggcggcggaggagagggagcagcgtcacgggcgcccggcccgttaaaacgctgctggctggagccacctccctccctgcagcccgcaacgggaatggagtaaagggagacccgtcgacctggccacggggatcagcgatggaattaaagcaatctttgtccacccatctggaagccgagaagcctctgaggcgctatggggcggtggaggagacggcttggaaaacggagagactggggagaaatcagctggacatcatctccatggcggagacaaccatgatgccagaggagattgagctggagatggcaaaaattcagcgtctccgggaagtcttggtccgccgggagtctgagctcaggttcatgatggatgacatccagctctgcaaggacatcatggacttgaagcaggagctgcagaacttggtcgccatcccagaaaaagaaaaaaccaaactgcagaagcagagagaggatgagctaatccagaagatccacaaactggtgcagaagagagacttcctggtggacgatgcggaggtcgagcggttaagggagcaagaagaagacaaggaaatggctgatttcctgagaatcaagttaaaacctctagacaaagtaaccaaatctccagccagctcccgggcagagaagaaagcagagcccccacctagcaagcccacggtggccaagacggggctggcactgatcaaggattgttgcggggccacccagtgcaacatcatgtagcccccacgtggggtgccctgggccatggggaccccccccccaccctcttgtctttatagcccccatttcaccggggcccaagagctctccaaggcagaaggggttgaaggcaagcccgtgactgtcaccagaggccatgggcacggcaggcgggcctggccaccctgtacagagtgtagcagtagggagtctctcaccgtcgcatggtcctccccagagcatgccgaacccaggagtctgtctcactgtttatccaaacaccaggaaaggtcctccctcaaaaaagcatatctccacttctctctagctgtatctaacccaccgtgtgaatgaactgggagaggggcatgctccccagctgtgtgtagtcgtgacttctcaacaatctagcaccatgtcggacacgttccccatccaccctcctagctctgctctcagagctaggcacatgggcacaggtcccctcccgtctgtcctctcccagcaactgtgccctggagggctccacatggcccccgtgtctctcgggcaccacccatatagcagtcccagagggcccatctgtaaagatcgagcttgtgtgtggtgtcgtggtcacatctcccgcttccccccatcctgtgtctgggcacagttcacatcaggacagcgtccattgtgctctcagtctgcctcaggtgtgtgcctggagggggcctggactggcatggatccagtgtgcagaagagccagcagggaaccggaagctctgatgtcaaggccagagcagttgagaatgggacccagagtagatgctgacctgggcactccaccattccggggcaccacagagatgccagcaggatgccactttgccagcccgacacacggacctttgtaaagaacagcaacaggcaggagaggcagcgtgtgaccagattgtgtcccgtcattgggtggcatatgttaactagctgccaaacaacttcaacccgtgtaattcatgtacatttgcaacagccagcccggtacagcctgtgtgacttctctgtatgtgtgtgtgtgtcgtgaccagcctaagtagttagcataactcaagatgctgatgtgcagtcacccatcagagaaaataaaaatggaaaccacgttcacagcattttaaaagtttttactttttttcttgattatggaagtaatccatgtacatagtaaatcattttaaaagtacaaaaagtatgaagaagtttgtctt

SEQ ID NO: 1080 - protein, 204 aa, Homo sapiens
MELKQSLSTHLEAEKPLRRYGAVEETAWKTERLGRNQLDIISMAETTMMPEEIELEMAKIQRLREVLVRRESELRFMMDDIQLCKDIMDLKQELQNLVAIPEKEKTKLQKQREDELIQKIHKLVQKRDFLVDDAEVERLREQEEDKEMADFLRIKLKPLDKVTKSPASSRAEKKAEPPPSKPTVAKTGLALIKDCCGATQCNIM

SEQ ID NO: 1081 - DNA, 7745 bp, Homo sapiens
ggaagcggaagtgaagggtgcgcttggcggcggcggcgggagctgcggagtcgggaatcaaaacaaagggcctggggggggcggggggaaggcggcggggccggaatgtgagcggaggtggagccggcggcagagggtggaagaatgaaagaaaagaaagatgaaaggatgttgaatcactttgcatggctgtatgatggaaggaaacggaactgagaactcctgcagtagaacacgtggatggcttcaacaagataatgatgctaagccatggctttggaaattctctaattgcttttctcgtcctgagcagacgctgccacatagtccccaaacgaaagagtacatggagaacaagaaagttgctgtggaactaaaggatgtaccatcaccccttcatgctggctctaagctttttccagcagtcccacttcctgatattcgttctcttcagcagcctaaaatacagctttcttctgtccccaaagtaagctgctgtgctcattgccctaatgaaccctccacttcgccaatgcgttttggtggtggtggtggcggtagcggaggtaccagtagcttgattcacccgggcgcactgttagactcgcaaagcaccaggacaatcacgtgtcaggtagggtcagggtttgctttccagtctgcatcttcactccagaatgcctcagctaggaacaatttggcaggcattgcaagtgactttcccagcatgtgtctagagagtaacctgtcttcctgcaaacacctgccctgttgtggaaaactccacttccagtcatgtcatggtaatgtgcacaagctgcatcagtttccgagtctgcagggctgcacctccgctggctatttcccctgttctgatttcacaagcggggctccagggcatttggaagagcacatttcacagtcggagctaacgcctcacttgtgcaccaactctttgcaccttaatgtggtacctccggtttgtttaaagggctcactttactgcgaagactgtctaaacaagccagcaagaaatagcataatcgatgcggctaaagtctggccaaatataccacctccaaatactcaacctgcacctcttgctgtccctctgtgtaatggctgtggaaccaaaggaacagggaaggagaccacgttgttattggcgaccagtctaggcaaagctgcttcaaaatttgggtcaccagaagttgcagtagctggacaggtgctagaaaacttaccccccattggagttttttgggatattgaaaactgctccgttccctctggccggtcagcaactgctgttgtgcaaagaatccgtgagaagttttttaaaggccacagagaagcagaattcatctgtgtatgtgacatcagtaaagaaaacaaggaagttattcaagagctgaataattgccaggtaaccgttgcccacatcaatgctactgcaaagaatgccgctgatgataaactgcggcagagtctccgcagatttgcaaatacacacactgctccagccacagtggttcttgtgtcaactgatgtcaattttgcattggaacttagtgacctgagacacaggcatggtttccacattattttggtccataaaaaccaggcctcagaagcactgctgcatcatgctaacgagctgatcagatttgaagagttcatttccgacttgccccccaggttaccactaaaaatgccacagtgccacactctgctctatgtttataacctaccagcaaataaggatggcaagagcgtcagcaacaggctcagacgcctgtccgataattgtggtgggaaagtgctgagtatcacaggctgcagtgcaattctccgcttcataaaccaagatagtgcagagcgcgctcagaagcgaatggaaaacgaagatgtctttggtaataggatcattgtgtcatttactccaaaaaatagagaactctgtgaaacaaagagttcaaatgcaattgctgataaagtgaagtctcccaaaaaacttaagaatccaaaattgtgcctcatcaaagatgcaagtgaacaatcttccagtgccaaagccacgcctggaaaagggtcacaggcaaattctggatctgctacaaaaaatacaaatgttaaaagtttacaggagctgtgccgcatggagtcaaaaactggtcatagaaacagtgagcaccagcaaggtcacctgaggctggtcgtacccactcacggtaactcaagtgctgcagtgtcgacgccgaaaaactcgggggtggcagaacccgtttacaaaaccagtcagaaaaaggagaacctcagtgcccgaagtgttaccagttctcctgtagagaaaaaagataaagaggagactgtattccaagtgagttacccgtctgcttttagcaagttagttgcatccaggcaagtcagtcctctgctcgcatctcagtcttggtcttctaggagtatgtctccaaaccttttaaacagagcatccccgcttgctttcaacattgcaaattcgagcagcgaagccgactgcccagacccatttgcaaatggtgctgatgtccaagtcagcaacatagactacagattatcccggaaggagctgcagcagctcctgcaggaagcatttgccaggcatggcaaggtgaagagtgttgagctcagcccccatacagattatcaactcaaggctgttgtgcaaatggaaaacttacaagatgcgatcggtgcagtgaatagcctccacagatacaaaattggcagcaaaaagatcctggtctcacttgccaccggggctgccagcaaatcactctctttactgagtgcagaaacaatgtctgttcttcaggatgcccctgcctgttgcctgcctctgtttaaatttacagatatctatgaaaaaaagtttggacacaagttgaatgtgtcagatctatataaattaacagacacggtcgcaatccgtgaacaaggaaacggacggctggtgtgtctcctacccagcagtcaggcccgccagagccccttggggtcttcccagtcacacgacggctcctccacgaattgcagcccaattatatttgaagagttagaatatcacgagcctgtctgcagacagcattgttccaataaggatttcagcgaacatgaatttgatccagactcttacaagattccttttgtgattctttctttgaagacatttgcgccccaggttcacagtcttctccagacccacgagggcaccgtgcctttattgagctttccagattgttacattgcagagtttggcgatctagaagtagtgcaagaaaaccaaggaggtgttcccttagaacacttcattacctgtgttccaggtgtaaacattgccactgctcagaatggcatcaaagtggttaaatggattcacaacaagcccccgcctcccaacactgacccttggcttctgcgttcgaagagtcctgtaggtaacccccagctgatccagttcagtagagaagtgattgacttgctgaaaagccagccatcttgtgtcatacccatcagtcatttcatcccatcctatcaccatcattttgcaaagcagtgccgagtgtcagactacggatactccaagctgattgagttattagaagcagtgcctcatgtattgcagattcttggaatgggctccaaacgtctgctgacccttacccacagggcccaggtgaagcgctttactcaggatttactaaaacttctcaaatcccaggccagcaaacaggtcattgtgagagaattctcacaggcttatcactggtgtttctcaaaggactgggatgtcactgaatatggtgtttgtgagttgattgacatcgtatcagagattccagacacaaccatctgcttgtcccaacaagataatgaaatggtgatttgtatccccaaaagagaacgcactcaggatgaaatagaaaggacaaaacagttctccaaggatgtcgttgatttgctgcgtcaccaaccccatttccggatgccctttaataaatttatcccttcttaccatcaccactttggccggcagtgcaaacttgcgtactatgggtttaccaaactacttgaactttttgaagccatacctgatactttacaagtattggaatgtggagaagaaaagatccttactctgacagaggtggagcggttcaaagctctagctgcccagtttgttaaactccttcggtcccaaaaagataactgccttatgatgacagatctccttacagaatatgctaaaacttttggttatacatttcgtctccaagactatgatgtcagttccatttcggctttaactcagaaactctgccatgtcgtgaaggttgccgatatagaatctggcagacagattcagctgatcaaccgaaagtctctgcgatctctcactgcccagttgctggtattgttgatgtcttgggaaggaaccacccatctttctgttgaggagctcaagagacattacgaaagtacccacaacactccccttaacccctgtgaatatggattcatgaccttgaccgaactgctgaagagcctgccatacttggttgaggttttcactaatgataagatggaagaatgtgtgaagctcacaagtctgtatttgtttgcaaagaatgtgcggtctttacttcatacttaccactaccagcagattttccttcatgagttttccatggcctataccaagtatgtcggagaaactctgcagcccaagacctacggccacagcagcgtggaggagctcttgggagcaattccacaggtggtctggataaaaggacatggtcataagagaattgtagtgttaaaaaatgacatgaaaagtcgtttgagttcactcagtctctcccctgccaatcatgaaaaccagccctcggagggcgagcgcatcctggaggtgcccgaatcgcacacagcctcggaactcaagcttggagctgacggcagtgggcccagtcacacagagcaggagcttctccgcctgaccgacgactcccccgtcgacctcctgtgtgcgcctgtcccctcgtgcctgccgtcccctcagctgagaccagaccccgttatcctccaatctgctgatctcattcagtttgaggagcgccctcaagagccttctgaaattatgattttaaaccaagaagaaaaaatggagattccaataccaggaaagagcaaaactctgacctctgactccagctcgtcctgcatctcagcagctgtccccgtgcctccctgcccctcctcggaaacctccgagtcactgctcagcaaggaccccgtggaaagcccggccaaaaagcaacccaaaaatagagtcaaattggcagccaacttttccttagcacctataaccaagctttaactcccatttggaatatagaattaggatgggaaaacactgtctgattctgcacacaaaagtgggtttcaaaaatacatccttttctgtgtcatgaaaaccccccgaagccattgacttcatcttacctgtgttctatcatgtttttcttttccattgaacacagctttgagctgaagtctttcttttcttcttcctttttctttcttttttcaattatttgaagaacttgtggcatttgttaaagaatccttaatatattttaccaaatttttagtaactattatgaaatacaatggtgttccaaaagaagaaagcactaaaaactcaactagcaggaagcggttttgcttccattgagccacgtcggtggtgtcatcctacatgtagcataatagagtctctcagcctttgcttactggtgtttccgacagtattaacccagtgcgtggcatgtctttgaagcaaagcctgtcccgctagcctgtgtgttcacacaccaaaggagaagggtaggcgaggggttcggagtgtattttcaggttggaatgtgaaggttcctggcttccatgtgacttgtaagtgtgccttgttttttatttaaactatgtctgtagttgacaaaagtggcttcatcacaaatttttttaaacgtttctactttggggttccatttaggagctttctagaaagttgaggatgtttgaagcttcccttctgtgttccagtttgatatgggttaggttaaggaaaaggagatggtctcgatgtcatggatttaaagtcagcatttggattacaacacacattattgtgtgtcgagaggcagcattggaaagagcctgattttctaaaatatgcatcaagtgcataaattacaaatcagagctgagtggggaggtgcttcagcagcagcgggatcaatacgatttccactgggaagagacaggaattctacctacacataggaaggccaaggttgatccacttaaccttgttattgtaattttaaagctggtatcggtagctgggaagctttatgtgtgtgtatgtcagctcagcatcttttaatcgtgtctgattttactctcgttacttctcgctgttggaagcatctctgggtttcttgtggcgtctggtgtggaatggccttcctctctaggtgcctgaggtgtccgctgacgggtggcctctcacccccctctagagaaacctgacatttacaatggattgtatttgtccggcaaaaaaggcggattcattcatagagcagaaagaacctgttggcgtaaggtcttccactagttagatggtttcttttggggaaatgtttatatttggtaacttctagaaagccagaaaatggactctgatttcatagcattttgataaaatgccacaaaataagggctatagagagatttttacaagtcagattttttgttccccaaatcttttaaatgaagccagtgactcccagttctcaacacatggccccagtcaagacagaacaccatggaaaaaaccctgtaagtattatggcactctccgaatcctcctgaaggcatttcctctacagacatagtgttacaggaagtgaaatgcaaatgtgcaattttttttaaaggagcttttaaacaaagtaataataattggtgttgagaacatcagttgccttattctaagatttcataaggctgagtttgcacgcttggacttcagttctgctagcatgtaaagagtggtggactttaaaaccgtaagaggtatcattacaagtcacctggaacagactcaaagaacaggttctttgggcaacagacaaagaagaatcaagttctgtgctgtcccgtgagtgtgtctgagtaccattcactggagttgctgcttaggtctgggacgtgtgtgtgactcttaacaattgctgtctgaaaatgagagagaagacttcggaagcacattgtgttcataatgtactccacaatggccagtccaattgctatctatttttttatccagaggcttaattaaatgatgtggtaaaatgatgtttgagcattaagacaatgtaattctttatttctgggtggaaagatataccggattaaatttatctgtttaaaaaaatgacaaaagttatcaccaaaaccccctttcccatcttgcactgtttgttttggattgggtttgggggaaagagatgtttttcttagttgtctactttgtttgaacacttttgttgtggttcaagtgctgttttgtgtgttgggaccaaacagttgtcaataaactttacaagcgagcatctaaaaaaaaaaaaaaaaaa

SEQ ID NO: 1082 - protein, 1742 aa, Homo sapiens
MMEGNGTENSCSRTRGWLQQDNDAKPWLWKFSNCFSRPEQTLPHSPQTKEYMENKKVAVELKDVPSPLHAGSKLFPAVPLPDIRSLQQPKIQLSSVPKVSCCAHCPNEPSTSPMRFGGGGGGSGGTSSLIHPGALLDSQSTRTITCQVGSGFAFQSASSLQNASARNNLAGIASDFPSMCLESNLSSCKHLPCCGKLHFQSCHGNVHKLHQFPSLQGCTSAGYFPCSDFTSGAPGHLEEHISQSELTPHLCTNSLHLNVVPPVCLKGSLYCEDCLNKPARNSIIDAAKVWPNIPPPNTQPAPLAVPLCNGCGTKGTGKETTLLLATSLGKAASKFGSPEVAVAGQVLENLPPIGVFWDIENCSVPSGRSATAVVQRIREKFFKGHREAEFICVCDISKENKEVIQELNNCQVTVAHINATAKNAADDKLRQSLRRFANTHTAPATVVLVSTDVNFALELSDLRHRHGFHIILVHKNQASEALLHHANELIRFEEFISDLPPRLPLKMPQCHTLLYVYNLPANKDGKSVSNRLRRLSDNCGGKVLSITGCSAILRFINQDSAERAQKRMENEDVFGNRIIVSFTPKNRELCETKSSNAIADKVKSPKKLKNPKLCLIKDASEQSSSAKATPGKGSQANSGSATKNTNVKSLQELCRMESKTGHRNSEHQQGHLRLVVPTHGNSSAAVSTPKNSGVAEPVYKTSQKKENLSARSVTSSPVEKKDKEETVFQVSYPSAFSKLVASRQVSPLLASQSWSSRSMSPNLLNRASPLAFNIANSSSEADCPDPFANGADVQVSNIDYRLSRKELQQLLQEAFARHGKVKSVELSPHTDYQLKAVVQMENLQDAIGAVNSLHRYKIGSKKILVSLATGAASKSLSLLSAETMSVLQDAPACCLPLFKFTDIYEKKFGHKLNVSDLYKLTDTVAIREQGNGRLVCLLPSSQARQSPLGSSQSHDGSSTNCSPIIFEELEYHEPVCRQHCSNKDFSEHEFDPDSYKIPFVILSLKTFAPQVHSLLQTHEGTVPLLSFPDCYIAEFGDLEVVQENQGGVPLEHFITCVPGVNIATAQNGIKVVKWIHNKPPPPNTDPWLLRSKSPVGNPQLIQFSREVIDLLKSQPSCVIPISHFIPSYHHHFAKQCRVSDYGYSKLIELLEAVPHVLQILGMGSKRLLTLTHRAQVKRFTQDLLKLLKSQASKQVIVREFSQAYHWCFSKDWDVTEYGVCELIDIVSEIPDTTICLSQQDNEMVICIPKRERTQDEIERTKQFSKDVVDLLRHQPHFRMPFNKFIPSYHHHFGRQCKLAYYGFTKLLELFEAIPDTLQVLECGEEKILTLTEVERFKALAAQFVKLLRSQKDNCLMMTDLLTEYAKTFGYTFRLQDYDVSSISALTQKLCHVVKVADIESGRQIQLINRKSLRSLTAQLLVLLMSWEGTTHLSVEELKRHYESTHNTPLNPCEYGFMTLTELLKSLPYLVEVFTNDKMEECVKLTSLYLFAKNVRSLLHTYHYQQIFLHEFSMAYTKYVGETLQPKTYGHSSVEELLGAIPQVVWIKGHGHKRIVVLKNDMKSRLSSLSLSPANHENQPSEGERILEVPESHTASELKLGADGSGPSHTEQELLRLTDDSPVDLLCAPVPSCLPSPQLRPDPVILQSADLIQFEERPQEPSEIMILNQEEKMEIPIPGKSKTLTSDSSSSCISAAVPVPPCPSSETSESLLSKDPVESPAKKQPKNRVKLAANFSLAPITKL

SEQ ID NO: 1083 - DNA, 1997 bp, Homo sapiens
agccgcctctgccgccgccgccgcgttggcctcgccgcccctgctcggacaccatgccacaaggagagtgatctcttcccctgttttcacaatggaggactccggaaagactttcagctccgaggaggaagaagctaactattggaaagatctggcgatgacctacaaacagagggcagaaaatacgcaagaggaactccgagaattccaggagggaagccgagaatatgaagctgaattggagacgcagctgcaacaaattgaaaccaggaacagagacctcctgtccgaaaataaccgccttcgcatggagctggaaaccatcaaggagaagtttgaagtgcagcactctgaaggctaccggcagatctcagccttggaggatgacctcgcgcagaccaaagccattaaagaccaattgcagaaatacatcagagagctggagcaagcaaatgacgacctggaaagagccaagcgcgccacgatcatgtctctcgaagactttgagcagcgcttgaatcaggccatcgaaagaaatgccttcctggaaagtgaacttgatgaaaaagagaatctcctggaatctgttcagagactgaaggatgaagccagagatttgcggcaggaactggccgtgcagcagaagcaggagaaacccaggacccccatgcccagctcagtggaagctgagaggacagacacagctgtgcaggccacgggctccgtgccgtccacgcccattgctcaccgaggacccagctcaagtttaaacacacctgggagcttcagacgtggcctggacgactccaccggggggacccccctcacacctgcggcccggatatcagccctcaacattgtgggagacctactgcggaaagtcggggcactggagtccaaactcgcttcctgccggaacctcgtgtacgatcagtccccaaaccgaacaggtggcccagcctctgggcggagcagcaagaacagagatggcggggagagacggccaagcagcaccagcgtgcctttgggtgataaggggttggacacgagttgccgctggttgtccaaatcaacaaccaggtcgtccagctcctgctgaagcctgttcttggtcttttccagtttatcatacgcggccgccttctcctcgtactgctgggtgaggttctcgatctccttctggaacctcttcttcccctcttccagagcttccacggtgctggcaaagtcctgcagcttcttcttcgagtcggagagctacaaggacagcgtccagggtagggtgagagggggaccatgaatggcccctgtccctggccccacagactctgagaagcgaagaccatgtctcctcgttggagaaacccaatagcaggggaagctggggggtcaagcaccatcgcaccaacactccaccgcgatctgcctgcgggggatctcagcgcagagaagttgagaggacccatgaaggaagcaaggacacggggcaggcacctggatgttgagagtggagatgtggcgctccaggttctgcttggcctccatctcctcgtccagctggtcttgcaggctgttccgctcctcctccagctggcgcagcttcgtagacacgttgagcttctgccgggtttcttcttgaagcagctcctgcaaaagggatgcaaagaggtcccagggacctgccccgaggaaggccaccccccaggtcccctggatgatgtggcaggacactcacctgggtgtcctggagctgggaactgagggacgccacgtccttggccagcttaatggccttcccctcggcctcgttaagcatccctgtgacgctctcaacttcattctaagggtgccaagagactggttagtcaaagcctctagaaggggatcctcgttgaaaggagccctttttactcaaaacacatgggctagtacttgaggtgttcactgattgagaaaatacccgtgaggtatgggactctgaaaaaaaaaaaaaaaaa

SEQ ID NO: 1084 - protein, 335 aa, Homo sapiens
MEDSGKTFSSEEEEANYWKDLAMTYKQRAENTQEELREFQEGSREYEAELETQLQQIETRNRDLLSENNRLRMELETIKEKFEVQHSEGYRQISALEDDLAQTKAIKDQLQKYIRELEQANDDLERAKRATIMSLEDFEQRLNQAIERNAFLESELDEKENLLESVQRLKDEARDLRQELAVQQKQEKPRTPMPSSVEAERTDTAVQATGSVPSTPIAHRGPSSSLNTPGSFRRGLDDSTGGTPLTPAARISALNIVGDLLRKVGALESKLASCRNLVYDQSPNRTGGPASGRSSKNRDGGERRPSSTSVPLGDKGLDTSCRWLSKSTTRSSSSC

SEQ ID NO: 1085 - DNA, 6942 bp, Homo sapiens
gggagatttggacgctccggcctgggaggtgcgtcagatccgagctcgccatccagtttcctctccactagtccccccagttggagatctgggaccaacaaggcaccatggcgcagaagggccaactcagtgacgatgagaagttcctctttgtggacaaaaacttcatcaacagcccagtggcccaggctgactgggccgccaagagactcgtctgggtcccctcggagaagcagggcttcgaggcagccagcattaaggaggagaagggggatgaggtggttgtggagctggtggagaatggcaagaaggtcacggttgggaaagatgacatccagaagatgaacccacccaagttctccaaggtggaggacatggcggagctgacgtgcctcaacgaagcctccgtgctacacaacctgagggagcggtacttctcagggctaatatatacgtactctggcctcttctgcgtggtggtcaacccctataaacacctgcccatctactcggagaagatcgtcgacatgtacaagggcaagaagaggcacgagatgccgcctcacatctacgccatcgcagacacggcctaccggagcatgcttcaagatcgggaggaccagtccattctatgcacaggcgagtctggagccgggaaaaccgaaaacaccaagaaggtcattcagtacctggccgtggtggcctcctcccacaagggcaagaaagacacaagtatcacgcaaggcccatcttttgcctacggagagctggaaaagcagcttctacaagcaaacccgattctggaggctttcggcaacgccaaaacagtgaagaacgacaactcctcacgattcggcaaattcatccgcatcaacttcgacgtcacgggttacatcgtgggagccaacattgagacctatctgctagaaaaatcacgggcaattcgccaagccagagacgagaggacattccacatcttttactacatgattgctggagccaaggagaagatgagaagtgacttgcttttggagggcttcaacaactacaccttcctctccaatggctttgtgcccatcccagcagcccaggatgatgagatgttccaggaaaccgtggaggccatggcaatcatgggtttcagcgaggaggagcagctatccatattgaaggtggtatcatcggtcctgcagcttggaaatatcgtcttcaagaaggaaagaaacacagaccaggcgtccatgccagataacacagctgctcagaaagtttgccacctcatgggaattaatgtgacagatttcaccagatccatcctcactcctcgtatcaaggttgggcgagatgtggtacagaaagctcagacaaaagaacaggctgactttgctgtagaggctttggccaaggcaacatatgagcgccttttccgctggatactcacccgcgtgaacaaagccctggacaagacccatcggcaaggggcttccttcctggggatcctggatatagctggatttgagatctttgaggtgaactccttcgagcagctgtgcatcaactacaccaacgagaagctgcagcagctcttcaaccacaccatgttcatcctggagcaggaggagtaccagcgcgagggcatcgagtggaacttcatcgactttgggctggacctacagccctgcatcgagctcatcgagcgaccgaacaaccctccaggtgtgctggccctgctggacgaggaatgctggttccccaaagccacggacaagtctttcgtggagaagctgtgcacggagcagggcagccaccccaagttccagaagcccaagcagctcaaggacaagactgagttctccatcatccattatgctgggaaggtggactataatgcgagtgcctggctgaccaagaatatggacccgctgaatgacaacgtgacttccctgctcaatgcctcctccgacaagtttgtggccgacctgtggaaggacgtggaccgcatcgtgggcctggaccagatggccaagatgacggagagctcgctgcccagcgcctccaagaccaagaagggcatgttccgcacagtggggcagctgtacaaggagcagctgggcaagctgatgaccacgctacgcaacaccacgcccaacttcgtgcgctgcatcatccccaaccacgagaagaggtccggcaagctggatgcgttcctggtgctggagcagctgcggtgcaatggggtgctggaaggcattcgcatctgccggcagggcttccccaaccggatcgtcttccaggagttccgccaacgctacgagatcctggcggcgaatgccatccccaaaggcttcatggacgggaagcaggcctgcattctcatgatcaaagccctggaacttgaccccaacttatacaggatagggcagagcaaaatcttcttccgaactggcgtcctggcccacctagaggaggagcgagatttgaagatcaccgatgtcatcatggccttccaggcgatgtgtcgtggctacttggccagaaaggcttttgccaagaggcagcagcagctgaccgccatgaaggtgattcagaggaactgcgccgcctacctcaagctgcggaactggcagtggtggaggcttttcaccaaagtgaagccactgctgcaggtgacacggcaggaggaggagatgcaggccaaggaggatgaactgcagaagaccaaggagcggcagcagaaggcagagaatgagcttaaggagctggaacagaagcactcgcagctgaccgaggagaagaacctgctacaggaacagctgcaggcagagacagagctgtatgcagaggctgaggagatgcgggtgcggctggcggccaagaagcaggagctggaggagatactgcatgagatggaggcccgcctggaggaggaggaagacaggggccagcagctacaggctgaaaggaagaagatggcccagcagatgctggaccttgaagaacagctggaggaggaggaagctgccaggcagaagctgcaacttgagaaggtcacggctgaggccaagatcaagaaactggaggatgagatcctggtcatggatgatcagaacaataaactatcaaaagaacgaaaactccttgaggagaggattagtgacttaacgacaaatcttgcagaagaggaagaaaaggccaagaatcttaccaagctgaaaaacaagcatgaatctatgatttcagaactggaagtgcggctaaagaaggaagagaagagccgacaggagctggagaagctgaaacggaagctggagggtgatgccagcgacttccacgagcagatcgctgacctccaggcgcagatcgcagagctcaagatgcagctggccaagaaggaggaggagctgcaggcggccctggccaggcttgacgatgaaatcgctcagaagaacaatgccctgaagaagatccgggagctggagggccacatctcagacctccaggaggacctggactcagagcgggccgccaggaacaaggctgaaaagcagaagcgagacctcggcgaggagctggaggccctaaagacagagctggaagacacactggacagcacagccactcagcaggagctcagggccaagagggagcaggaggtgacggtgctgaagaaggccctggatgaagagacgcggtcccatgaggctcaggtccaggagatgaggcagaaacacgcacaggcggtggaggagctcacagagcagcttgagcagttcaagagggccaaggcgaacctagacaagaataagcagacgctggagaaagagaacgcagacctggccggggagctgcgggtcctgggccaggccaagcaggaggtggaacataagaagaagaagctggaggcgcaggtgcaggagctgcagtccaagtgcagcgatggggagcgggcccgggcggagctcaatgacaaagtccacaagctgcagaatgaagttgagagcgtcacagggatgcttaacgaggccgaggggaaggccattaagctggccaaggacgtggcgtccctcagttcccagctccaggacacccaggagctgcttcaagaagaaacccggcagaagctcaacgtgtctacgaagctgcgccagctggaggaggagcggaacagcctgcaagaccagctggacgaggagatggaggccaagcagaacctggagcgccacatctccactctcaacatccagctctccgactcgaagaagaagctgcaggactttgccagcaccgtggaagctctggaagaggggaagaagaggttccagaaggagatcgagaacctcacccagcagtacgaggagaaggcggccgcttatgataaactggaaaagaccaagaacaggcttcagcaggagctggacgacctggttgttgatttggacaaccagcggcaactcgtgtccaacctggaaaagaagcagaggaaatttgatcagttgttagccgaggagaaaaacatctcttccaaatacgcggatgagagggacagagctgaggcagaagccagggagaaggaaaccaaggccctgtccctggctcgggcccttgaagaggccttggaagccaaagaggaactcgagcggaccaacaaaatgctcaaagccgaaatggaagacctggtcagctccaaggatgacgtgggcaagaacgtccatgagctggagaagtccaagcgggccctggagacccagatggaggagatgaagacgcagctggaagagctggaggacgagctgcaagccacggaggacgccaaactgcggctggaagtcaacatgcaggcgctcaagggccagttcgaaagggatctccaagcccgggacgagcagaatgaggagaagaggaggcaactgcagagacagcttcacgagtatgagacggaactggaagacgagcgaaagcaacgtgccctggcagctgcagcaaagaagaagctggaaggggacctgaaagacctggagcttcaggccgactctgccatcaaggggagggaggaagccatcaagcagctacgcaaactgcaggctcagatgaaggactttcaaagagagctggaagatgcccgtgcctccagagatgagatctttgccacagccaaagagaatgagaagaaagccaagagcttggaagcagacctcatgcagctacaagaggacctcgccgccgctgagagggctcgcaaacaagcggacctcgagaaggaggaactggcagaggagctggccagtagcctgtcgggaaggaacgcactccaggacgagaagcgccgcctggaggcccggatcgcccagctggaggaggagctggaggaggagcagggcaacatggaggccatgagcgaccgggtccgcaaagccacacagcaggccgagcagctcagcaacgagctggccacagagcgcagcacggcccagaagaatgagagtgcccggcagcagctcgagcggcagaacaaggagctccggagcaagctccacgagatggagggggccgtcaagtccaagttcaagtccaccatcgcggcgctggaggccaagattgcacagctggaggagcaggtcgagcaggaggccagagagaaacaggcggccaccaagtcgctgaagcagaaagacaagaagctgaaggaaatcttgctgcaggtggaggacgagcgcaagatggccgagcagtacaaggagcaggcagagaaaggcaatgccagggtcaagcagctcaagaggcagctggaggaggcagaggaggagtcccagcgcatcaacgccaaccgcaggaagctgcagcgggagctggatgaggccacggagagcaacgaggccatgggccgcgaggtgaacgcactcaagagcaagctcagagggccccccccacaggaaacttcgcagtgatgcaccaggcgaggaaacgagacctctttcgttccttctagaaggtctggaggacgtagagttattgaaaatgcagatggttctgaggaggaaacggacactcgagacgcagacttcaatggaaccaaggccagtgaataagcaactttctacagttttgcaccacggcaagaaaaccaaaaaccaaaacaaacaaacaaaaaaaacccaacaacaacccagaacaaagcaaaacccagcagactgtacttagcattgtctaaatccattctcaaattccaaatatcacagacacccctcacacaaggaatataaaaaccaccaccctccagcctgggcaacgtagtaaaacctcatctatacaagaatttaaaaataagctgggcgtggtggtacacacctgtggtcccagctactagggaggctgagccaggaagaacgctccagcccaggacttcgaggctgcaatgagctataattgcatcattgcactccagcctgggcaacagagaccctgtctcaaccaccaccaccaccaccacccctactacccctgtattcaaggtaaaaattgaagtttgtatgatgtaagagatgagaaaaacccaacaggaaacacagacacatcctccagttctatcaatggattgtgcagacactgagtttttagaaaaacatatccacggtaaccggtccctggcaattctgtttacatgaaatggggagaaagtcaccgaaatgggtgccgccggcccccactcccaattcattccctaacctgcaaacctttccaacttctcacgtcaggcctttgagaattctttccccctctcctggtttccacacctcagacacgcacagttcaccaagtgccttctgtagtcacatgaattgaaaaggagacgctgctcccacggaggggagcaggaatgctgcactgtttacaccctgactgtgcttaaaaacactttcactaataaatggttataaatcacaa

SEQ ID NO: 1086 - protein, 1945 aa, Homo sapiens
MAQKGQLSDDEKFLFVDKNFINSPVAQADWAAKRLVWVPSEKQGFEAASIKEEKGDEVVVELVENGKKVTVGKDDIQKMNPPKFSKVEDMAELTCLNEASVLHNLRERYFSGLIYTYSGLFCVVVNPYKHLPIYSEKIVDMYKGKKRHEMPPHIYAIADTAYRSMLQDREDQSILCTGESGAGKTENTKKVIQYLAVVASSHKGKKDTSITQGPSFAYGELEKQLLQANPILEAFGNAKTVKNDNSSRFGKFIRINFDVTGYIVGANIETYLLEKSRAIRQARDERTFHIFYYMIAGAKEKMRSDLLLEGFNNYTFLSNGFVPIPAAQDDEMFQETVEAMAIMGFSEEEQLSILKVVSSVLQLGNIVFKKERNTDQASMPDNTAAQKVCHLMGINVTDFTRSILTPRIKVGRDVVQKAQTKEQADFAVEALAKATYERLFRWILTRVNKALDKTHRQGASFLGILDIAGFEIFEVNSFEQLCINYTNEKLQQLFNHTMFILEQEEYQREGIEWNFIDFGLDLQPCIELIERPNNPPGVLALLDEECWFPKATDKSFVEKLCTEQGSHPKFQKPKQLKDKTEFSIIHYAGKVDYNASAWLTKNMDPLNDNVTSLLNASSDKFVADLWKDVDRIVGLDQMAKMTESSLPSASKTKKGMFRTVGQLYKEQLGKLMTTLRNTTPNFVRCIIPNHEKRSGKLDAFLVLEQLRCNGVLEGIRICRQGFPNRIVFQEFRQRYEILAANAIPKGFMDGKQACILMIKALELDPNLYRIGQSKIFFRTGVLAHLEEERDLKITDVIMAFQAMCRGYLARKAFAKRQQQLTAMKVIQRNCAAYLKLRNWQWWRLFTKVKPLLQVTRQEEEMQAKEDELQKTKERQQKAENELKELEQKHSQLTEEKNLLQEQLQAETELYAEAEEMRVRLAAKKQELEEILHEMEARLEEEEDRGQQLQAERKKMAQQMLDLEEQLEEEEAARQKLQLEKVTAEAKIKKLEDEILVMDDQNNKLSKERKLLEERISDLTTNLAEEEEKAKNLTKLKNKHESMISELEVRLKKEEKSRQELEKLKRKLEGDASDFHEQIADLQAQIAELKMQLAKKEEELQAALARLDDEIAQKNNALKKIRELEGHISDLQEDLDSERAARNKAEKQKRDLGEELEALKTELEDTLDSTATQQELRAKREQEVTVLKKALDEETRSHEAQVQEMRQKHAQAVEELTEQLEQFKRAKANLDKNKQTLEKENADLAGELRVLGQAKQEVEHKKKKLEAQVQELQSKCSDGERARAELNDKVHKLQNEVESVTGMLNEAEGKAIKLAKDVASLSSQLQDTQELLQEETRQKLNVSTKLRQLEEERNSLQDQLDEEMEAKQNLERHISTLNIQLSDSKKKLQDFASTVEALEEGKKRFQKEIENLTQQYEEKAAAYDKLEKTKNRLQQELDDLVVDLDNQRQLVSNLEKKQRKFDQLLAEEKNISSKYADERDRAEAEAREKETKALSLARALEEALEAKEELERTNKMLKAEMEDLVSSKDDVGKNVHELEKSKRALETQMEEMKTQLEELEDELQATEDAKLRLEVNMQALKGQFERDLQARDEQNEEKRRQLQRQLHEYETELEDERKQRALAAAAKKKLEGDLKDLELQADSAIKGREEAIKQLRKLQAQMKDFQRELEDARASRDEIFATAKENEKKAKSLEADLMQLQEDLAAAERARKQADLEKEELAEELASSLSGRNALQDEKRRLEARIAQLEEELEEEQGNMEAMSDRVRKATQQAEQLSNELATERSTAQKNESARQQLERQNKELRSKLHEMEGAVKSKFKSTIAALEAKIAQLEEQVEQEAREKQAATKSLKQKDKKLKEILLQVEDERKMAEQYKEQAEKGNARVKQLKRQLEEAEEESQRINANRRKLQRELDEATESNEAMGREVNALKSKLRGPPPQETSQ

SEQ ID NO: 1087 - DNA, 6903 bp, Homo sapiens
gggagatttggacgctccggcctgggaggtgcgtcagatccgagctcgccatccagtttcctctccactagtccccccagttggagatctgggaccaacaaggcaccatggcgcagaagggccaactcagtgacgatgagaagttcctctttgtggacaaaaacttcatcaacagcccagtggcccaggctgactgggccgccaagagactcgtctgggtcccctcggagaagcagggcttcgaggcagccagcattaaggaggagaagggggatgaggtggttgtggagctggtggagaatggcaagaaggtcacggttgggaaagatgacatccagaagatgaacccacccaagttctccaaggtggaggacatggcggagctgacgtgcctcaacgaagcctccgtgctacacaacctgagggagcggtacttctcagggctaatatatacgtactctggcctcttctgcgtggtggtcaacccctataaacacctgcccatctactcggagaagatcgtcgacatgtacaagggcaagaagaggcacgagatgccgcctcacatctacgccatcgcagacacggcctaccggagcatgcttcaagatcgggaggaccagtccattctatgcacaggcgagtctggagccgggaaaaccgaaaacaccaagaaggtcattcagtacctggccgtggtggcctcctcccacaagggcaagaaagacacaagtatcacgcaaggcccatcttttgcctacggagagctggaaaagcagcttctacaagcaaacccgattctggaggctttcggcaacgccaaaacagtgaagaacgacaactcctcacgattcggcaaattcatccgcatcaacttcgacgtcacgggttacatcgtgggagccaacattgagacctatctgctagaaaaatcacgggcaattcgccaagccagagacgagaggacattccacatcttttactacatgattgctggagccaaggagaagatgagaagtgacttgcttttggagggcttcaacaactacaccttcctctccaatggctttgtgcccatcccagcagcccaggatgatgagatgttccaggaaaccgtggaggccatggcaatcatgggtttcagcgaggaggagcagctatccatattgaaggtggtatcatcggtcctgcagcttggaaatatcgtcttcaagaaggaaagaaacacagaccaggcgtccatgccagataacacagctgctcagaaagtttgccacctcatgggaattaatgtgacagatttcaccagatccatcctcactcctcgtatcaaggttgggcgagatgtggtacagaaagctcagacaaaagaacaggctgactttgctgtagaggctttggccaaggcaacatatgagcgccttttccgctggatactcacccgcgtgaacaaagccctggacaagacccatcggcaaggggcttccttcctggggatcctggatatagctggatttgagatctttgaggtgaactccttcgagcagctgtgcatcaactacaccaacgagaagctgcagcagctcttcaaccacaccatgttcatcctggagcaggaggagtaccagcgcgagggcatcgagtggaacttcatcgactttgggctggacctacagccctgcatcgagctcatcgagcgaccgaacaaccctccaggtgtgctggccctgctggacgaggaatgctggttccccaaagccacggacaagtctttcgtggagaagctgtgcacggagcagggcagccaccccaagttccagaagcccaagcagctcaaggacaagactgagttctccatcatccattatgctgggaaggtggactataatgcgagtgcctggctgaccaagaatatggacccgctgaatgacaacgtgacttccctgctcaatgcctcctccgacaagtttgtggccgacctgtggaaggacgtggaccgcatcgtgggcctggaccagatggccaagatgacggagagctcgctgcccagcgcctccaagaccaagaagggcatgttccgcacagtggggcagctgtacaaggagcagctgggcaagctgatgaccacgctacgcaacaccacgcccaacttcgtgcgctgcatcatccccaaccacgagaagaggtccggcaagctggatgcgttcctggtgctggagcagctgcggtgcaatggggtgctggaaggcattcgcatctgccggcagggcttccccaaccggatcgtcttccaggagttccgccaacgctacgagatcctggcggcgaatgccatccccaaaggcttcatggacgggaagcaggcctgcattctcatgatcaaagccctggaacttgaccccaacttatacaggatagggcagagcaaaatcttcttccgaactggcgtcctggcccacctagaggaggagcgagatttgaagatcaccgatgtcatcatggccttccaggcgatgtgtcgtggctacttggccagaaaggcttttgccaagaggcagcagcagctgaccgccatgaaggtgattcagaggaactgcgccgcctacctcaagctgcggaactggcagtggtggaggcttttcaccaaagtgaagccactgctgcaggtgacacggcaggaggaggagatgcaggccaaggaggatgaactgcagaagaccaaggagcggcagcagaaggcagagaatgagcttaaggagctggaacagaagcactcgcagctgaccgaggagaagaacctgctacaggaacagctgcaggcagagacagagctgtatgcagaggctgaggagatgcgggtgcggctggcggccaagaagcaggagctggaggagatactgcatgagatggaggcccgcctggaggaggaggaagacaggggccagcagctacaggctgaaaggaagaagatggcccagcagatgctggaccttgaagaacagctggaggaggaggaagctgccaggcagaagctgcaacttgagaaggtcacggctgaggccaagatcaagaaactggaggatgagatcctggtcatggatgatcagaacaataaactatcaaaagaacgaaaactccttgaggagaggattagtgacttaacgacaaatcttgcagaagaggaagaaaaggccaagaatcttaccaagctgaaaaacaagcatgaatctatgatttcagaactggaagtgcggctaaagaaggaagagaagagccgacaggagctggagaagctgaaacggaagctggagggtgatgccagcgacttccacgagcagatcgctgacctccaggcgcagatcgcagagctcaagatgcagctggccaagaaggaggaggagctgcaggcggccctggccaggcttgacgatgaaatcgctcagaagaacaatgccctgaagaagatccgggagctggagggccacatctcagacctccaggaggacctggactcagagcgggccgccaggaacaaggctgaaaagcagaagcgagacctcggcgaggagctggaggccctaaagacagagctggaagacacactggacagcacagccactcagcaggagctcagggccaagagggagcaggaggtgacggtgctgaagaaggccctggatgaagagacgcggtcccatgaggctcaggtccaggagatgaggcagaaacacgcacaggcggtggaggagctcacagagcagcttgagcagttcaagagggccaaggcgaacctagacaagaataagcagacgctggagaaagagaacgcagacctggccggggagctgcgggtcctgggccaggccaagcaggaggtggaacataagaagaagaagctggaggcgcaggtgcaggagctgcagtccaagtgcagcgatggggagcgggcccgggcggagctcaatgacaaagtccacaagctgcagaatgaagttgagagcgtcacagggatgcttaacgaggccgaggggaaggccattaagctggccaaggacgtggcgtccctcagttcccagctccaggacacccaggagctgcttcaagaagaaacccggcagaagctcaacgtgtctacgaagctgcgccagctggaggaggagcggaacagcctgcaagaccagctggacgaggagatggaggccaagcagaacctggagcgccacatctccactctcaacatccagctctccgactcgaagaagaagctgcaggactttgccagcaccgtggaagctctggaagaggggaagaagaggttccagaaggagatcgagaacctcacccagcagtacgaggagaaggcggccgcttatgataaactggaaaagaccaagaacaggcttcagcaggagctggacgacctggttgttgatttggacaaccagcggcaactcgtgtccaacctggaaaagaagcagaggaaatttgatcagttgttagccgaggagaaaaacatctcttccaaatacgcggatgagagggacagagctgaggcagaagccagggagaaggaaaccaaggccctgtccctggctcgggcccttgaagaggccttggaagccaaagaggaactcgagcggaccaacaaaatgctcaaagccgaaatggaagacctggtcagctccaaggatgacgtgggcaagaacgtccatgagctggagaagtccaagcgggccctggagacccagatggaggagatgaagacgcagctggaagagctggaggacgagctgcaagccacggaggacgccaaactgcggctggaagtcaacatgcaggcgctcaagggccagttcgaaagggatctccaagcccgggacgagcagaatgaggagaagaggaggcaactgcagagacagcttcacgagtatgagacggaactggaagacgagcgaaagcaacgtgccctggcagctgcagcaaagaagaagctggaaggggacctgaaagacctggagcttcaggccgactctgccatcaaggggagggaggaagccatcaagcagctacgcaaactgcaggctcagatgaaggactttcaaagagagctggaagatgcccgtgcctccagagatgagatctttgccacagccaaagagaatgagaagaaagccaagagcttggaagcagacctcatgcagctacaagaggacctcgccgccgctgagagggctcgcaaacaagcggacctcgagaaggaggaactggcagaggagctggccagtagcctgtcgggaaggaacgcactccaggacgagaagcgccgcctggaggcccggatcgcccagctggaggaggagctggaggaggagcagggcaacatggaggccatgagcgaccgggtccgcaaagccacacagcaggccgagcagctcagcaacgagctggccacagagcgcagcacggcccagaagaatgagagtgcccggcagcagctcgagcggcagaacaaggagctccggagcaagctccacgagatggagggggccgtcaagtccaagttcaagtccaccatcgcggcgctggaggccaagattgcacagctggaggagcaggtcgagcaggaggccagagagaaacaggcggccaccaagtcgctgaagcagaaagacaagaagctgaaggaaatcttgctgcaggtggaggacgagcgcaagatggccgagcagtacaaggagcaggcagagaaaggcaatgccagggtcaagcagctcaagaggcagctggaggaggcagaggaggagtcccagcgcatcaacgccaaccgcaggaagctgcagcgggagctggatgaggccacggagagcaacgaggccatgggccgcgaggtgaacgcactcaagagcaagctcaggcgaggaaacgagacctctttcgttccttctagaaggtctggaggacgtagagttattgaaaatgcagatggttctgaggaggaaacggacactcgagacgcagacttcaatggaaccaaggccagtgaataagcaactttctacagttttgcaccacggcaagaaaaccaaaaaccaaaacaaacaaacaaaaaaaacccaacaacaacccagaacaaagcaaaacccagcagactgtacttagcattgtctaaatccattctcaaattccaaatatcacagacacccctcacacaaggaatataaaaaccaccaccctccagcctgggcaacgtagtaaaacctcatctatacaagaatttaaaaataagctgggcgtggtggtacacacctgtggtcccagctactagggaggctgagccaggaagaacgctccagcccaggacttcgaggctgcaatgagctataattgcatcattgcactccagcctgggcaacagagaccctgtctcaaccaccaccaccaccaccacccctactacccctgtattcaaggtaaaaattgaagtttgtatgatgtaagagatgagaaaaacccaacaggaaacacagacacatcctccagttctatcaatggattgtgcagacactgagtttttagaaaaacatatccacggtaaccggtccctggcaattctgtttacatgaaatggggagaaagtcaccgaaatgggtgccgccggcccccactcccaattcattccctaacctgcaaacctttccaacttctcacgtcaggcctttgagaattctttccccctctcctggtttccacacctcagacacgcacagttcaccaagtgccttctgtagtcacatgaattgaaaaggagacgctgctcccacggaggggagcaggaatgctgcactgtttacaccctgactgtgcttaaaaacactttcactaataaatggttataaatcacaa

SEQ ID NO: 1088 - protein, 1979 aa, Homo sapiens
MAQKGQLSDDEKFLFVDKNFINSPVAQADWAAKRLVWVPSEKQGFEAASIKEEKGDEVVVELVENGKKVTVGKDDIQKMNPPKFSKVEDMAELTCLNEASVLHNLRERYFSGLIYTYSGLFCVVVNPYKHLPIYSEKIVDMYKGKKRHEMPPHIYAIADTAYRSMLQDREDQSILCTGESGAGKTENTKKVIQYLAVVASSHKGKKDTSITQGPSFAYGELEKQLLQANPILEAFGNAKTVKNDNSSRFGKFIRINFDVTGYIVGANIETYLLEKSRAIRQARDERTFHIFYYMIAGAKEKMRSDLLLEGFNNYTFLSNGFVPIPAAQDDEMFQETVEAMAIMGFSEEEQLSILKVVSSVLQLGNIVFKKERNTDQASMPDNTAAQKVCHLMGINVTDFTRSILTPRIKVGRDVVQKAQTKEQADFAVEALAKATYERLFRWILTRVNKALDKTHRQGASFLGILDIAGFEIFEVNSFEQLCINYTNEKLQQLFNHTMFILEQEEYQREGIEWNFIDFGLDLQPCIELIERPNNPPGVLALLDEECWFPKATDKSFVEKLCTEQGSHPKFQKPKQLKDKTEFSIIHYAGKVDYNASAWLTKNMDPLNDNVTSLLNASSDKFVADLWKDVDRIVGLDQMAKMTESSLPSASKTKKGMFRTVGQLYKEQLGKLMTTLRNTTPNFVRCIIPNHEKRSGKLDAFLVLEQLRCNGVLEGIRICRQGFPNRIVFQEFRQRYEILAANAIPKGFMDGKQACILMIKALELDPNLYRIGQSKIFFRTGVLAHLEEERDLKITDVIMAFQAMCRGYLARKAFAKRQQQLTAMKVIQRNCAAYLKLRNWQWWRLFTKVKPLLQVTRQEEEMQAKEDELQKTKERQQKAENELKELEQKHSQLTEEKNLLQEQLQAETELYAEAEEMRVRLAAKKQELEEILHEMEARLEEEEDRGQQLQAERKKMAQQMLDLEEQLEEEEAARQKLQLEKVTAEAKIKKLEDEILVMDDQNNKLSKERKLLEERISDLTTNLAEEEEKAKNLTKLKNKHESMISELEVRLKKEEKSRQELEKLKRKLEGDASDFHEQIADLQAQIAELKMQLAKKEEELQAALARLDDEIAQKNNALKKIRELEGHISDLQEDLDSERAARNKAEKQKRDLGEELEALKTELEDTLDSTATQQELRAKREQEVTVLKKALDEETRSHEAQVQEMRQKHAQAVEELTEQLEQFKRAKANLDKNKQTLEKENADLAGELRVLGQAKQEVEHKKKKLEAQVQELQSKCSDGERARAELNDKVHKLQNEVESVTGMLNEAEGKAIKLAKDVASLSSQLQDTQELLQEETRQKLNVSTKLRQLEEERNSLQDQLDEEMEAKQNLERHISTLNIQLSDSKKKLQDFASTVEALEEGKKRFQKEIENLTQQYEEKAAAYDKLEKTKNRLQQELDDLVVDLDNQRQLVSNLEKKQRKFDQLLAEEKNISSKYADERDRAEAEAREKETKALSLARALEEALEAKEELERTNKMLKAEMEDLVSSKDDVGKNVHELEKSKRALETQMEEMKTQLEELEDELQATEDAKLRLEVNMQALKGQFERDLQARDEQNEEKRRQLQRQLHEYETELEDERKQRALAAAAKKKLEGDLKDLELQADSAIKGREEAIKQLRKLQAQMKDFQRELEDARASRDEIFATAKENEKKAKSLEADLMQLQEDLAAAERARKQADLEKEELAEELASSLSGRNALQDEKRRLEARIAQLEEELEEEQGNMEAMSDRVRKATQQAEQLSNELATERSTAQKNESARQQLERQNKELRSKLHEMEGAVKSKFKSTIAALEAKIAQLEEQVEQEAREKQAATKSLKQKDKKLKEILLQVEDERKMAEQYKEQAEKGNARVKQLKRQLEEAEEESQRINANRRKLQRELDEATESNEAMGREVNALKSKLRRGNETSFVPSRRSGGRRVIENADGSEEETDTRDADFNGTKASE

SEQ ID NO: 1089 - DNA, 6882 bp, Homo sapiens
gggagatttggacgctccggcctgggaggtgcgtcagatccgagctcgccatccagtttcctctccactagtccccccagttggagatctgggaccaacaaggcaccatggcgcagaagggccaactcagtgacgatgagaagttcctctttgtggacaaaaacttcatcaacagcccagtggcccaggctgactgggccgccaagagactcgtctgggtcccctcggagaagcagggcttcgaggcagccagcattaaggaggagaagggggatgaggtggttgtggagctggtggagaatggcaagaaggtcacggttgggaaagatgacatccagaagatgaacccacccaagttctccaaggtggaggacatggcggagctgacgtgcctcaacgaagcctccgtgctacacaacctgagggagcggtacttctcagggctaatatatacgtactctggcctcttctgcgtggtggtcaacccctataaacacctgcccatctactcggagaagatcgtcgacatgtacaagggcaagaagaggcacgagatgccgcctcacatctacgccatcgcagacacggcctaccggagcatgcttcaagatcgggaggaccagtccattctatgcacaggcgagtctggagccgggaaaaccgaaaacaccaagaaggtcattcagtacctggccgtggtggcctcctcccacaagggcaagaaagacacaagtatcacgggagagctggaaaagcagcttctacaagcaaacccgattctggaggctttcggcaacgccaaaacagtgaagaacgacaactcctcacgattcggcaaattcatccgcatcaacttcgacgtcacgggttacatcgtgggagccaacattgagacctatctgctagaaaaatcacgggcaattcgccaagccagagacgagaggacattccacatcttttactacatgattgctggagccaaggagaagatgagaagtgacttgcttttggagggcttcaacaactacaccttcctctccaatggctttgtgcccatcccagcagcccaggatgatgagatgttccaggaaaccgtggaggccatggcaatcatgggtttcagcgaggaggagcagctatccatattgaaggtggtatcatcggtcctgcagcttggaaatatcgtcttcaagaaggaaagaaacacagaccaggcgtccatgccagataacacagctgctcagaaagtttgccacctcatgggaattaatgtgacagatttcaccagatccatcctcactcctcgtatcaaggttgggcgagatgtggtacagaaagctcagacaaaagaacaggctgactttgctgtagaggctttggccaaggcaacatatgagcgccttttccgctggatactcacccgcgtgaacaaagccctggacaagacccatcggcaaggggcttccttcctggggatcctggatatagctggatttgagatctttgaggtgaactccttcgagcagctgtgcatcaactacaccaacgagaagctgcagcagctcttcaaccacaccatgttcatcctggagcaggaggagtaccagcgcgagggcatcgagtggaacttcatcgactttgggctggacctacagccctgcatcgagctcatcgagcgaccgaacaaccctccaggtgtgctggccctgctggacgaggaatgctggttccccaaagccacggacaagtctttcgtggagaagctgtgcacggagcagggcagccaccccaagttccagaagcccaagcagctcaaggacaagactgagttctccatcatccattatgctgggaaggtggactataatgcgagtgcctggctgaccaagaatatggacccgctgaatgacaacgtgacttccctgctcaatgcctcctccgacaagtttgtggccgacctgtggaaggacgtggaccgcatcgtgggcctggaccagatggccaagatgacggagagctcgctgcccagcgcctccaagaccaagaagggcatgttccgcacagtggggcagctgtacaaggagcagctgggcaagctgatgaccacgctacgcaacaccacgcccaacttcgtgcgctgcatcatccccaaccacgagaagaggtccggcaagctggatgcgttcctggtgctggagcagctgcggtgcaatggggtgctggaaggcattcgcatctgccggcagggcttccccaaccggatcgtcttccaggagttccgccaacgctacgagatcctggcggcgaatgccatccccaaaggcttcatggacgggaagcaggcctgcattctcatgatcaaagccctggaacttgaccccaacttatacaggatagggcagagcaaaatcttcttccgaactggcgtcctggcccacctagaggaggagcgagatttgaagatcaccgatgtcatcatggccttccaggcgatgtgtcgtggctacttggccagaaaggcttttgccaagaggcagcagcagctgaccgccatgaaggtgattcagaggaactgcgccgcctacctcaagctgcggaactggcagtggtggaggcttttcaccaaagtgaagccactgctgcaggtgacacggcaggaggaggagatgcaggccaaggaggatgaactgcagaagaccaaggagcggcagcagaaggcagagaatgagcttaaggagctggaacagaagcactcgcagctgaccgaggagaagaacctgctacaggaacagctgcaggcagagacagagctgtatgcagaggctgaggagatgcgggtgcggctggcggccaagaagcaggagctggaggagatactgcatgagatggaggcccgcctggaggaggaggaagacaggggccagcagctacaggctgaaaggaagaagatggcccagcagatgctggaccttgaagaacagctggaggaggaggaagctgccaggcagaagctgcaacttgagaaggtcacggctgaggccaagatcaagaaactggaggatgagatcctggtcatggatgatcagaacaataaactatcaaaagaacgaaaactccttgaggagaggattagtgacttaacgacaaatcttgcagaagaggaagaaaaggccaagaatcttaccaagctgaaaaacaagcatgaatctatgatttcagaactggaagtgcggctaaagaaggaagagaagagccgacaggagctggagaagctgaaacggaagctggagggtgatgccagcgacttccacgagcagatcgctgacctccaggcgcagatcgcagagctcaagatgcagctggccaagaaggaggaggagctgcaggcggccctggccaggcttgacgatgaaatcgctcagaagaacaatgccctgaagaagatccgggagctggagggccacatctcagacctccaggaggacctggactcagagcgggccgccaggaacaaggctgaaaagcagaagcgagacctcggcgaggagctggaggccctaaagacagagctggaagacacactggacagcacagccactcagcaggagctcagggccaagagggagcaggaggtgacggtgctgaagaaggccctggatgaagagacgcggtcccatgaggctcaggtccaggagatgaggcagaaacacgcacaggcggtggaggagctcacagagcagcttgagcagttcaagagggccaaggcgaacctagacaagaataagcagacgctggagaaagagaacgcagacctggccggggagctgcgggtcctgggccaggccaagcaggaggtggaacataagaagaagaagctggaggcgcaggtgcaggagctgcagtccaagtgcagcgatggggagcgggcccgggcggagctcaatgacaaagtccacaagctgcagaatgaagttgagagcgtcacagggatgcttaacgaggccgaggggaaggccattaagctggccaaggacgtggcgtccctcagttcccagctccaggacacccaggagctgcttcaagaagaaacccggcagaagctcaacgtgtctacgaagctgcgccagctggaggaggagcggaacagcctgcaagaccagctggacgaggagatggaggccaagcagaacctggagcgccacatctccactctcaacatccagctctccgactcgaagaagaagctgcaggactttgccagcaccgtggaagctctggaagaggggaagaagaggttccagaaggagatcgagaacctcacccagcagtacgaggagaaggcggccgcttatgataaactggaaaagaccaagaacaggcttcagcaggagctggacgacctggttgttgatttggacaaccagcggcaactcgtgtccaacctggaaaagaagcagaggaaatttgatcagttgttagccgaggagaaaaacatctcttccaaatacgcggatgagagggacagagctgaggcagaagccagggagaaggaaaccaaggccctgtccctggctcgggcccttgaagaggccttggaagccaaagaggaactcgagcggaccaacaaaatgctcaaagccgaaatggaagacctggtcagctccaaggatgacgtgggcaagaacgtccatgagctggagaagtccaagcgggccctggagacccagatggaggagatgaagacgcagctggaagagctggaggacgagctgcaagccacggaggacgccaaactgcggctggaagtcaacatgcaggcgctcaagggccagttcgaaagggatctccaagcccgggacgagcagaatgaggagaagaggaggcaactgcagagacagcttcacgagtatgagacggaactggaagacgagcgaaagcaacgtgccctggcagctgcagcaaagaagaagctggaaggggacctgaaagacctggagcttcaggccgactctgccatcaaggggagggaggaagccatcaagcagctacgcaaactgcaggctcagatgaaggactttcaaagagagctggaagatgcccgtgcctccagagatgagatctttgccacagccaaagagaatgagaagaaagccaagagcttggaagcagacctcatgcagctacaagaggacctcgccgccgctgagagggctcgcaaacaagcggacctcgagaaggaggaactggcagaggagctggccagtagcctgtcgggaaggaacgcactccaggacgagaagcgccgcctggaggcccggatcgcccagctggaggaggagctggaggaggagcagggcaacatggaggccatgagcgaccgggtccgcaaagccacacagcaggccgagcagctcagcaacgagctggccacagagcgcagcacggcccagaagaatgagagtgcccggcagcagctcgagcggcagaacaaggagctccggagcaagctccacgagatggagggggccgtcaagtccaagttcaagtccaccatcgcggcgctggaggccaagattgcacagctggaggagcaggtcgagcaggaggccagagagaaacaggcggccaccaagtcgctgaagcagaaagacaagaagctgaaggaaatcttgctgcaggtggaggacgagcgcaagatggccgagcagtacaaggagcaggcagagaaaggcaatgccagggtcaagcagctcaagaggcagctggaggaggcagaggaggagtcccagcgcatcaacgccaaccgcaggaagctgcagcgggagctggatgaggccacggagagcaacgaggccatgggccgcgaggtgaacgcactcaagagcaagctcaggcgaggaaacgagacctctttcgttccttctagaaggtctggaggacgtagagttattgaaaatgcagatggttctgaggaggaaacggacactcgagacgcagacttcaatggaaccaaggccagtgaataagcaactttctacagttttgcaccacggcaagaaaaccaaaaaccaaaacaaacaaacaaaaaaaacccaacaacaacccagaacaaagcaaaacccagcagactgtacttagcattgtctaaatccattctcaaattccaaatatcacagacacccctcacacaaggaatataaaaaccaccaccctccagcctgggcaacgtagtaaaacctcatctatacaagaatttaaaaataagctgggcgtggtggtacacacctgtggtcccagctactagggaggctgagccaggaagaacgctccagcccaggacttcgaggctgcaatgagctataattgcatcattgcactccagcctgggcaacagagaccctgtctcaaccaccaccaccaccaccacccctactacccctgtattcaaggtaaaaattgaagtttgtatgatgtaagagatgagaaaaacccaacaggaaacacagacacatcctccagttctatcaatggattgtgcagacactgagtttttagaaaaacatatccacggtaaccggtccctggcaattctgtttacatgaaatggggagaaagtcaccgaaatgggtgccgccggcccccactcccaattcattccctaacctgcaaacctttccaacttctcacgtcaggcctttgagaattctttccccctctcctggtttccacacctcagacacgcacagttcaccaagtgccttctgtagtcacatgaattgaaaaggagacgctgctcccacggaggggagcaggaatgctgcactgtttacaccctgactgtgcttaaaaacactttcactaataaatggttataaatcacaa

SEQ ID NO: 1090 - protein, 1972 aa, Homo sapiens
MAQKGQLSDDEKFLFVDKNFINSPVAQADWAAKRLVWVPSEKQGFEAASIKEEKGDEVVVELVENGKKVTVGKDDIQKMNPPKFSKVEDMAELTCLNEASVLHNLRERYFSGLIYTYSGLFCVVVNPYKHLPIYSEKIVDMYKGKKRHEMPPHIYAIADTAYRSMLQDREDQSILCTGESGAGKTENTKKVIQYLAVVASSHKGKKDTSITGELEKQLLQANPILEAFGNAKTVKNDNSSRFGKFIRINFDVTGYIVGANIETYLLEKSRAIRQARDERTFHIFYYMIAGAKEKMRSDLLLEGFNNYTFLSNGFVPIPAAQDDEMFQETVEAMAIMGFSEEEQLSILKVVSSVLQLGNIVFKKERNTDQASMPDNTAAQKVCHLMGINVTDFTRSILTPRIKVGRDVVQKAQTKEQADFAVEALAKATYERLFRWILTRVNKALDKTHRQGASFLGILDIAGFEIFEVNSFEQLCINYTNEKLQQLFNHTMFILEQEEYQREGIEWNFIDFGLDLQPCIELIERPNNPPGVLALLDEECWFPKATDKSFVEKLCTEQGSHPKFQKPKQLKDKTEFSIIHYAGKVDYNASAWLTKNMDPLNDNVTSLLNASSDKFVADLWKDVDRIVGLDQMAKMTESSLPSASKTKKGMFRTVGQLYKEQLGKLMTTLRNTTPNFVRCIIPNHEKRSGKLDAFLVLEQLRCNGVLEGIRICRQGFPNRIVFQEFRQRYEILAANAIPKGFMDGKQACILMIKALELDPNLYRIGQSKIFFRTGVLAHLEEERDLKITDVIMAFQAMCRGYLARKAFAKRQQQLTAMKVIQRNCAAYLKLRNWQWWRLFTKVKPLLQVTRQEEEMQAKEDELQKTKERQQKAENELKELEQKHSQLTEEKNLLQEQLQAETELYAEAEEMRVRLAAKKQELEEILHEMEARLEEEEDRGQQLQAERKKMAQQMLDLEEQLEEEEAARQKLQLEKVTAEAKIKKLEDEILVMDDQNNKLSKERKLLEERISDLTTNLAEEEEKAKNLTKLKNKHESMISELEVRLKKEEKSRQELEKLKRKLEGDASDFHEQIADLQAQIAELKMQLAKKEEELQAALARLDDEIAQKNNALKKIRELEGHISDLQEDLDSERAARNKAEKQKRDLGEELEALKTELEDTLDSTATQQELRAKREQEVTVLKKALDEETRSHEAQVQEMRQKHAQAVEELTEQLEQFKRAKANLDKNKQTLEKENADLAGELRVLGQAKQEVEHKKKKLEAQVQELQSKCSDGERARAELNDKVHKLQNEVESVTGMLNEAEGKAIKLAKDVASLSSQLQDTQELLQEETRQKLNVSTKLRQLEEERNSLQDQLDEEMEAKQNLERHISTLNIQLSDSKKKLQDFASTVEALEEGKKRFQKEIENLTQQYEEKAAAYDKLEKTKNRLQQELDDLVVDLDNQRQLVSNLEKKQRKFDQLLAEEKNISSKYADERDRAEAEAREKETKALSLARALEEALEAKEELERTNKMLKAEMEDLVSSKDDVGKNVHELEKSKRALETQMEEMKTQLEELEDELQATEDAKLRLEVNMQALKGQFERDLQARDEQNEEKRRQLQRQLHEYETELEDERKQRALAAAAKKKLEGDLKDLELQADSAIKGREEAIKQLRKLQAQMKDFQRELEDARASRDEIFATAKENEKKAKSLEADLMQLQEDLAAAERARKQADLEKEELAEELASSLSGRNALQDEKRRLEARIAQLEEELEEEQGNMEAMSDRVRKATQQAEQLSNELATERSTAQKNESARQQLERQNKELRSKLHEMEGAVKSKFKSTIAALEAKIAQLEEQVEQEAREKQAATKSLKQKDKKLKEILLQVEDERKMAEQYKEQAEKGNARVKQLKRQLEEAEEESQRINANRRKLQRELDEATESNEAMGREVNALKSKLRRGNETSFVPSRRSGGRRVIENADGSEEETDTRDADFNGTKASE

SEQ ID NO: 1091 - DNA, 6921 bp, Homo sapiens
gggagatttggacgctccggcctgggaggtgcgtcagatccgagctcgccatccagtttcctctccactagtccccccagttggagatctgggaccaacaaggcaccatggcgcagaagggccaactcagtgacgatgagaagttcctctttgtggacaaaaacttcatcaacagcccagtggcccaggctgactgggccgccaagagactcgtctgggtcccctcggagaagcagggcttcgaggcagccagcattaaggaggagaagggggatgaggtggttgtggagctggtggagaatggcaagaaggtcacggttgggaaagatgacatccagaagatgaacccacccaagttctccaaggtggaggacatggcggagctgacgtgcctcaacgaagcctccgtgctacacaacctgagggagcggtacttctcagggctaatatatacgtactctggcctcttctgcgtggtggtcaacccctataaacacctgcccatctactcggagaagatcgtcgacatgtacaagggcaagaagaggcacgagatgccgcctcacatctacgccatcgcagacacggcctaccggagcatgcttcaagatcgggaggaccagtccattctatgcacaggcgagtctggagccgggaaaaccgaaaacaccaagaaggtcattcagtacctggccgtggtggcctcctcccacaagggcaagaaagacacaagtatcacgggagagctggaaaagcagcttctacaagcaaacccgattctggaggctttcggcaacgccaaaacagtgaagaacgacaactcctcacgattcggcaaattcatccgcatcaacttcgacgtcacgggttacatcgtgggagccaacattgagacctatctgctagaaaaatcacgggcaattcgccaagccagagacgagaggacattccacatcttttactacatgattgctggagccaaggagaagatgagaagtgacttgcttttggagggcttcaacaactacaccttcctctccaatggctttgtgcccatcccagcagcccaggatgatgagatgttccaggaaaccgtggaggccatggcaatcatgggtttcagcgaggaggagcagctatccatattgaaggtggtatcatcggtcctgcagcttggaaatatcgtcttcaagaaggaaagaaacacagaccaggcgtccatgccagataacacagctgctcagaaagtttgccacctcatgggaattaatgtgacagatttcaccagatccatcctcactcctcgtatcaaggttgggcgagatgtggtacagaaagctcagacaaaagaacaggctgactttgctgtagaggctttggccaaggcaacatatgagcgccttttccgctggatactcacccgcgtgaacaaagccctggacaagacccatcggcaaggggcttccttcctggggatcctggatatagctggatttgagatctttgaggtgaactccttcgagcagctgtgcatcaactacaccaacgagaagctgcagcagctcttcaaccacaccatgttcatcctggagcaggaggagtaccagcgcgagggcatcgagtggaacttcatcgactttgggctggacctacagccctgcatcgagctcatcgagcgaccgaacaaccctccaggtgtgctggccctgctggacgaggaatgctggttccccaaagccacggacaagtctttcgtggagaagctgtgcacggagcagggcagccaccccaagttccagaagcccaagcagctcaaggacaagactgagttctccatcatccattatgctgggaaggtggactataatgcgagtgcctggctgaccaagaatatggacccgctgaatgacaacgtgacttccctgctcaatgcctcctccgacaagtttgtggccgacctgtggaaggacgtggaccgcatcgtgggcctggaccagatggccaagatgacggagagctcgctgcccagcgcctccaagaccaagaagggcatgttccgcacagtggggcagctgtacaaggagcagctgggcaagctgatgaccacgctacgcaacaccacgcccaacttcgtgcgctgcatcatccccaaccacgagaagaggtccggcaagctggatgcgttcctggtgctggagcagctgcggtgcaatggggtgctggaaggcattcgcatctgccggcagggcttccccaaccggatcgtcttccaggagttccgccaacgctacgagatcctggcggcgaatgccatccccaaaggcttcatggacgggaagcaggcctgcattctcatgatcaaagccctggaacttgaccccaacttatacaggatagggcagagcaaaatcttcttccgaactggcgtcctggcccacctagaggaggagcgagatttgaagatcaccgatgtcatcatggccttccaggcgatgtgtcgtggctacttggccagaaaggcttttgccaagaggcagcagcagctgaccgccatgaaggtgattcagaggaactgcgccgcctacctcaagctgcggaactggcagtggtggaggcttttcaccaaagtgaagccactgctgcaggtgacacggcaggaggaggagatgcaggccaaggaggatgaactgcagaagaccaaggagcggcagcagaaggcagagaatgagcttaaggagctggaacagaagcactcgcagctgaccgaggagaagaacctgctacaggaacagctgcaggcagagacagagctgtatgcagaggctgaggagatgcgggtgcggctggcggccaagaagcaggagctggaggagatactgcatgagatggaggcccgcctggaggaggaggaagacaggggccagcagctacaggctgaaaggaagaagatggcccagcagatgctggaccttgaagaacagctggaggaggaggaagctgccaggcagaagctgcaacttgagaaggtcacggctgaggccaagatcaagaaactggaggatgagatcctggtcatggatgatcagaacaataaactatcaaaagaacgaaaactccttgaggagaggattagtgacttaacgacaaatcttgcagaagaggaagaaaaggccaagaatcttaccaagctgaaaaacaagcatgaatctatgatttcagaactggaagtgcggctaaagaaggaagagaagagccgacaggagctggagaagctgaaacggaagctggagggtgatgccagcgacttccacgagcagatcgctgacctccaggcgcagatcgcagagctcaagatgcagctggccaagaaggaggaggagctgcaggcggccctggccaggcttgacgatgaaatcgctcagaagaacaatgccctgaagaagatccgggagctggagggccacatctcagacctccaggaggacctggactcagagcgggccgccaggaacaaggctgaaaagcagaagcgagacctcggcgaggagctggaggccctaaagacagagctggaagacacactggacagcacagccactcagcaggagctcagggccaagagggagcaggaggtgacggtgctgaagaaggccctggatgaagagacgcggtcccatgaggctcaggtccaggagatgaggcagaaacacgcacaggcggtggaggagctcacagagcagcttgagcagttcaagagggccaaggcgaacctagacaagaataagcagacgctggagaaagagaacgcagacctggccggggagctgcgggtcctgggccaggccaagcaggaggtggaacataagaagaagaagctggaggcgcaggtgcaggagctgcagtccaagtgcagcgatggggagcgggcccgggcggagctcaatgacaaagtccacaagctgcagaatgaagttgagagcgtcacagggatgcttaacgaggccgaggggaaggccattaagctggccaaggacgtggcgtccctcagttcccagctccaggacacccaggagctgcttcaagaagaaacccggcagaagctcaacgtgtctacgaagctgcgccagctggaggaggagcggaacagcctgcaagaccagctggacgaggagatggaggccaagcagaacctggagcgccacatctccactctcaacatccagctctccgactcgaagaagaagctgcaggactttgccagcaccgtggaagctctggaagaggggaagaagaggttccagaaggagatcgagaacctcacccagcagtacgaggagaaggcggccgcttatgataaactggaaaagaccaagaacaggcttcagcaggagctggacgacctggttgttgatttggacaaccagcggcaactcgtgtccaacctggaaaagaagcagaggaaatttgatcagttgttagccgaggagaaaaacatctcttccaaatacgcggatgagagggacagagctgaggcagaagccagggagaaggaaaccaaggccctgtccctggctcgggcccttgaagaggccttggaagccaaagaggaactcgagcggaccaacaaaatgctcaaagccgaaatggaagacctggtcagctccaaggatgacgtgggcaagaacgtccatgagctggagaagtccaagcgggccctggagacccagatggaggagatgaagacgcagctggaagagctggaggacgagctgcaagccacggaggacgccaaactgcggctggaagtcaacatgcaggcgctcaagggccagttcgaaagggatctccaagcccgggacgagcagaatgaggagaagaggaggcaactgcagagacagcttcacgagtatgagacggaactggaagacgagcgaaagcaacgtgccctggcagctgcagcaaagaagaagctggaaggggacctgaaagacctggagcttcaggccgactctgccatcaaggggagggaggaagccatcaagcagctacgcaaactgcaggctcagatgaaggactttcaaagagagctggaagatgcccgtgcctccagagatgagatctttgccacagccaaagagaatgagaagaaagccaagagcttggaagcagacctcatgcagctacaagaggacctcgccgccgctgagagggctcgcaaacaagcggacctcgagaaggaggaactggcagaggagctggccagtagcctgtcgggaaggaacgcactccaggacgagaagcgccgcctggaggcccggatcgcccagctggaggaggagctggaggaggagcagggcaacatggaggccatgagcgaccgggtccgcaaagccacacagcaggccgagcagctcagcaacgagctggccacagagcgcagcacggcccagaagaatgagagtgcccggcagcagctcgagcggcagaacaaggagctccggagcaagctccacgagatggagggggccgtcaagtccaagttcaagtccaccatcgcggcgctggaggccaagattgcacagctggaggagcaggtcgagcaggaggccagagagaaacaggcggccaccaagtcgctgaagcagaaagacaagaagctgaaggaaatcttgctgcaggtggaggacgagcgcaagatggccgagcagtacaaggagcaggcagagaaaggcaatgccagggtcaagcagctcaagaggcagctggaggaggcagaggaggagtcccagcgcatcaacgccaaccgcaggaagctgcagcgggagctggatgaggccacggagagcaacgaggccatgggccgcgaggtgaacgcactcaagagcaagctcagagggccccccccacaggaaacttcgcagtgatgcaccaggcgaggaaacgagacctctttcgttccttctagaaggtctggaggacgtagagttattgaaaatgcagatggttctgaggaggaaacggacactcgagacgcagacttcaatggaaccaaggccagtgaataagcaactttctacagttttgcaccacggcaagaaaaccaaaaaccaaaacaaacaaacaaaaaaaacccaacaacaacccagaacaaagcaaaacccagcagactgtacttagcattgtctaaatccattctcaaattccaaatatcacagacacccctcacacaaggaatataaaaaccaccaccctccagcctgggcaacgtagtaaaacctcatctatacaagaatttaaaaataagctgggcgtggtggtacacacctgtggtcccagctactagggaggctgagccaggaagaacgctccagcccaggacttcgaggctgcaatgagctataattgcatcattgcactccagcctgggcaacagagaccctgtctcaaccaccaccaccaccaccacccctactacccctgtattcaaggtaaaaattgaagtttgtatgatgtaagagatgagaaaaacccaacaggaaacacagacacatcctccagttctatcaatggattgtgcagacactgagtttttagaaaaacatatccacggtaaccggtccctggcaattctgtttacatgaaatggggagaaagtcaccgaaatgggtgccgccggcccccactcccaattcattccctaacctgcaaacctttccaacttctcacgtcaggcctttgagaattctttccccctctcctggtttccacacctcagacacgcacagttcaccaagtgccttctgtagtcacatgaattgaaaaggagacgctgctcccacggaggggagcaggaatgctgcactgtttacaccctgactgtgcttaaaaacactttcactaataaatggttataaatcacaa

SEQ ID NO: 1092 - protein, 1938 aa, Homo sapiens
MAQKGQLSDDEKFLFVDKNFINSPVAQADWAAKRLVWVPSEKQGFEAASIKEEKGDEVVVELVENGKKVTVGKDDIQKMNPPKFSKVEDMAELTCLNEASVLHNLRERYFSGLIYTYSGLFCVVVNPYKHLPIYSEKIVDMYKGKKRHEMPPHIYAIADTAYRSMLQDREDQSILCTGESGAGKTENTKKVIQYLAVVASSHKGKKDTSITGELEKQLLQANPILEAFGNAKTVKNDNSSRFGKFIRINFDVTGYIVGANIETYLLEKSRAIRQARDERTFHIFYYMIAGAKEKMRSDLLLEGFNNYTFLSNGFVPIPAAQDDEMFQETVEAMAIMGFSEEEQLSILKVVSSVLQLGNIVFKKERNTDQASMPDNTAAQKVCHLMGINVTDFTRSILTPRIKVGRDVVQKAQTKEQADFAVEALAKATYERLFRWILTRVNKALDKTHRQGASFLGILDIAGFEIFEVNSFEQLCINYTNEKLQQLFNHTMFILEQEEYQREGIEWNFIDFGLDLQPCIELIERPNNPPGVLALLDEECWFPKATDKSFVEKLCTEQGSHPKFQKPKQLKDKTEFSIIHYAGKVDYNASAWLTKNMDPLNDNVTSLLNASSDKFVADLWKDVDRIVGLDQMAKMTESSLPSASKTKKGMFRTVGQLYKEQLGKLMTTLRNTTPNFVRCIIPNHEKRSGKLDAFLVLEQLRCNGVLEGIRICRQGFPNRIVFQEFRQRYEILAANAIPKGFMDGKQACILMIKALELDPNLYRIGQSKIFFRTGVLAHLEEERDLKITDVIMAFQAMCRGYLARKAFAKRQQQLTAMKVIQRNCAAYLKLRNWQWWRLFTKVKPLLQVTRQEEEMQAKEDELQKTKERQQKAENELKELEQKHSQLTEEKNLLQEQLQAETELYAEAEEMRVRLAAKKQELEEILHEMEARLEEEEDRGQQLQAERKKMAQQMLDLEEQLEEEEAARQKLQLEKVTAEAKIKKLEDEILVMDDQNNKLSKERKLLEERISDLTTNLAEEEEKAKNLTKLKNKHESMISELEVRLKKEEKSRQELEKLKRKLEGDASDFHEQIADLQAQIAELKMQLAKKEEELQAALARLDDEIAQKNNALKKIRELEGHISDLQEDLDSERAARNKAEKQKRDLGEELEALKTELEDTLDSTATQQELRAKREQEVTVLKKALDEETRSHEAQVQEMRQKHAQAVEELTEQLEQFKRAKANLDKNKQTLEKENADLAGELRVLGQAKQEVEHKKKKLEAQVQELQSKCSDGERARAELNDKVHKLQNEVESVTGMLNEAEGKAIKLAKDVASLSSQLQDTQELLQEETRQKLNVSTKLRQLEEERNSLQDQLDEEMEAKQNLERHISTLNIQLSDSKKKLQDFASTVEALEEGKKRFQKEIENLTQQYEEKAAAYDKLEKTKNRLQQELDDLVVDLDNQRQLVSNLEKKQRKFDQLLAEEKNISSKYADERDRAEAEAREKETKALSLARALEEALEAKEELERTNKMLKAEMEDLVSSKDDVGKNVHELEKSKRALETQMEEMKTQLEELEDELQATEDAKLRLEVNMQALKGQFERDLQARDEQNEEKRRQLQRQLHEYETELEDERKQRALAAAAKKKLEGDLKDLELQADSAIKGREEAIKQLRKLQAQMKDFQRELEDARASRDEIFATAKENEKKAKSLEADLMQLQEDLAAAERARKQADLEKEELAEELASSLSGRNALQDEKRRLEARIAQLEEELEEEQGNMEAMSDRVRKATQQAEQLSNELATERSTAQKNESARQQLERQNKELRSKLHEMEGAVKSKFKSTIAALEAKIAQLEEQVEQEAREKQAATKSLKQKDKKLKEILLQVEDERKMAEQYKEQAEKGNARVKQLKRQLEEAEEESQRINANRRKLQRELDEATESNEAMGREVNALKSKLRGPPPQETSQ

SEQ ID NO: 1093 - DNA, 4867 bp, Homo sapiens
gcggagctcgagcgctgttgtgtgtttggaaggaaggatgctgctgccaatttgtgggaccgctgctgcgaggagtgggcgtggcctcggcggtgtggatgcttgttaggaaagatgctgagtgcttttcagtgaggagtcagggaggtgtgtgtgagagagagagagaaaagagagagacagagacggggagagagagagggagagagaagagagggaggagggaagaagaaaagacggagggaggtgaggaggaagggagggggagagacagagacctagaggggctgaagacccagacagagctggcagagctactgagaagaggactggagcgctctgagagcctctcaagatcttttgggggagcccaataaatgtgaacatgggatctgtcacgggagctgtcctcaagacgctacttctgttatctactcaaaattggaacagagtcgaagctgggaattcctatgactgtgatgatcctcttgtgtctgccttgcctcaggcatccttcagcagttcttccgagctctccagcagtcatggtcctggatttgcaaggctgaatagaagagatggagctggtggctggtctccacttgtgtctaacaaataccagtggttgcagattgaccttggagagagaatggaggtcaccgctgtggccactcaagggggatatggtagctccaactgggtgaccagctacctcctgatgttcagtgatagtggctggaactggaaacaatatcgccaagaggacagcatctggggtttttcaggaaatgcaaatgcagacagtgttgtgtactatagactccagccttctatcaaagccagatttctgcgcttcatccctttggaatggaaccccaagggcagaattggaatgcgaatcgaagtgttcggatgtgcatacagatcagaagtggttgatcttgatggaaaaagttcccttctctacagatttgatcaaaaatccctgagcccaataaaagacattatttctttgaaattcaaaaccatgcagagtgatgggattctactccacagggaagggccaaatggagatcacatcacactgcaattaagaagagcaagactctttttacttattaattcaggtgaagctaaactgccttccacttccaccctggtcaatctcaccctgggcagcctgctagatgatcagcattggcattcagtgctcatccagcgtttgggcaaacaagtcaacttcacagtggacgaacacaggcatcatttccatgcacggggagaattcaatctcatgaatcttgattatgagatcagctttggagggattccagcacctggaaaatcagtgtcattcccacatagaaattttcatggatgtttagaaaatctctattataatggagtggatatcattgatttggccaagcagcaaaaaccacagatcattgctatgggaaatgtgtcattttcttgttcacaaccacaatctatgcccgtgacttttctgagctccaggagttatttagcactgccagacttctctggagaggaggaggtttctgccacttttcaatttcgaacttggaataaggcagggcttctgctgttcagtgaacttcagctgatttcagggggtatcctcctctttctgagtgatggaaaacttaagtcgaatctctaccagccaggaaaattacccagtgacatcacagcaggtgtcgaattaaatgatgggcagtggcattctgtctctttatctgctaaaaagaatcacttgagtgtggcggtggacggccagatggcttctgctgctcctctgctggggcctgagcagatttattcgggtggcacctattattttggaggttgtcctgacaaaagctttggatccaaatgtaaaagtccacttggtggatttcagggatgtatgaggctcatttctatcagcggcaaagtggtagatctgatttcagttcagcaggggtcccttgggaacttcagtgaccttcagatagactcatgtggcatctcagacaggtgtttgcccaactattgtgaacacggtggggagtgttcccagtcctggagcacctttcattgtaactgtaccaacactggttacagaggagctacttgccataactctatctatgagcagtcatgtgaagcctataagcacagaggaaatacttcagggttttactatatagattcagatggaagtggtcccctggaaccatttcttctatattgcaatatgaccgaaactgcatggaccatcatacagcacaacggctctgacttaacaagagtcagaaatactaatccagagaacccatatgctgggtttttcgagtatgtggccagcatggagcaacttcaggccactattaaccgtgcagagcactgtgaacaggagtttacttattactgcaagaagtcacggctggtcaataagcaagatggaacccctctgagttggtgggtaggaagaaccaatgaaacgcaaacctactggggaggttcttcgcctgatcttcaaaaatgtacttgtggattagagggaaactgcattgattctcagtattactgcaattgtgatgctgaccggaatgaatggaccaatgacactggattgcttgcttataaagaacatcttccagtaactaagatcgtgattacagacacaggccgactgcattcagaagcagcttataaactggggcctctgctctgccagggagacagatcattttggaattcagcttcctttgataccgaggcttcatatcttcattttcctaccttccacggagaacttagcgcggatgtatctttcttttttaagacaacagcttcatctggggtatttttagagaacttggggattgctgattttatacggatagagcttcgctctccgacagtagtgactttttcatttgatgtggggaatgggccttttgaaatctcagtgcagtcacccacccacttcaacgacaaccagtggcaccatgtgagggttgaaaggaacatgaaggaggcctcccttcaagtggatcagctgacaccaaagacacagcccgcccccgctgatgggcatgtcctgttacagctcaacagtcagctcttcgtgggtggaacggccaccagacagagaggctttctgggctgcattcggtctctgcagttgaatgggatgaccctggatttggaagaaagagcccaggtgactccagaagtgcagccaggttgtaggggacattgcagcagctatgggaagttatgccgcaatggagggaaatgcagagaaagacccattgggttcttttgtgactgcactttctctgcatacacagggccattctgctcaaatgagatttctgcatattttggatctggctcatccgtgatatacaattttcaagaaaattatcttttaagtaaaaactccagctcccacgctgcttcatttcatggtgatatgaagctgagcagagaaatgatcaaatttagtttccgaacaacacgaacaccaagcttgctgctttttgtgagctccttttacaaagaatacctttctgtgatcattgccaaaaatggaagtttgcagatcaggtacaagttaaataaatatcaagagcctgatgttgttaactttgattttaaaaacatggctgatggacaacttcaccacataatgattaacagagaagaaggagtggtctttatagagattgacgataatagaaggagacaagttcacctgtcatcaggcacagaattcagtgcagtcaaatctctggtattgggcaggattttagaacacagtgatgtggaccaggatactgcactggcaggtgcgcagggcttcacaggctgcctctctgcagtgcagctcagccacgtggcccctctgaaggcagctctgcaccccagccacccagaccctgtcactgttacaggacacgtgactgagtccagctgtatggcccagcctggcactgatgccacatcaagggaaaggacacactcgtttgcagatcattctggaacaatagatgacagagagccccttgctaatgcaatcaaaagtgactctgcagtaattggaggtctgatagctgttgtgatttttatcttgctttgcatcactgccatagctgttcgcatttatcagcagaaaaggttatataaaagaagtgaggcaaaaaggtcagagaatgtagacagtgctgaggctgttctgaaaagtgagcttaatatacaaaatgcagtcaatgaaaatcagaaagagtacttcttctgattggcagctatgatttaacataaaattatgatagtttgttttaatagccaggggttctcaatggaaaaacgaatgctcttacactgaatgtacaggcagtgggcttgcagcactgccatcttgccatgtacaggcttggggtggctccaggaagcctcgtccagtgatatatttctcatagcattcattctatggaacaagaaattagatattgctgttaattttcaactgttctggtatgatctaaaacaagtttaacctgcttaatggctacagtttttacatgtgaaaactgtagccttggtctcttaaccatgtaatacataagttttgttagaggtaaaaattaaatttggactataatgtccttgctttatttgagaacatttgctgtgtttgcttttgtctcctcgtggtgttattcatagacctggaaatgcttctcagatcctgtgtggccggtgtttgcatcttcagtggccacaagcataataaagcccctttgcctttctctgtattatattcaatacaatacatcaatagtcttgaaaaatg

SEQ ID NO: 1094 - protein, 1308 aa, Homo sapiens
MGSVTGAVLKTLLLLSTQNWNRVEAGNSYDCDDPLVSALPQASFSSSSELSSSHGPGFARLNRRDGAGGWSPLVSNKYQWLQIDLGERMEVTAVATQGGYGSSNWVTSYLLMFSDSGWNWKQYRQEDSIWGFSGNANADSVVYYRLQPSIKARFLRFIPLEWNPKGRIGMRIEVFGCAYRSEVVDLDGKSSLLYRFDQKSLSPIKDIISLKFKTMQSDGILLHREGPNGDHITLQLRRARLFLLINSGEAKLPSTSTLVNLTLGSLLDDQHWHSVLIQRLGKQVNFTVDEHRHHFHARGEFNLMNLDYEISFGGIPAPGKSVSFPHRNFHGCLENLYYNGVDIIDLAKQQKPQIIAMGNVSFSCSQPQSMPVTFLSSRSYLALPDFSGEEEVSATFQFRTWNKAGLLLFSELQLISGGILLFLSDGKLKSNLYQPGKLPSDITAGVELNDGQWHSVSLSAKKNHLSVAVDGQMASAAPLLGPEQIYSGGTYYFGGCPDKSFGSKCKSPLGGFQGCMRLISISGKVVDLISVQQGSLGNFSDLQIDSCGISDRCLPNYCEHGGECSQSWSTFHCNCTNTGYRGATCHNSIYEQSCEAYKHRGNTSGFYYIDSDGSGPLEPFLLYCNMTETAWTIIQHNGSDLTRVRNTNPENPYAGFFEYVASMEQLQATINRAEHCEQEFTYYCKKSRLVNKQDGTPLSWWVGRTNETQTYWGGSSPDLQKCTCGLEGNCIDSQYYCNCDADRNEWTNDTGLLAYKEHLPVTKIVITDTGRLHSEAAYKLGPLLCQGDRSFWNSASFDTEASYLHFPTFHGELSADVSFFFKTTASSGVFLENLGIADFIRIELRSPTVVTFSFDVGNGPFEISVQSPTHFNDNQWHHVRVERNMKEASLQVDQLTPKTQPAPADGHVLLQLNSQLFVGGTATRQRGFLGCIRSLQLNGMTLDLEERAQVTPEVQPGCRGHCSSYGKLCRNGGKCRERPIGFFCDCTFSAYTGPFCSNEISAYFGSGSSVIYNFQENYLLSKNSSSHAASFHGDMKLSREMIKFSFRTTRTPSLLLFVSSFYKEYLSVIIAKNGSLQIRYKLNKYQEPDVVNFDFKNMADGQLHHIMINREEGVVFIEIDDNRRRQVHLSSGTEFSAVKSLVLGRILEHSDVDQDTALAGAQGFTGCLSAVQLSHVAPLKAALHPSHPDPVTVTGHVTESSCMAQPGTDATSRERTHSFADHSGTIDDREPLANAIKSDSAVIGGLIAVVIFILLCITAIAVRIYQQKRLYKRSEAKRSENVDSAEAVLKSELNIQNAVNENQKEYFF

SEQ ID NO: 1095 - DNA, 4327 bp, Homo sapiens
gcttttgctgcttcctcattttctcttgcagccgccatgattctgaggccttcccagctatgtggaactatgactgtgatgatcctcttgtgtctgccttgcctcaggcatccttcagcagttcttccgagctctccagcagtcatggtcctggatttgcaaggctgaatagaagagatggagctggtggctggtctccacttgtgtctaacaaataccagtggttgcagattgaccttggagagagaatggaggtcaccgctgtggccactcaagggggatatggtagctccaactgggtgaccagctacctcctgatgttcagtgatagtggctggaactggaaacaatatcgccaagaggacagcatctggggtttttcaggaaatgcaaatgcagacagtgttgtgtactatagactccagccttctatcaaagccagatttctgcgcttcatccctttggaatggaaccccaagggcagaattggaatgcgaatcgaagtgttcggatgtgcatacagatcagaagtggttgatcttgatggaaaaagttcccttctctacagatttgatcaaaaatccctgagcccaataaaagacattatttctttgaaattcaaaaccatgcagagtgatgggattctactccacagggaagggccaaatggagatcacatcacactgcaattaagaagagcaagactctttttacttattaattcaggtgaagctaaactgccttccacttccaccctggtcaatctcaccctgggcagcctgctagatgatcagcattggcattcagtgctcatccagcgtttgggcaaacaagtcaacttcacagtggacgaacacaggcatcatttccatgcacggggagaattcaatctcatgaatcttgattatgagggaaatgtgtcattttcttgttcacaaccacaatctatgcccgtgacttttctgagctccaggagttatttagcactgccagacttctctggagaggaggaggtttctgccacttttcaatttcgaacttggaataaggcagggcttctgctgttcagtgaacttcagctgatttcagggggtatcctcctctttctgagtgatggaaaacttaagtcgaatctctaccagccaggaaaattacccagtgacatcacagcaggtgtcgaattaaatgatgggcagtggcattctgtctctttatctgctaaaaagaatcacttgagtgtggcggtggacggccagatggcttctgctgctcctctgctggggcctgagcagatttattcgggtggcacctattattttggaggttgtcctgacaaaagctttggatccaaatgtaaaagtccacttggtggatttcagggatgtatgaggctcatttctatcagcggcaaagtggtagatctgatttcagttcagcaggggtcccttgggaacttcagtgaccttcagatagactcatgtggcatctcagacaggtgtttgcccaactattgtgaacacggtggggagtgttcccagtcctggagcacctttcattgtaactgtaccaacactggttacagaggagctacttgccataactctatctatgagcagtcatgtgaagcctataagcacagaggaaatacttcagggttttactatatagattcagatggaagtggtcccctggaaccatttcttctatattgcaatatgaccgaaactgcatggaccatcatacagcacaacggctctgacttaacaagagtcagaaatactaatccagagaacccatatgctgggtttttcgagtatgtggccagcatggagcaacttcaggccactattaaccgtgcagagcactgtgaacaggagtttacttattactgcaagaagtcacggctggtcaataagcaagatggaacccctctgagttggtgggtaggaagaaccaatgaaacgcaaacctactggggaggttcttcgcctgatcttcaaaaatgtacttgtggattagagggaaactgcattgattctcagtattactgcaattgtgatgctgaccggaatgaatggaccaatgacactggattgcttgcttataaagaacatcttccagtaactaagatcgtgattacagacacaggccgactgcattcagaagcagcttataaactggggcctctgctctgccagggagacagatcattttggaattcagcttcctttgataccgaggcttcatatcttcattttcctaccttccacggagaacttagcgcggatgtatctttcttttttaagacaacagcttcatctggggtatttttagagaacttggggattgctgattttatacggatagagcttcgctctccgacagtagtgactttttcatttgatgtggggaatgggccttttgaaatctcagtgcagtcacccacccacttcaacgacaaccagtggcaccatgtgagggttgaaaggaacatgaaggaggcctcccttcaagtggatcagctgacaccaaagacacagcccgcccccgctgatgggcatgtcctgttacagctcaacagtcagctcttcgtgggtggaacggccaccagacagagaggctttctgggctgcattcggtctctgcagttgaatgggatgaccctggatttggaagaaagagcccaggtgactccagaagtgcagccaggttgtaggggacattgcagcagctatgggaagttatgccgcaatggagggaaatgcagagaaagacccattgggttcttttgtgactgcactttctctgcatacacagggccattctgctcaaatgagatttctgcatattttggatctggctcatccgtgatatacaattttcaagaaaattatcttttaagtaaaaactccagctcccacgctgcttcatttcatggtgatatgaagctgagcagagaaatgatcaaatttagtttccgaacaacacgaacaccaagcttgctgctttttgtgagctccttttacaaagaatacctttctgtgatcattgccaaaaatggaagtttgcagatcaggtacaagttaaataaatatcaagagcctgatgttgttaactttgattttaaaaacatggctgatggacaacttcaccacataatgattaacagagaagaaggagtggtctttatagagattgacgataatagaaggagacaagttcacctgtcatcaggcacagaattcagtgcagtcaaatctctggtattgggcaggattttagaacacagtgatgtggaccaggatactgcactggcaggtgcgcagggcttcacaggctgcctctctgcagtgcagctcagccacgtggcccctctgaaggcagctctgcaccccagccacccagaccctgtcactgttacaggacacgtgactgagtccagctgtatggcccagcctggcactgatgccacatcaagggaaaggacacactcgtttgcagatcattctggaacaatagatgacagagagccccttgctaatgcaatcaaaagtgactctgcagtaattggaggtctgatagctgttgtgatttttatcttgctttgcatcactgccatagctgttcgcatttatcagcagaaaaggttatataaaagaagtgaggcaaaaaggtcagagaatgtagacagtgctgaggctgttctgaaaagtgagcttaatatacaaaatgcagtcaatgaaaatcagaaagagtacttcttctgattggcagctatgatttaacataaaattatgatagtttgttttaatagccaggggttctcaatggaaaaacgaatgctcttacactgaatgtacaggcagtgggcttgcagcactgccatcttgccatgtacaggcttggggtggctccaggaagcctcgtccagtgatatatttctcatagcattcattctatggaacaagaaattagatattgctgttaattttcaactgttctggtatgatctaaaacaagtttaacctgcttaatggctacagtttttacatgtgaaaactgtagccttggtctcttaaccatgtaatacataagttttgttagaggtaaaaattaaatttggactataatgtccttgctttatttgagaacatttgctgtgtttgcttttgtctcctcgtggtgttattcatagacctggaaatgcttctcagatcctgtgtggccggtgtttgcatcttcagtggccacaagcataataaagcccctttgcctttctctgtattatattcaatacaatacatcaatagtcttgaaaaatgaaaaa

SEQ ID NO: 1096 - protein, 1235 aa, Homo sapiens
MWNYDCDDPLVSALPQASFSSSSELSSSHGPGFARLNRRDGAGGWSPLVSNKYQWLQIDLGERMEVTAVATQGGYGSSNWVTSYLLMFSDSGWNWKQYRQEDSIWGFSGNANADSVVYYRLQPSIKARFLRFIPLEWNPKGRIGMRIEVFGCAYRSEVVDLDGKSSLLYRFDQKSLSPIKDIISLKFKTMQSDGILLHREGPNGDHITLQLRRARLFLLINSGEAKLPSTSTLVNLTLGSLLDDQHWHSVLIQRLGKQVNFTVDEHRHHFHARGEFNLMNLDYEGNVSFSCSQPQSMPVTFLSSRSYLALPDFSGEEEVSATFQFRTWNKAGLLLFSELQLISGGILLFLSDGKLKSNLYQPGKLPSDITAGVELNDGQWHSVSLSAKKNHLSVAVDGQMASAAPLLGPEQIYSGGTYYFGGCPDKSFGSKCKSPLGGFQGCMRLISISGKVVDLISVQQGSLGNFSDLQIDSCGISDRCLPNYCEHGGECSQSWSTFHCNCTNTGYRGATCHNSIYEQSCEAYKHRGNTSGFYYIDSDGSGPLEPFLLYCNMTETAWTIIQHNGSDLTRVRNTNPENPYAGFFEYVASMEQLQATINRAEHCEQEFTYYCKKSRLVNKQDGTPLSWWVGRTNETQTYWGGSSPDLQKCTCGLEGNCIDSQYYCNCDADRNEWTNDTGLLAYKEHLPVTKIVITDTGRLHSEAAYKLGPLLCQGDRSFWNSASFDTEASYLHFPTFHGELSADVSFFFKTTASSGVFLENLGIADFIRIELRSPTVVTFSFDVGNGPFEISVQSPTHFNDNQWHHVRVERNMKEASLQVDQLTPKTQPAPADGHVLLQLNSQLFVGGTATRQRGFLGCIRSLQLNGMTLDLEERAQVTPEVQPGCRGHCSSYGKLCRNGGKCRERPIGFFCDCTFSAYTGPFCSNEISAYFGSGSSVIYNFQENYLLSKNSSSHAASFHGDMKLSREMIKFSFRTTRTPSLLLFVSSFYKEYLSVIIAKNGSLQIRYKLNKYQEPDVVNFDFKNMADGQLHHIMINREEGVVFIEIDDNRRRQVHLSSGTEFSAVKSLVLGRILEHSDVDQDTALAGAQGFTGCLSAVQLSHVAPLKAALHPSHPDPVTVTGHVTESSCMAQPGTDATSRERTHSFADHSGTIDDREPLANAIKSDSAVIGGLIAVVIFILLCITAIAVRIYQQKRLYKRSEAKRSENVDSAEAVLKSELNIQNAVNENQKEYFF

SEQ ID NO: 1097 - DNA, 1787 bp, Homo sapiens
gttggacatcagctggggctggagtcacctgcaggctggcctggggtcgggcagggggatctgcttccaaggctctgcttcagaggcggctccctcccacggtaggcgcatggtttcctgtctccaaagtgggcctctgcacaaggctgcttggatgacctcatgatatggtggctgctgaccagggtagaggctggaaccccttggatggcccaacctgggaggtactagccatgcctctgccattgggcccggccacacaggttcctgccctcttctccgctgcccttgtgcctcccgtgtcctcgctgcgtcctaaccaaatgctggactggcagagactgaaaacgccccacggggcccctgtggcttgctcactcgggctctccggagagtgggtgccaaccccctgcgccctgagcatcttggctctgcttggcttgcagctggatcccctttttggactttggggctgcacacgcaccttgttctggagcgaatgggctcgtgagagccgcaggccctgaggcatggcctaactcaggcagagtagttggcgaaggccccagagggacccaggctatcgtcctgcagctgccggcaaaaccatcaacggatgctgacatcagcgagcaaaagtgtgatgaagaacggcgatttgcatcgtttcaaagtatctctccatgagatacttactaatttcaaaggggacaatggccaggtgaagcctggcagatgtcacttacactgagtgatccatgttgccatctccagggtgacacggtgtgcctgtgacatgaagcgccaaggggaacccaatgtcatttctggggttcttcctgccccaaacagtccatttggttaaactcacgagagtgtgtgcttgtcgatgtagctgattctgtatgggtggggatttggaccagcccttcactactcaaagtggggtctgtacaccagcagcagggttacctccttaaccccgagcttgtaagaaagcacagccaagcatggtggctcatgtttgtaatcctagcactttgggaggctgaggtgggtggatcatctgaggtcaggagtttgagaccagcctggccaacatgatgaaaccccgtttctactaaaaatacaaaaattagccaggcgtggtgatgggtgcctgtaatcccagctacgtgggaggctgaggcaggagaatcacttgaacccagaaggtgcaggttgcagtgagctgagatcgtgccactgcactccagcctgggcgacaagagcgaaactctgtctcaaaaaaaaaaaaaaaaaagaaagaaagaaagaaagaaattaagagtctcgggccctgccccagacctagaatcaggacctgcatgttaacaaaccccacatctgtgatccctgtccacagtaaaggctgagaatgcttaatccaaaacaccttccgcctcccagagcttgtggctttgatgccatttgtctgaacatcacaaggaaccacgtgggaaaacaggacttcgtggcgtgccctggcagacaagccaaagcaactgtgggcatcaggctgtggggcggcatccctaggactcagaataatgcctgcgcacagtaggcacggaagtatttgtggaaggaagaaatggagatcatcatgaaataagcgctattggccgggcacggtggctcacgcctgtaatcccagcacttcgggaggccgaggtaggcggatcacctgaggttaggagttcgagaccagcctggccaacatgatgaaaccttatctctactaaaaa

SEQ ID NO: 1098 - DNA, 981 bp, Homo sapiens
atgaggattatccggggggccctgagtgtaacagtgaggattatgcaggggggccctgagtgtaacaatgaggattatccggggggccctgagtgtaacggtgaggattatccggggggccctgagtgtaacggtgaggattattcagggggccctgagtgcaacggtgaggattattcaggggggcctgagagtaacagtgaggattatccaggggggcctgagagtaacagtgaggattatccaggggggcctgagagtaacactaacagtgaggattatccggggggcctgagtgtaacagtgaggattatccaggggggccctgagagtaacagcgaggattatccggggggccctgagtgcaacagtgaggattatccaggggggcctgagagtaacagtgaggattatccaggggggcctgagagtaacagtgaggattatccaggggggcctgagagtaacataacagtgaggattatccaggggggccctgagtgtaacagtgaggattatccagggggccctgagtgtaacagtgaggattatcagagggaccctgagtgcaacagtgaggattatccggggggcctgagagtaacagtgaggattatccaggggggccctgagtgtaacagtgaggattatccagggggccctgagtgtaacagtgaggattatcagagggaccctgagtgcaacaggggccctgagtgtaacagcgaggattatccaggggggcctgagagtaacagtgaggattatccaggggggcctgagagtaacagtgaggattatccaggggggcctgagagtaacagtgaggattatccaggtgccctgagtgtaacagtgaggattatccaggggggccctgagtgtaacagcgaggattatccagggggccctgagtgcaacagtgaggattatccaggggggcctgagtgtaacagtgaggattatccaggggggccctga

SEQ ID NO: 1099 - protein, 326 aa, Homo sapiens
MRIIRGALSVTVRIMQGGPECNNEDYPGGPECNGEDYPGGPECNGEDYSGGPECNGEDYSGGPESNSEDYPGGPESNSEDYPGGPESNTNSEDYPGGLSVTVRIIQGGPESNSEDYPGGPECNSEDYPGGPESNSEDYPGGPESNSEDYPGGPESNITVRIIQGGPECNSEDYPGGPECNSEDYQRDPECNSEDYPGGLRVTVRIIQGGPECNSEDYPGGPECNSEDYQRDPECNRGPECNSEDYPGGPESNSEDYPGGPESNSEDYPGGPESNSEDYPGALSVTVRIIQGGPECNSEDYPGGPECNSEDYPGGPECNSEDYPGGP

SEQ ID NO: 1100 - DNA, 1941 bp, Homo sapiens
cttcccagaggcgcgagtcgcttttccaggagccgaggcccaaacggggccgggcctgaagggtcccccgccagcccgcggccgcgccatcaatcgccgccgcctcgtcccgcttctcggctgaggcgccgcgcggccaggcagcgggtccaggcctcagccgcgcgcccaggggcctccggggccctcccgggtcagcatgcccggggtgaaactgaccacccaggcctactgcaagatggtgctgcacggcgccaagtacccgcactgcgccgtcaacgggctcctggtggccgagaagcagaagccgcgtaaggagcacctccccctgggcggccccggcgcccaccacaccctcttcgtggactgcatccccctcttccacggcaccctggccctcgcccccatgctggaggtggctctcaccctgattgattcatggtgcaaagatcatagctacgtgattgctggttattatcaagctaatgagcgagtaaaggatgccagtccaaaccaggttgcagagaaggtggcctccagaatcgccgagggcttcagcgacactgcgctcatcatggtagacaacaccaagtttacgatggactgcgtagcgcctacgatccacgtgtacgagcaccatgagaacagatggcggtgcagagacccacaccatgactactgtgaagactggccagaggcacagaggatctcagcctcgctcctggacagccggtcctacgagacgctcgtggatttcgataaccacctggatgacattcggaatgactggacaaacccagagatcaataaagctgtcctacacttgtgctaggcaggcaccgctgtgactgggctccgggcctttccactacgttgaagaagaaaacctatttttaaatgtaaataaaatatctggtagcctgtgtggaaagctgaccgttttaagaagtggcatgtgccttgaaagggggcagaatgttcagtcggtcgtgtttttaacacagagtctctagaagaggtgcagacatcccgtctgactgtccctgtggactctctcagttgtatgttgctataatcctccaaatcaaagctctttctgcttgtgcaagattgttcctattaaacagttttaactaaccttttataatctggagagaatactttttaaggcttttgaactatctttttttaaaaaaaaaaaaaagcccacatcttatactccaatgagtgtgtttgtgagtttttatcctgtttgaattttgatgtcgtccaggcgtcctgggatcagggtagacacgtggagtgctggtgctgagctgtttgagaagctctgtgtgggtgtttctgtggtcaggtaggctgggctgtgaacagcactgctccacatggtgtcggctcacagagccaccgcaactctgcccagcgggagtgacaccactgatgccacagaagcctttatcgttaggggcaaaagcagacatctctggtagcaggagctcagtgtggtgctcttcagccacgcagaaagctcacgtgcctgcagggccaggaaagggaaatgatcgtttcttttgtattaggaaaaacaagacttagacttcccgagttgtgcagagtgacgtctgtactttttatacttagaacatttggtcaagttttgtaaccaaaccttagggaattgagagggaaactttatggtacgtttaccttttttcctttttatatgaattattttgtacaaagttcagagagcggtacctttcctactgtcttttctttgactccatggaggaatttgtaacgatcggtgtgacctgaaagggtttgtgatacagcggtcactattttctcttaacacataggaaaaaagttcagacatcgctacaataaatgtgctttatttgatccaaaaaaaaaaaaaaaaaaaaaaaaaaaaaaaaa

SEQ ID NO: 1101 - protein, 210 aa, Homo sapiens
MPGVKLTTQAYCKMVLHGAKYPHCAVNGLLVAEKQKPRKEHLPLGGPGAHHTLFVDCIPLFHGTLALAPMLEVALTLIDSWCKDHSYVIAGYYQANERVKDASPNQVAEKVASRIAEGFSDTALIMVDNTKFTMDCVAPTIHVYEHHENRWRCRDPHHDYCEDWPEAQRISASLLDSRSYETLVDFDNHLDDIRNDWTNPEINKAVLHLC

SEQ ID NO: 1102 - DNA, 708 bp, Homo sapiens
atggcgcggccgcgggctggcgggggacccttcaggcccggccccgtttgggcctcggctcctggaaaagcgactcgcgcctctgggaagccgcagccccagactccagtcgcgcttctcgcccggcgccgccggaaagcagcctctccaacgcctgccggaaagcagcccggcccggcattttacgacgttcgcagcgctacccttttccgctccacggtgacctccgtgcggccgggtgcgggcggagtcttcctcgatcccgtggtgctccgcggcgcggccttgctctcttccggtcgcgggacaccgggtgtagagggcggtcgcggcgggcagtggcggcaggtgagacaggaggtggccggtgcggcgccgccaggccgggccgggtcggggggccgggagccatcaagtctgcacgtccgcagcctggccgctcggcttcagcaggaagcaccgaatgggcctcggagccaggtgacattgaggccggcccgtggggactccgggctcggtggctccaggctcggggggccgccccgaagtgcccggtccatcttacccggtctcgcagcggctgcggaccggcctcgggcactgaccttggagcgcccgctggccgagggctcaggctgcggggaggcgggcccgcgctctgtgcctgcagcctccgcccttgctccttcaaaagggattggaaattga

SEQ ID NO: 1103 - protein, 235 aa, Homo sapiens [sequence omitted]

SEQ ID NO: 1104 - DNA, 802 bp, Homo sapiens
cgacgttcgcagcgctacccttttccgctccacggtgacctccgtgcggccgggtgcgggcggagtcttcctcgatcccgtggtgctccgcggcgcggccttgctctcttccggtcgcgggacaccgggtgtagagggcggtcgcggcgggcagtggcggcagaatgttggctaccagggtatttagcctagttggcaagcgagcaatttccacctctgtgtgtgtacgagctcatgaaagtgttgtgaagagcgaagacttttcgctcccagcttatatggatcggcgtgaccaccccttgccggaggtggcccatgtcaagcacctgtctgccagccagaaggcactgaaggagaaggagaaggcctcctggagcagcctctccatggatgagaaagtcgagttgtatcgcattaagttcaaggagagctttgctgagatgaacaggggctcgaacgagtggaagacggttgtgggcggtgccatgttcttcatcggtttcaccgcgctcgttatcatgtggcagaagcactatgtgtacggccccctcccgcaaagctttgacaaagagtgggtggccaagcagaccaagaggatgctggacatgaaggtgaaccccatccagggcttagcctccaagtgggactacgaaaagaacgagtggaagaagtgagagatgctggcctgcgcctgcacctgcgcctggctctgtcaccgccatgcaactccatgcctatttactggaaacctgttatgccaaacagttgtaccactgctaataaatgaccagtttacctgaaa

SEQ ID NO: 1105 - protein, 169 aa, Homo sapiens
MLATRVFSLVGKRAISTSVCVRAHESVVKSEDFSLPAYMDRRDHPLPEVAHVKHLSASQKALKEKEKASWSSLSMDEKVELYRIKFKESFAEMNRGSNEWKTVVGGAMFFIGFTALVIMWQKHYVYGPLPQSFDKEWVAKQTKRMLDMKVNPIQGLASKWDYEKNEWKK

SEQ ID NO: 1106 - DNA, 1652 bp, Homo sapiens
cctcaggtggatcgccgcggcccctcctcccagagcggcagccttttcccgcgcgtgctgccttcgccgctcgggccgcccgggggaaaacatggcgtctgccctggagcagttcgtgaacagtgtccgacagctctcagctcaagggcaaatgacacagctttgtgaactgatcaacaagagtggggaactccttgcgaagaacttatcccatctggacactgtgctcggggctctggatgtacaagaacactccttgggcgtccttgctgttttgtttgtgaagttttctatgcccagtgttcctgacttcgaaacgctattctcacaggttcagctcttcatcagcacttgtaatggggagcacattcgatatgcaacagacacttttgctgggctttgccatcagctaacaaatgcacttgtggaaagaaaacagcccctgcgaggaattggcatccttaagcaagccatagacaagatgcagatgaatacaaaccagctgacctcaatacatgctgatctctgccagctttgtttgctagcaaaatgctttaagcctgcccttccatatcttgacgtggatatgatggatatctgtaaagagaatggagcctatgatgcaaaacactttttatgttactattattatggagggatgatctatactgggctgaagaactttgaaagagctctctacttttatgaacaggctataactactcctgccatggcggtcagtcatatcatgttggaatcatataaaaagtatattttagtgtctttgatattacttggcaaagtacaacagctaccaaaatatacatctcaaattgtgggtagattcattaagcctcttagcaatgcataccacgagttagcacaagtgtattcaaccaacaacccctcagaactccgaaacctggtgaataagcacagtgaaaccttcactcgcgataacaacatggggctggtgaagcaatgcttgtcatctctttataagaagaatattcagaggctaacaaagacctttttaactctatcattacaagatatggcaagtcgtgtgcagttgtctggacctcaggaggcagagaaatacgttctgcacatgatagaagatggtgagatttttgcaagtattaaccagaaggacggtatggtcagtttccatgataaccctgaaaaatataataacccagccatgcttcataacattgatcaggagatgctgaagtgcattgagctggatgagcggctgaaagccatggaccaggagatcacagtgaaccctcagtttgtacaaaagagtatgggctcacaagaagatgattcaggaaacaaaccatccagttattcttgaaactaacatccatcctgagctaaacaagagaaactaccatcttggccagtgacaagtgttcggagggcagcagagaggaccaagcctgtgtcacctggagactaagaaattaagttttgttttgacatcttcagtcctgtgtgctttcagaaaaccattttctctgcaaagaaaggaaacagatttgcaaactttaaagtctgtcgtggatttatttatcctcagattattgttactgcattaaatctacctttttgttttaagttgcttgaaaaaaaaaaaaaaaaaa

SEQ ID NO: 1107 - protein, 423 aa, Homo sapiens
MASALEQFVNSVRQLSAQGQMTQLCELINKSGELLAKNLSHLDTVLGALDVQEHSLGVLAVLFVKFSMPSVPDFETLFSQVQLFISTCNGEHIRYATDTFAGLCHQLTNALVERKQPLRGIGILKQAIDKMQMNTNQLTSIHADLCQLCLLAKCFKPALPYLDVDMMDICKENGAYDAKHFLCYYYYGGMIYTGLKNFERALYFYEQAITTPAMAVSHIMLESYKKYILVSLILLGKVQQLPKYTSQIVGRFIKPLSNAYHELAQVYSTNNPSELRNLVNKHSETFTRDNNMGLVKQCLSSLYKKNIQRLTKTFLTLSLQDMASRVQLSGPQEAEKYVLHMIEDGEIFASINQKDGMVSFHDNPEKYNNPAMLHNIDQEMLKCIELDERLKAMDQEITVNPQFVQKSMGSQEDDSGNKPSSYS

SEQ ID NO: 1108 - DNA, 1633 bp, Homo sapiens
cggcctcgctctggggccggtacttgcgcgcccgcaccccgcgctccccgccccgctccccgtcccgcgctccacgcgcgccccagcgttgggggcttctcctccgcggcgggaatgtctggccggctccggcagcacggcgcggcccaggtccccgcgcccacgacgggccagcgcgctgggccatgatccggctgggcggctggtgtgcgcggcggctctgcagcgcggcggttcccgcggggcggcgcggggcggcgggcgggctgggcctggcgggaggccgcgccctacgggtgctggtggacatggacggcgtgctggctgacttcgagggcggattcctcaggaagttccgcgcgcgctttcccgaccagcccttcatcgcgctggaggaccggcgcggcttctgggtgtcggagcagtacggccgcctgcggccagggctgagcgagaaggccatcagcatttgggagtcaaagaatttcttttttgaacttgagcctctgccaggggccgtggaagctgtcaaggagatggccagcctacaaaacactgacgtcttcatctgcacaagccccatcaagatgttcaagtactgtccctatgagaagtatgcctgggtggagaagtactttggccctgactttctggagcagattgtgctgaccagagacaagaccgtggtctctgctgaccttctcatagacgaccggccggacatcacaggggccgagccaacccccagctgggagcatgtcctcttcaccgcctgccacaaccagcacctgcagctgcagcccccccgccgcaggctgcactcgtgggcggacgactggaaggccattctggacagcaagcggccctgctgagctggactgtgcttcgggctcctctgtggggctctgacctcagggctcccagctcggggcctgtggggccagtatgctggtctgggagtccctcctagactcctgggccccatgacctcctgctgcatgtcccttcccttccccagccctgccaggccttaacctgatcacggggcagggctgggccctctgggcgcttggacatagacacgtggtcccaggccgttcagcctgacctcaggcagcaggcaccaagctgccagaagcccaggggctcaggacagggaggagttgaggccactgttcagggggctggtggccgtctccactccctaggcaagttctctgaggcagaagggggttccctgttcccagagtctgcagccatcagcaaggaggaccaggaacccggcgactgaggtgcttccaggtggggacaagcccctcttggtctcagccacagcaccccttattccagctgccctgcccaacctgctcaccccacatgaccttctgtgtattcagcaaacactcactaggtgacagcggccaccaggctctgtgctgggggacgatactggccctggcctcgaccagcttagaggtttctcacacctctgttcccagggccccgctcagggcccagcagagagtccgtaggcttgaacatgtgttgagtgcatgaaaaataaatgctgttcatgtgtgtagctcaaaaaaaaaaaaaaaaaaaaaaaaaaaaaaaaaaaaaaaaaaaaaaa

SEQ ID NO: 1109 - protein, 228 aa, Homo sapiens
MIRLGGWCARRLCSAAVPAGRRGAAGGLGLAGGRALRVLVDMDGVLADFEGGFLRKFRARFPDQPFIALEDRRGFWVSEQYGRLRPGLSEKAISIWESKNFFFELEPLPGAVEAVKEMASLQNTDVFICTSPIKMFKYCPYEKYAWVEKYFGPDFLEQIVLTRDKTVVSADLLIDDRPDITGAEPTPSWEHVLFTACHNQHLQLQPPRRRLHSWADDWKAILDSKRPC

SEQ ID NO: 1110 - DNA, 770 bp, Homo sapiens
aaaaaaaaaaaaaacaagcctttccgctcggctgttttcctgctcaggagccgcagggccgtaggcagccatgacgcccagccggaatggcatggtcttgaagccccacttccacaaggactggcagcggcgcgtggccacgtggttcaaccagccggcccggaagatccgcagacgtaaggcccggcaagccaaggcgcgccgcatcgccccgcgccccgcgtcggggcccatccggcccatcgtgtgctgccccacggttcggtaccacacgaaggtgcgcgccggccgcggcttcaatctggaggagctcagggtggccggcattcacaagaaggtggcccggaccatcggcatttctgtggatccgaggaggcggaacaagtccacggagtccctgcaggcgaacgtgcagcggctgaaggagtaccgctccaaactcatcctcttccccaggaagccctcggcccccaagaagggagacagttctgctgaagaactgaaactggccacccagctgaccggaccggtcatgcccatccggaatgtctataagaaggagaaagctcgagtgatcactgaggaagagaagaatttcaaagccttcgctagtctccgtatggcccgtgccaacgcccggctcttcggcatacgggcaaaaagagccaaggaagccgcagaacaggatgttgaaaagaaaaaataaagccctcctggggacttggaataaaaaaaaaaaaaaaaaaaaaaaaaaaaggagaccaaccaaa

SEQ ID NO: 1111 - protein, 211 aa, Homo sapiens [sequence omitted]

SEQ ID NO: 1112 - DNA, 1401 bp, Homo sapiens
atggtgctgctctttgtcatcgccattgggcctctccaggaccctgcccaccacatgccatgggagatcttactcactccccgagcttcagtcatggctgtgtcaatgcctccctgtcatgggaccctcttttctgagggaacttctactcatcacaaaaggacctcccatgatggcctgaaaaaagacaggaagaggggctcagaagatggctgatcagacagctgtgtgagcctcacagccatggcaccctccccagaggtttctgcagctgccaccacctccttaatgacagacaagcttggcctagacaacctcgcctgtgtgcctggcagaggacagtcagccagcaatcagcccagggaactctgtctggccagagcaaccaaactaggacacagccctttgagcaatccagcaactcgtacaaccacgtaggaaagctgtccggcagcatcggtcatcacagaacaattagaagcaaatctttccaaaaataatcgagctttgagtgttcttcgaaggataaagagtgggagtgtagtcgccaaccgagctaaccagggcaaggaaaattctgaaaacatcaccacccctgaagtctttccaaggttgtaccacctgatcccagatggtgaaattaccagcatcaagatcaatcaagtggatcccagtgaaagcctctccattatgctgatgggaggcagtgaaaccccactggtccgtatcatccaacacatttatcatgatggggcaaatgccagagatgaccagctactaccaggagacatcatcctaaatgtcaatgggatggacattagcaaagtctctcacaactacgctctgcatctcctgcggcagccctaccaggtgttgtgactgaccatgctgcacaaccagaagttctgcagcaggaacagtggacaggccctggatgcctacagaccccaggatgacagctgccatgtgatttgcaacaaaagtagccccaaggaacagcttggaataaaattggtgtgcaaggtggatgagcctggggtgtttatcttcaacgtgctagatggtagtgtggctgattgacatggtcagctggaggagaatgattgtgtgttagccatcaatggacatgaccttcaatatggcagcccagaaagcggtgcttatctgattcaggtattgctggccctcttcaccactttaaagcaatctctggcaaggccattacataagcagtgtcccttgccagctgtcaccaaggccaccggaaaaatcaagacatatatcctgcaagacctgggcatgaagccggtgcccacacctggcgtgtggatggccaggggtatttcctcgcagctcttagagccctttgtctacatcatctcacttgcagcctccccatga

SEQ ID NO: 1113 - DNA, 2222 bp, Homo sapiens
gtagagtgcgcgacgcttttggcgacccgacctctggctaacctacccccggagccatggcctctgctggggtggcagccgggcgacaggcggaggatgtattgccgccaacgtccgaccagccgctgcctgacaccaagccgctgccgcctcctcagccgccgccggtccctgcgcctcaaccgcagcagtcgccggcgccacggcctcagtcacctgcccgcgcgagggaggaagagaactactcctttttacctttggttcacaacatcatcaaatgcatggacaaggacagcccggaggtccaccaggacctgaacgccctcaaaagcaagttccaggagatgcgcaagctcatcagcaccatgcccggcatccacctgagccccgaacagcagcagcagcagctgcagagcctccgggagcaagtcaggaccaagaatgagcttctgcaaaagtacaagagcctctgcatgttcgaaatccccaaggagtagagtgaggctgacttccttagaaagagggggaagccaatggcctgtctccccactaccatccccaaacgctccttggggcgtggttcctgtggaccccagctcagctcgtcaagctgcaggggcggggctcctgtgctgctgcgcgcgcttcgcctgtgcgggagccagcgcagagcttggctgcgccgggggttcctcgtgtagatccatatgtctagatgcataataactggagtgcctgctggtggaagtcagaatgctcctggaggctgcagagggggtggaggactctcccctgcctctggggagggggccatctgctgcgcccggccccactgacagatctgaagagcacagtaggaagggaggcggctcctctttgcttccttccctctctctcctcccacccccataggatcagtgtgtaccaggtacacattgttcctgttaacagcagcttcttgaaacatttgcatagaattcactggacgaattaagcctgcactcatatggcatagaattgtgagagaatgttttgaaaggccagagggtggcctttttccccaaacagtttggttccttttatgtttgagccagtgaagggaactacgctttgggggcttcagcctagagccctgccaggcagcccctggctccaggttccctgcctcctagcgctctcctcgccttcagctcttgctcccttcctcgttcatcaccctcagtcagtgcccaagagtggccaaaccgcttcacatctgcagtgcttccccagggttgacaaggggccgtcctttccacacaggccagaagaggtcttcaggcgaaccgaccttcccccttctggcatttcagattccccttgctctggttaaaaggtctttccctcgtggcctttgcacttgcggcagcaacgtgtactacactgcagaagggttcagtatgcaccttgtgttgagagagaggcaaccctgggggccagttcaggtggtccccaaccataagctaggtctgaaagttacacagccaagtttgagctcttaaaagttgatgaacagcctcatttccccagcttccctgatttcttccagatgggacgttttatttgtgtgctctcccttgactgtcagattgaagtaagagcagttctctccgttgcctctcgaggaggaggtgcgaagtcctggagtattgtttgggtctcggaatgggcgcataacctgcgctgaccagtttaggggcttagcagatgcctgccagctgacctcgttggcaggagggttgggtggagatgtttttagcagagcttccattagtgtagacctgtagccacctgtcagaaggtgggtggcatattggggacctgggaatgtgtgaaggaggagatcaaatttcagtggctttggacagaaaagaaggctctggatttaagcgggtggtcacctgtgagaccaggtctaccttgggactgttatttaactgaatcagttatttccttgaaatttcacagtagtgggtgggcctgttttaaggctctgacagataccacgaaacatgaagcacgtggaactacaagacccccggggtctttctgagtgcaaggctgaaatggacaagggctcctcacgggggtggagggagccggagcctgccttgtgttccttttttgacttgtgacatttttcaaacacataattaaaaggacttatgctctgctgtctcagg

SEQ ID NO: 1114 - protein, 146 aa, Homo sapiens
MASAGVAAGRQAEDVLPPTSDQPLPDTKPLPPPQPPPVPAPQPQQSPAPRPQSPARAREEENYSFLPLVHNIIKCMDKDSPEVHQDLNALKSKFQEMRKLISTMPGIHLSPEQQQQQLQSLREQVRTKNELLQKYKSLCMFEIPKE

SEQ ID NO: 1115 - DNA, 1758 bp, Homo sapiens
agcaagcggcctgtgcccagatcctgggagaaccccagccgagcccagcctagcccgagcccagcccgagcggagccggagccccaagcccgagccgcgcccagcccgagcagagccctccagccgctcaccccgcgtgccaccccagcgaccctcagccgctctctgcccttctctcggccccgcgcccgccctcgcggcccctctgcccaatgaaactggccgcgatgatcaagaagatgtgcccgagcgactcggagctgagtatcccggccaagaactgctatcgcatggtcatcctcggctcgtccaaggtgggcaagacggccatcgtgtcgcgcttcctcaccggccgcttcgaggacgcctacacgcctaccatcgaggacttccaccgcaagttctactccatccgcggcgaggtctaccagctcgacatcctcgacacgtccggcaaccacccgttccccgccatgcggcgcctctccatcctcacaggagacgttttcatcctggtgttcagtctggacaaccgcgactccttcgaggaggtgcagcggctcaggcagcagatcctcgacaccaagtcttgcctcaagaacaaaaccaaggagaacgtggacgtgcccctggtcatctgcggcaacaagggtgaccgcgacttctaccgcgaggtggaccagcgcgagatcgagcagctggtgggcgacgacccccagcgctgcgcctacttcgagatctcggccaagaagaacagcagcctggaccagatgttccgcgcgctcttcgccatggccaagctgcccagcgagatgagcccagacctgcaccgcaaggtctcggtgcagtactgcgacgtgctgcacaagaaggcgctgcggaacaagaagctgctgcgggccggcagcggcggcggcggcggcgacccgggcgacgcctttggcatcgtggcacccttcgcgcgccggcccagcgtacacagcgacctcatgtacatccgcgagaaggccagcgccggcagccaggccaaggacaaggagcgctgcgtcatcagctaggagccccgccgcgctggcgacacaacctaaggaggacctttttgttaagtcaaatccaacggcccggtgcgccccaggccgggagcgcgcgcggactggcgtctcccctcccggcgatccgcccccagcactggggaggcgccactgaaccgagaagggacggtcatctgctccggaaggaaagagaacgggccaagactgggactattccccacccccggtcccccattgaggcccgccacccccataactttgggagcgagggcccagccgagggtggatttatcttctcaaagacctaagagtgagcgcggggtgggggagggatgtgaagttatccagcctctgctaggcttcaagaaaccgtcatgcccgcttgagggtcaggacccacggggcattatcttgtctgtgattccgggttgctgtgacagccggtagagcctctgccctcccgaaactaagcgggggggcgtgggtcaaatcatagccaagtgacttgtttacatgtgagtgaaactgcacaaaggaacacaaaacaaaacttgcactttaacggtagttccggtgtcaacatggacacgaacaaaaccttacccaggtgtttatactgtgtgtgtgtgaggtctttaaagttattgctttatttggttttttaatatacaataaaataatttaaaatggaaaaaaaaaaaaaaaa

SEQ ID NO: 1116 - protein, 281 aa, Homo sapiens
MKLAAMIKKMCPSDSELSIPAKNCYRMVILGSSKVGKTAIVSRFLTGRFEDAYTPTIEDFHRKFYSIRGEVYQLDILDTSGNHPFPAMRRLSILTGDVFILVFSLDNRDSFEEVQRLRQQILDTKSCLKNKTKENVDVPLVICGNKGDRDFYREVDQREIEQLVGDDPQRCAYFEISAKKNSSLDQMFRALFAMAKLPSEMSPDLHRKVSVQYCDVLHKKALRNKKLLRAGSGGGGGDPGDAFGIVAPFARRPSVHSDLMYIREKASAGSQAKDKERCVIS

SEQ ID NO: 1117 - DNA, 1008 bp, Homo sapiens
ctgaccacagagcgctgctcccgagaaccctgcacccctcaatggagtaaattaccataaagcctcttccttacccatgctttggggtgttaacagctgaggctattcgtcggtgacctgtgggactcgagctattcctgcagctcagcagacctcctggccgtggcagacttctgcgttatgacccggctgctgggctacgtggaccccctggatcccagctttgtggctgccgtcatcaccatcaccttcaatccgctctactggaatgtggttgcacgatgggaacacaagacccgcaagctgagcagggccttcggatccccctacctggcctgctactctctaagcgtcaccatcctgctcctgaacttcctgcgctcgcactgcttcacgcaggccatgctgagccagcccaggatggagagcctggacacccccgcggcctacagcctgggcctcgcgctcctgggactgggcgtcgtgctcgtgctctccagcttctttgcactggggttcgctggaactttcctaggtgattacttcgggatcctcaaggaggcgagagtgaccgtgttccccttcaacatcctggacaaccccatgtactggggaagcacagccaactacctgggctgggccatcatgcacgccagccccacgggcctgctcctgacggtgctggtggccctcacctacatagtggctctcctatacgaagagcccttcaccgctgagatctaccggcagaaagcctccgggtcccacaagaggagctgattgagctgcaacagctttgctgaaggcctggccagcctcctggcctgccccaagtggcaggccctgcgcagggcgagaatggtgcctgctgctcagggctcgcccccggcgtgggctgccccagtgccttggaacctgctgccttggggaccctggacgtgccgacatatggccattgagctccaacccacacattcccattcaccaataaaggcaccctgaccccaa

SEQ ID NO: 1118 - protein, 199 aa, Homo sapiens
MTRLLGYVDPLDPSFVAAVITITFNPLYWNVVARWEHKTRKLSRAFGSPYLACYSLSVTILLLNFLRSHCFTQAMLSQPRMESLDTPAAYSLGLALLGLGVVLVLSSFFALGFAGTFLGDYFGILKEARVTVFPFNILDNPMYWGSTANYLGWAIMHASPTGLLLTVLVALTYIVALLYEEPFTAEIYRQKASGSHKRS

SEQ ID NO: 1119 - DNA, 1028 bp, Homo sapiens
gggggcgcgtggctgcagcggggcccgcgtggtgcctcctgaggcggcccccggatgaagagatctgggaacccgggagccgaggtaacgaacagctcggtggcagggcctgactgctgcggaggcctcggcaatattgattttagacaggcagacttctgcgttatgacccggctgctgggctacgtggaccccctggatcccagctttgtggctgccgtcatcaccatcaccttcaatccgctctactggaatgtggttgcacgatgggaacacaagacccgcaagctgagcagggccttcggatccccctacctggcctgctactctctaagcgtcaccatcctgctcctgaacttcctgcgctcgcactgcttcacgcaggccatgctgagccagcccaggatggagagcctggacacccccgcggcctacagcctgggcctcgcgctcctgggactgggcgtcgtgctcgtgctctccagcttctttgcactggggttcgctggaactttcctaggtgattacttcgggatcctcaaggaggcgagagtgaccgtgttccccttcaacatcctggacaaccccatgtactggggaagcacagccaactacctgggctgggccatcatgcacgccagccccacgggcctgctcctgacggtgctggtggccctcacctacatagtggctctcctatacgaagagcccttcaccgctgagatctaccggcagaaagcctccgggtcccacaagaggagctgattgagctgcaacagctttgctgaaggcctggccagcctcctggcctgccccaagtggcaggccctgcgcagggcgagaatggtgcctgctgctcagggctcgcccccggcgtgggctgccccagtgccttggaacctgctgccttggggaccctggacgtgccgacatatggccattgagctccaacccacacattcccattcaccaataaaggcaccctgaccccaaaaaaaaaaaaaaaaaaaaaaaaaaaaaaaaaaaaa

SEQ ID NO: 1120 - protein, 236 aa, Homo sapiens
MKRSGNPGAEVTNSSVAGPDCCGGLGNIDFRQADFCVMTRLLGYVDPLDPSFVAAVITITFNPLYWNVVARWEHKTRKLSRAFGSPYLACYSLSVTILLLNFLRSHCFTQAMLSQPRMESLDTPAAYSLGLALLGLGVVLVLSSFFALGFAGTFLGDYFGILKEARVTVFPFNILDNPMYWGSTANYLGWAIMHASPTGLLLTVLVALTYIVALLYEEPFTAEIYRQKASGSHKRS

SEQ ID NO: 1121 - DNA, 905 bp, Homo sapiens
ggcgaggagaggcacaccactattgttttaatttgcttttacctgattcctggcagacttctgcgttatgacccggctgctgggctacgtggaccccctggatcccagctttgtggctgccgtcatcaccatcaccttcaatccgctctactggaatgtggttgcacgatgggaacacaagacccgcaagctgagcagggccttcggatccccctacctggcctgctactctctaagcgtcaccatcctgctcctgaacttcctgcgctcgcactgcttcacgcaggccatgctgagccagcccaggatggagagcctggacacccccgcggcctacagcctgggcctcgcgctcctgggactgggcgtcgtgctcgtgctctccagcttctttgcactggggttcgctggaactttcctaggtgattacttcgggatcctcaaggaggcgagagtgaccgtgttccccttcaacatcctggacaaccccatgtactggggaagcacagccaactacctgggctgggccatcatgcacgccagccccacgggcctgctcctgacggtgctggtggccctcacctacatagtggctctcctatacgaagagcccttcaccgctgagatctaccggcagaaagcctccgggtcccacaagaggagctgattgagctgcaacagctttgctgaaggcctggccagcctcctggcctgccccaagtggcaggccctgcgcagggcgagaatggtgcctgctgctcagggctcgcccccggcgtgggctgccccagtgccttggaacctgctgccttggggaccctggacgtgccgacatatggccattgagctccaacccacacattcccattcaccaataaaggcaccctgaccccaaaaaaaaaaaa

SEQ ID NO: 1122 - protein, 199 aa, Homo sapiens; identical to SEQ ID NO: 1118

SEQ ID NO: 1123 - DNA, 3948 bp, Homo sapiens
agaagcagaaaaggttggataaaagataaggacagacccacgaagtcaagcatgcggagtgcagccaagccctggaacccagccatcagagcagggggccacggcccagaccgggtgcggcctctgcctgcagcctcttccggcatgaagagttctaagtcttcaacttccttggcttttgagtcccgactcagcaggctcaagagggccagcagtgaggacacgctcaacaagccaggaagtaccgctgcatcgggggtggttcgcctgaagaagaccgccactgccggagccatctcggagctcacggagagccgcctgaggagcggcacaggggcctttacaacaactaaacggacaggcattccagccccacgggaattttcagtaactgtctcaagagagaggtctgtgccacgtggtccctccaaccccaggaaatcagtgtccagtccaacttcttccaacactcccactcctacgaaacacctgaggaccccttccacaaagcccaagcaagagaatgaaggtggagaaaaggctgcgcttgagtcccaagttcgggaacttttggcagaagccaaagcaaaagatagtgaaattaacaggcttcgaagtgaactaaagaaatacaaagagaaaaggactctgaacgctgaggggactgatgctttgggcccaaatgtcgatggaacatcagtctccccaggtgacacggaacctatgataagagctcttgaggagaagaacaagaactttcagaaagagctttccgatctagaggaagaaaaccgggtcctgaaggagaaactgatctatcttgagcactccccaaattcagaaggggcagcaagtcacactggcgacagcagctgcccaacatccataactcaagagtcaagcttcggaagcccaactggaaatcagatgtccagtgacattgatgagtataaaaaaaacatacatggaaatgcattacggacatcaggctcctcaagtagcgatgttaccaaagcttctttgtcgccagatgcttccgactttgagcacattacagcagagacaccctcaaggcccctgtcctccaccagtaacccctttaagagttcaaagtgttctactgctgggagttccccaaacagcgtaagtgaattgtccctggcttccctcacagagaagatacaaaagatggaagaaaaccaccatagcactgcagaagaactacaggctactctacaagaattatcagaccagcaacaaatggtacaggaattgacagctgaaaatgagaagctggtggatgaaaagacgattttagagacatcctttcatcagcatcgagagagggcagagcagctaagtcaagaaaatgagaagctgatgaatcttttacaagagcgagtaaagaatgaagagcccaccactcaggaaggaaaaattattgaactggagcagaagtgcacaggtattcttgaacagggccgctttgaaagagagaagctactcaacattcagcagcagttgacctgtagcttgcggaaggttgaggaagaaaaccaaggagctttagaaatgattaaacgtctgaaggaagaaaatgaaaaactgaatgagtttctagaactggaacggcataataataacatgatggccaaaactttggaagagtgtagagttaccttggaagggctaaaaatggagaatggatctttgaagtctcatttgcagggtgagaagcagaaagccacagaggccagtgctgtggagcagacggcagagagctgcgaagttcaagaaatgttgaaagtagcccgagcagagaaagatctactggaactgtcttgcaatgagctcagacaagaattactaaaggcaaacggtgaaattaaacatgtttccagtctgctggccaaggtggaaaaggattattcatacctgaaggagatatgtgatcaccaagccgaacagctgagcagaaccagcctaaagctgcaagaaaaagcatcagagagtgatgcagagatcaaagacatgaaagaaaccatatttgaattggaagatcaggtggaacagcaccgggctgtcaagttacacaataatcaactcatcagtgagctagaaagtagtgtgatcaagctggaggaacagaagtcagacctggagaggcagctgaagactctgaccaagcagatgaaggaggagaccgaggaatggaggcggttccaggcggatctgcagaccgcagtggtggtggccaatgacatcaagtgtgaggcccagcaggagctgcgcaccgtgaagaggaaactgctggaggaggaggagaagaatgcccggttgcagaaggagctgggggatgtgcagggccacggcagggtggtcaccagcagagccgcccctccacctgtggatgaagagccagagtcctctgaggtcgatgctgctggtcggtggcctggtgtctgtgttagcagaacatctccaacacccccagagtcggcaaccaccgttaagtcacttatcaagtcatttgacttgggacgcccaggtggagctggacagaatatttctgtccataagacccccagaagtcccctaagtgggataccagtgaggactgctccagcagctgctgtctctccaatgcagaggcattcgacttacagcagtgtgcggccagccagcagaggggtgactcaacgcttggaccttcctgaccttcccctctcagatattctaaagggaaggactgagaccctgaagccagacccccacctccgcaagagtccctcactagagtcactgagcagacccccgtctctgggctttggggacacaagactgctgagtgcttccacccgggcatggaaaccacaaagcaaactcagtgtggaaagaaaagaccctctggcagccttggcccgggaatacggtggttccaagcgcaatgctctactgaaatggtgccagaagaagacacaaggttatgcgaacattgacatcaccaatttcagcagcagctggagcgatggcctggccttctgtgctctgctccacacctacctgcctgcccacatcccctaccaggagctgaatagtcaggagaaaaagaggaatctcttgttggcatttgaagcggctgaaagtgtaggcatcaaacccagcctggaactcagcgagatgctgtacacagaccggcccgactggcagagtgtgatgcagtacgtggcccaaatctacaagtactttgagacgtaaccctggagggcctggggcagccaccattgccacctactgcagcttttcctggaagcgcctgattactgtccactgaccctgctctgcccaccacccagctgcctagacttcaaagacaggctcaatccaagtggaccaacacccaaataagaaacagagtgggtcccacgatgtacctgtctgaaatgcaaatgcagctggactgtaaattggggactctttgatctcttgtgggatgcttctaaagagggcagcctccctccttccagaccaagaccccacacccaggcttgttttgctgattatattgggtggctgaacgaacacattatctgcagaaattcagacaaagaacatctccaaatcagtcttttggttgctgttgttaaaaatatcccggctttgcctttatgaaacctttgcccttggctgggtgtggtagctcgtggctgtaatcccagcactttaggaagccaaggcagtaggatcgtttgagcccaggagttcgaggctgcagtgagctatgagcataccactgcactccagcctgtgtgaaagagccagaccctgtctcaaaaaaatgataaaacccaaaactttgcccttgtgaaccctcccttcccccctccccccccaaaaaaaaacaacaaaacacaaaaaataaacatttgttccagggcaacctggaaa

SEQ ID NO: 1124 - protein, 1068 aa, Homo sapiens
MRSAAKPWNPAIRAGGHGPDRVRPLPAASSGMKSSKSSTSLAFESRLSRLKRASSEDTLNKPGSTAASGVVRLKKTATAGAISELTESRLRSGTGAFTTTKRTGIPAPREFSVTVSRERSVPRGPSNPRKSVSSPTSSNTPTPTKHLRTPSTKPKQENEGGEKAALESQVRELLAEAKAKDSEINRLRSELKKYKEKRTLNAEGTDALGPNVDGTSVSPGDTEPMIRALEEKNKNFQKELSDLEEENRVLKEKLIYLEHSPNSEGAASHTGDSSCPTSITQESSFGSPTGNQMSSDIDEYKKNIHGNALRTSGSSSSDVTKASLSPDASDFEHITAETPSRPLSSTSNPFKSSKCSTAGSSPNSVSELSLASLTEKIQKMEENHHSTAEELQATLQELSDQQQMVQELTAENEKLVDEKTILETSFHQHRERAEQLSQENEKLMNLLQERVKNEEPTTQEGKIIELEQKCTGILEQGRFEREKLLNIQQQLTCSLRKVEEENQGALEMIKRLKEENEKLNEFLELERHNNNMMAKTLEECRVTLEGLKMENGSLKSHLQGEKQKATEASAVEQTAESCEVQEMLKVARAEKDLLELSCNELRQELLKANGEIKHVSSLLAKVEKDYSYLKEICDHQAEQLSRTSLKLQEKASESDAEIKDMKETIFELEDQVEQHRAVKLHNNQLISELESSVIKLEEQKSDLERQLKTLTKQMKEETEEWRRFQADLQTAVVVANDIKCEAQQELRTVKRKLLEEEEKNARLQKELGDVQGHGRVVTSRAAPPPVDEEPESSEVDAAGRWPGVCVSRTSPTPPESATTVKSLIKSFDLGRPGGAGQNISVHKTPRSPLSGIPVRTAPAAAVSPMQRHSTYSSVRPASRGVTQRLDLPDLPLSDILKGRTETLKPDPHLRKSPSLESLSRPPSLGFGDTRLLSASTRAWKPQSKLSVERKDPLAALAREYGGSKRNALLKWCQKKTQGYANIDITNFSSSWSDGLAFCALLHTYLPAHIPYQELNSQEKKRNLLLAFEAAESVGIKPSLELSEMLYTDRPDWQSVMQYVAQIYKYFET

SEQ ID NO: 1125 - DNA, 2536 bp, Homo sapiens
cggacccgccggacgcaaccgcctcgccagccggagccagcgcgagctcggcacggtggacacccggtccgaggccggcaagccggctggtgcccgagtcggccaagcatgggcaaccactcaggacggcccgaggatccggaaccaggggcctttacaacaactaaacggacaggcattccagccccacgggaattttcagtaactgtctcaagagagaggtctgtgccacgtggtccctccaaccccaggaaatcagtgtccagtccaacttcttccaacactcccactcctacgaaacacctgaggaccccttccacaaagcccaagcaagagaatgaaggtggagaaaaggctgcgcttgagtcccaagttcgggaacttttggcagaagccaaagcaaaagatagtgaaattaacaggcttcgaagtgaactaaagaaatacaaagagaaaaggactctgaacgctgaggggactgatgctttgggcccaaatgtcgatggaacatcagtctccccaggtgacacggaacctatgataagagctcttgaggagaagaacaagaactttcagaaagagctttccgatctagaggaagaaaaccgggtcctgaaggagaaactgatctatcttgagcactccccaaattcagaaggggcagcaagtcacactggcgacagcagctgcccaacatccataactcaagagtcaagcttcggaagcccaactggaaatcagatgtccagtgacattgatgagtataaaaaaaacatacatggaaatgcattacggacatcaggctcctcaagtagcgatgttaccaaagcttctttgtcgccagatgcttccgactttgagcacattacagcagagacaccctcaaggcccctgtcctccaccagtaacccctttaagagttcaaagtgttctactgctgggagttccccaaacagcgtaagtgaattgtccctggcttccctcacagagaagatacaaaagatggaagaaaaccaccatagcactgcagaagaactacaggctactctacaagaattatcagaccagcaacaaatggtacaggaattgacagctgaaaatgagaagctggtggatgaaaagacgattttagagacatcctttcatcagcatcgagagagggcagagcagctaagtcaagaaaatgagaagctgatgaatcttttacaagagcgagtaaagaatgaagagcccaccactcaggaaggaaaaattattgaactggagcagaagtgcacaggtattcttgaacagggccgctttgaaagagagaagctactcaacattcagcagcagttgacctgtagcttgcggaaggttgaggaagaaaaccaaggagctttagaaatgattaaacgtctgaaggaagaaaatgaaaaactgaatgagtttctagaactggaacggcataataataacatgatggccaaaactttggaagagtgtagagttaccttggaagggctaaaaatggagaatggatctttgaagtctcatttgcagggtgagaagcagaaagccacagaggccagtgctgtggagcagacggcagagagctgcgaagttcaagaaatgttgaaagtagcccgagcagagaaagatctactggaactgtcttgcaatgagctcagacaagaattactaaaggcaaacggtgaaattaaacatgtttccagtctgctggccaaggtggaaaaggattattcatacctgaaggagatatgtgatcaccaagccgaacagctgagcagaaccagcctaaagctgcaagaaaaagcatcagagagtgatgcagagatcaaagacatgaaagaaaccatatttgaattggaagatcaggtggaacagcaccgggctgtcaagttacacaataatcaactcatcagtgagctagaaagtagtgtgatcaagctggaggaacagaagtcagacctggagaggcagctgaagactctgaccaagcagatgaaggaggagaccgaggaatggaggcggttccaggcggatctgcagaccgcagtggtggtggccaatgacatcaagtgtgaggcccagcaggagctgcgcaccgtgaagaggaaactgctggaggaggaggagaagaatgcccggttgcagaaggagctgggggatgtgcagggccacggcagggtggtcaccagcagagccgcccctccctccctgggctctgtcagctagcagagcatttggtggaagaaagacagcccagctcttgccatgattgggagccgcagccatctctagatgaaagggggaatgtgtagaggagaaattgcctctttataaagagcccagttgtctccttgtgacattctctgtttctcagagtcattgccgtcgagtctctgctttttgtccacattttgggatcagcttactgcatgatcaaagatgatgtttccctctttttacttttcctcagaagattgagctgtcttttatttggagaataaaatgaagttctgaaaaaaacaaa

SEQ ID NO: 1126 - protein, 709 aa, Homo sapiens
MGNHSGRPEDPEPGAFTTTKRTGIPAPREFSVTVSRERSVPRGPSNPRKSVSSPTSSNTPTPTKHLRTPSTKPKQENEGGEKAALESQVRELLAEAKAKDSEINRLRSELKKYKEKRTLNAEGTDALGPNVDGTSVSPGDTEPMIRALEEKNKNFQKELSDLEEENRVLKEKLIYLEHSPNSEGAASHTGDSSCPTSITQESSFGSPTGNQMSSDIDEYKKNIHGNALRTSGSSSSDVTKASLSPDASDFEHITAETPSRPLSSTSNPFKSSKCSTAGSSPNSVSELSLASLTEKIQKMEENHHSTAEELQATLQELSDQQQMVQELTAENEKLVDEKTILETSFHQHRERAEQLSQENEKLMNLLQERVKNEEPTTQEGKIIELEQKCTGILEQGRFEREKLLNIQQQLTCSLRKVEEENQGALEMIKRLKEENEKLNEFLELERHNNNMMAKTLEECRVTLEGLKMENGSLKSHLQGEKQKATEASAVEQTAESCEVQEMLKVARAEKDLLELSCNELRQELLKANGEIKHVSSLLAKVEKDYSYLKEICDHQAEQLSRTSLKLQEKASESDAEIKDMKETIFELEDQVEQHRAVKLHNNQLISELESSVIKLEEQKSDLERQLKTLTKQMKEETEEWRRFQADLQTAVVVANDIKCEAQQELRTVKRKLLEEEEKNARLQKELGDVQGHGRVVTSRAAPPSLGSVS

SEQ ID NO: 1127 - DNA, 3762 bp, Homo sapiens
cggacccgccggacgcaaccgcctcgccagccggagccagcgcgagctcggcacggtggacacccggtccgaggccggcaagccggctggtgcccgagtcggccaagcatgggcaaccactcaggacggcccgaggatccggaaccaggggcctttacaacaactaaacggacaggcattccagccccacgggaattttcagtaactgtctcaagagagaggtctgtgccacgtggtccctccaaccccaggaaatcagtgtccagtccaacttcttccaacactcccactcctacgaaacacctgaggaccccttccacaaagcccaagcaagagaatgaaggtggagaaaaggctgcgcttgagtcccaagttcgggaacttttggcagaagccaaagcaaaagatagtgaaattaacaggcttcgaagtgaactaaagaaatacaaagagaaaaggactctgaacgctgaggggactgatgctttgggcccaaatgtcgatggaacatcagtctccccaggtgacacggaacctatgataagagctcttgaggagaagaacaagaactttcagaaagagctttccgatctagaggaagaaaaccgggtcctgaaggagaaactgatctatcttgagcactccccaaattcagaaggggcagcaagtcacactggcgacagcagctgcccaacatccataactcaagagtcaagcttcggaagcccaactggaaatcagatgtccagtgacattgatgagtataaaaaaaacatacatggaaatgcattacggacatcaggctcctcaagtagcgatgttaccaaagcttctttgtcgccagatgcttccgactttgagcacattacagcagagacaccctcaaggcccctgtcctccaccagtaacccctttaagagttcaaagtgttctactgctgggagttccccaaacagcgtaagtgaattgtccctggcttccctcacagagaagatacaaaagatggaagaaaaccaccatagcactgcagaagaactacaggctactctacaagaattatcagaccagcaacaaatggtacaggaattgacagctgaaaatgagaagctggtggatgaaaagacgattttagagacatcctttcatcagcatcgagagagggcagagcagctaagtcaagaaaatgagaagctgatgaatcttttacaagagcgagtaaagaatgaagagcccaccactcaggaaggaaaaattattgaactggagcagaagtgcacaggtattcttgaacagggccgctttgaaagagagaagctactcaacattcagcagcagttgacctgtagcttgcggaaggttgaggaagaaaaccaaggagctttagaaatgattaaacgtctgaaggaagaaaatgaaaaactgaatgagtttctagaactggaacggcataataataacatgatggccaaaactttggaagagtgtagagttaccttggaagggctaaaaatggagaatggatctttgaagtctcatttgcagggtgagaagcagaaagccacagaggccagtgctgtggagcagacggcagagagctgcgaagttcaagaaatgttgaaagtagcccgagcagagaaagatctactggaactgtcttgcaatgagctcagacaagaattactaaaggcaaacggtgaaattaaacatgtttccagtctgctggccaaggtggaaaaggattattcatacctgaaggagatatgtgatcaccaagccgaacagctgagcagaaccagcctaaagctgcaagaaaaagcatcagagagtgatgcagagatcaaagacatgaaagaaaccatatttgaattggaagatcaggtggaacagcaccgggctgtcaagttacacaataatcaactcatcagtgagctagaaagtagtgtgatcaagctggaggaacagaagtcagacctggagaggcagctgaagactctgaccaagcagatgaaggaggagaccgaggaatggaggcggttccaggcggatctgcagaccgcagtggtggtggccaatgacatcaagtgtgaggcccagcaggagctgcgcaccgtgaagaggaaactgctggaggaggaggagaagaatgcccggttgcagaaggagctgggggatgtgcagggccacggcagggtggtcaccagcagagccgcccctccacctgtggatgaagagccagagtcctctgaggtcgatgctgctggtcggtggcctggtgtctgtgttagcagaacatctccaacacccccagagtcggcaaccaccgttaagtcacttatcaagtcatttgacttgggacgcccaggtggagctggacagaatatttctgtccataagacccccagaagtcccctaagtgggataccagtgaggactgctccagcagctgctgtctctccaatgcagaggcattcgacttacagcagtgtgcggccagccagcagaggggtgactcaacgcttggaccttcctgaccttcccctctcagatattctaaagggaaggactgagaccctgaagccagacccccacctccgcaagagtccctcactagagtcactgagcagacccccgtctctgggctttggggacacaagactgctgagtgcttccacccgggcatggaaaccacaaagcaaactcagtgtggaaagaaaagaccctctggcagccttggcccgggaatacggtggttccaagcgcaatgctctactgaaatggtgccagaagaagacacaaggttatgcgaacattgacatcaccaatttcagcagcagctggagcgatggcctggccttctgtgctctgctccacacctacctgcctgcccacatcccctaccaggagctgaatagtcaggagaaaaagaggaatctcttgttggcatttgaagcggctgaaagtgtaggcatcaaacccagcctggaactcagcgagatgctgtacacagaccggcccgactggcagagtgtgatgcagtacgtggcccaaatctacaagtactttgagacgtaaccctggagggcctggggcagccaccattgccacctactgcagcttttcctggaagcgcctgattactgtccactgaccctgctctgcccaccacccagctgcctagacttcaaagacaggctcaatccaagtggaccaacacccaaataagaaacagagtgggtcccacgatgtacctgtctgaaatgcaaatgcagctggactgtaaattggggactctttgatctcttgtgggatgcttctaaagagggcagcctccctccttccagaccaagaccccacacccaggcttgttttgctgattatattgggtggctgaacgaacacattatctgcagaaattcagacaaagaacatctccaaatcagtcttttggttgctgttgttaaaaatatcccggctttgcctttatgaaacctttgcccttggctgggtgtggtagctcgtggctgtaatcccagcactttaggaagccaaggcagtaggatcgtttgagcccaggagttcgaggctgcagtgagctatgagcataccactgcactccagcctgtgtgaaagagccagaccctgtctcaaaaaaatgataaaacccaaaactttgcccttgtgaaccctcccttcccccctccccccccaaaaaaaaacaacaaaacacaaaaaataaacatttgttccagggcaacctggaaa

SEQ ID NO: 1128 - protein, 987 aa, Homo sapiens
MGNHSGRPEDPEPGAFTTTKRTGIPAPREFSVTVSRERSVPRGPSNPRKSVSSPTSSNTPTPTKHLRTPSTKPKQENEGGEKAALESQVRELLAEAKAKDSEINRLRSELKKYKEKRTLNAEGTDALGPNVDGTSVSPGDTEPMIRALEEKNKNFQKELSDLEEENRVLKEKLIYLEHSPNSEGAASHTGDSSCPTSITQESSFGSPTGNQMSSDIDEYKKNIHGNALRTSGSSSSDVTKASLSPDASDFEHITAETPSRPLSSTSNPFKSSKCSTAGSSPNSVSELSLASLTEKIQKMEENHHSTAEELQATLQELSDQQQMVQELTAENEKLVDEKTILETSFHQHRERAEQLSQENEKLMNLLQERVKNEEPTTQEGKIIELEQKCTGILEQGRFEREKLLNIQQQLTCSLRKVEEENQGALEMIKRLKEENEKLNEFLELERHNNNMMAKTLEECRVTLEGLKMENGSLKSHLQGEKQKATEASAVEQTAESCEVQEMLKVARAEKDLLELSCNELRQELLKANGEIKHVSSLLAKVEKDYSYLKEICDHQAEQLSRTSLKLQEKASESDAEIKDMKETIFELEDQVEQHRAVKLHNNQLISELESSVIKLEEQKSDLERQLKTLTKQMKEETEEWRRFQADLQTAVVVANDIKCEAQQELRTVKRKLLEEEEKNARLQKELGDVQGHGRVVTSRAAPPPVDEEPESSEVDAAGRWPGVCVSRTSPTPPESATTVKSLIKSFDLGRPGGAGQNISVHKTPRSPLSGIPVRTAPAAAVSPMQRHSTYSSVRPASRGVTQRLDLPDLPLSDILKGRTETLKPDPHLRKSPSLESLSRPPSLGFGDTRLLSASTRAWKPQSKLSVERKDPLAALAREYGGSKRNALLKWCQKKTQGYANIDITNFSSSWSDGLAFCALLHTYLPAHIPYQELNSQEKKRNLLLAFEAAESVGIKPSLELSEMLYTDRPDWQSVMQYVAQIYKYFET

SEQ ID NO: 1129 - DNA, 2714 bp, Homo sapiens
agaagcagaaaaggttggataaaagataaggacagacccacgaagtcaagcatgcggagtgcagccaagccctggaacccagccatcagagcagggggccacggcccagaccgggtgcggcctctgcctgcagcctcttccggcatgaagagttctaagtcttcaacttccttggcttttgagtcccgactcagcaggctcaagagggccagcagtgaggacacgctcaacaagccaggaagtaccgctgcatcgggggtggttcgcctgaagaagaccgccactgccggagccatctcggagctcacggagagccgcctgaggagcggcacaggggcctttacaacaactaaacggacaggcattccagccccacgggaattttcagtaactgtctcaagagagaggtctgtgccacgtggtccctccaaccccaggaaatcagtgtccagtccaacttcttccaacactcccactcctacgaaacacctgaggaccccttccacaaagcccaagcaagagaatgaaggtggagaaaaggctgcgcttgagtcccaagttcgggaacttttggcagaagccaaagcaaaagatagtgaaattaacaggcttcgaagtgaactaaagaaatacaaagagaaaaggactctgaacgctgaggggactgatgctttgggcccaaatgtcgatggaacatcagtctccccaggtgacacggaacctatgataagagctcttgaggagaagaacaagaactttcagaaagagctttccgatctagaggaagaaaaccgggtcctgaaggagaaactgatctatcttgagcactccccaaattcagaaggggcagcaagtcacactggcgacagcagctgcccaacatccataactcaagagtcaagcttcggaagcccaactggaaatcagatgtccagtgacattgatgagtataaaaaaaacatacatggaaatgcattacggacatcaggctcctcaagtagcgatgttaccaaagcttctttgtcgccagatgcttccgactttgagcacattacagcagagacaccctcaaggcccctgtcctccaccagtaacccctttaagagttcaaagtgttctactgctgggagttccccaaacagcgtaagtgaattgtccctggcttccctcacagagaagatacaaaagatggaagaaaaccaccatagcactgcagaagaactacaggctactctacaagaattatcagaccagcaacaaatggtacaggaattgacagctgaaaatgagaagctggtggatgaaaagacgattttagagacatcctttcatcagcatcgagagagggcagagcagctaagtcaagaaaatgagaagctgatgaatcttttacaagagcgagtaaagaatgaagagcccaccactcaggaaggaaaaattattgaactggagcagaagtgcacaggtattcttgaacagggccgctttgaaagagagaagctactcaacattcagcagcagttgacctgtagcttgcggaaggttgaggaagaaaaccaaggagctttagaaatgattaaacgtctgaaggaagaaaatgaaaaactgaatgagtttctagaactggaacggcataataataacatgatggccaaaactttggaagagtgtagagttaccttggaagggctaaaaatggagaatggatctttgaagtctcatttgcagggtgagaagcagaaagccacagaggccagtgctgtggagcagacggcagagagctgcgaagttcaagaaatgttgaaagtagcccgagcagagaaagatctactggaactgtcttgcaatgagctcagacaagaattactaaaggcaaacggtgaaattaaacatgtttccagtctgctggccaaggtggaaaaggattattcatacctgaaggagatatgtgatcaccaagccgaacagctgagcagaaccagcctaaagctgcaagaaaaagcatcagagagtgatgcagagatcaaagacatgaaagaaaccatatttgaattggaagatcaggtggaacagcaccgggctgtcaagttacacaataatcaactcatcagtgagctagaaagtagtgtgatcaagctggaggaacagaagtcagacctggagaggcagctgaagactctgaccaagcagatgaaggaggagaccgaggaatggaggcggttccaggcggatctgcagaccgcagtggtggtggccaatgacatcaagtgtgaggcccagcaggagctgcgcaccgtgaagaggaaactgctggaggaggaggagaagaatgcccggttgcagaaggagctgggggatgtgcagggccacggcagggtggtcaccagcagagccgcccctccctccctgggctctgtcagctagcagagcatttggtggaagaaagacagcccagctcttgccatgattgggagccgcagccatctctagatgaaagggggaatgtgtagaggagaaattgcctctttataaagagcccagttgtctccttgtgacattctctgtttctcagagtcattgccgtcgagtctctgctttttgtccacattttgggatcagcttactgcatgatcaaagatgatgtttccctctttttacttttcctcagaagattgagctgtcttttatttggagaataaaatgaagttctgaaa

SEQ ID NO: 1130 - protein, 790 aa, Homo sapiens
MRSAAKPWNPAIRAGGHGPDRVRPLPAASSGMKSSKSSTSLAFESRLSRLKRASSEDTLNKPGSTAASGVVRLKKTATAGAISELTESRLRSGTGAFTTTKRTGIPAPREFSVTVSRERSVPRGPSNPRKSVSSPTSSNTPTPTKHLRTPSTKPKQENEGGEKAALESQVRELLAEAKAKDSEINRLRSELKKYKEKRTLNAEGTDALGPNVDGTSVSPGDTEPMIRALEEKNKNFQKELSDLEEENRVLKEKLIYLEHSPNSEGAASHTGDSSCPTSITQESSFGSPTGNQMSSDIDEYKKNIHGNALRTSGSSSSDVTKASLSPDASDFEHITAETPSRPLSSTSNPFKSSKCSTAGSSPNSVSELSLASLTEKIQKMEENHHSTAEELQATLQELSDQQQMVQELTAENEKLVDEKTILETSFHQHRERAEQLSQENEKLMNLLQERVKNEEPTTQEGKIIELEQKCTGILEQGRFEREKLLNIQQQLTCSLRKVEEENQGALEMIKRLKEENEKLNEFLELERHNNNMMAKTLEECRVTLEGLKMENGSLKSHLQGEKQKATEASAVEQTAESCEVQEMLKVARAEKDLLELSCNELRQELLKANGEIKHVSSLLAKVEKDYSYLKEICDHQAEQLSRTSLKLQEKASESDAEIKDMKETIFELEDQVEQHRAVKLHNNQLISELESSVIKLEEQKSDLERQLKTLTKQMKEETEEWRRFQADLQTAVVVANDIKCEAQQELRTVKRKLLEEEEKNARLQKELGDVQGHGRVVTSRAAPPSLGSVS

SEQ ID NO: 1131 - DNA, 416 bp, Homo sapiens
atggtccagcgtttgacatacattgtaggctttcctacaatacagcctctaacaaaactaggctgtcccgaaccaaaactaggctgtcccgaacccctggtaatagaattgtttatctttataccaagaagtttgggaaagcaccaaaatctgcatgtggcatgtgcccaggcagacttcaagtggttcctgctgtaagacctaaagttcttatgagattgtccaaaacaaaggaacatgtcagcagggcctgtggtggttccatgtgtgctaaatgtgttcgtgacaggatcaagcatgctttccttactgaggagcagaaaatcgttgtgaaagtgttgaaggcacaagcacaaagtcagaaaacgaaattaaaaaatgaaacttttttgagtaataaaaatgaaaagacttaa

SEQ ID NO: 1132 - DNA, 2849 bp, Homo sapiens
agatatctccggcgccgcccgccattttgactccagtgtctcgtttgcagtcggcgctttaggggaactgtcttcctccgcaggcgcgaggctgggtacagggtctattgtctgtggttgactccgtactttggtctgaggccttcgggagctttcccgaggcagttagcagaagccgcagcggccgcccccgcccgtctcctctgtccctgggcccgggagggaccaacttggcgtcacgcccctcagcggtcgccactctcttctctgttgttgggtccgcatcgtattcccggaatcagacggtgccccatagatggccagctttcccccgagggtcaacgagaaagagatcgtgagattacgtactataggtgaacttttagctcctgcagctccttttgacaagaaatgtggtcgtgaaaattggactgttgcttttgctccagatggttcatactttgcttggtcacaaggacatcgcacagtaaagcttgttccgtggtcccagtgccttcagaactttctcttgcatggcaccaagaatgttaccaattcaagcagtttaagattgccaagacaaaatagtgatggtggtcagaaaaataagcctcgtgaacatattatagactgtggagatatagtctggagtcttgcttttgggtcatcagttccagaaaaacagagtcgctgtgtaaatatagaatggcatcgcttcagatttggacaagatcagctacttcttgctacagggttgaacaatgggcgtatcaaaatatgggatgtatatacaggaaaactcctccttaacttggtagatcatactgaagtggtcagagatttaacttttgctccagatggaagcttgatcctggtgtcagcttcaagagacaaaactctcagagtatgggacctgaaagatgatggaaacatgatgaaagtattgagggggcatcagaattgggtgtacagctgtgcattctctcctgactcttctatgctgtgttcagtcggagccagtaaagcagttttcctttggaatatggataaatacaccatgatacggaaactagaaggacatcaccatgatgtggtagcttgtgacttttctcctgatggagcattactggctactgcatcttatgatactcgagtatatatctgggatccacataatggagacattctgatggaatttgggcacctgtttcccccacctactccaatatttgctggaggagcaaatgaccggtgggtacgatctgtatcttttagccatgatggactgcatgttgcaagccttgctgatgataaaatggtgaggttctggagaattgatgaggattatccagtgcaagttgcacctttgagcaatggtctttgctgtgccttctctactgatggcagtgttttagctgctgggacacatgacggaagtgtgtatttttgggccactccacggcaggtccctagcctgcaacatttatgtcgcatgtcaatccgaagagtgatgcccacccaagaagttcaggagctgccgattccttccaagcttttggagtttctctcgtatcgtatttagaagattctgccttccctagtagtagggactgacagaatacacttaacacaaacctcaagctttactgacttcaattatctgtttttaaagacgtagaagatttatttaatttgatatgttcttgtactgcattttgatcagttgagcttttaaaatattatttatagacaatagaagtatttctgaacatatcaaatataaatttttttaaagatctaactgtgaaaacatacatacctgtacatatttagatataagctgctatatgttgaatggacccttttgcttttctgatttttagttctgacatgtatatattgcttcagtagagccacaatatgtatctttgctgtaaagtgcaaggaaattttaaattctgggacactgagttagatggtaaatactgacttacgaaagttgaattgggtgaggcgggcaaatcacctgaggtcagcagtttgagactagcctggcaaacatgatgaaaccctgtctctactaaaaatacaaaaaaaaaaaaaattagccaggcgtggtggtgcacacctgtagtcctagctacttgggaggctgaggcaggagaattgcttgaacccaggaggtggaggttgcagtaagccaagatcacaccactgcactccaacctggacaacagagcgagactccatctcaaaaaaaaaaaaaaattgtgttgcctcatacgaaatgtatttggttttgttggagagtgtcagactgatctggaagtgaaacacagtttatgtacagggaaaaggattttattatccttaggaatgtcatccaagacgtagagcttgaatgtgacgttatttaaaaacaacaacaaagaaggcagagccaggatataactagaaaaaggatgtctttttttttttttttactccccctctaaacactgctgctgccttaattttagaaagcagcttactagtttacccttgtggtataaagtattataaattgttgtgaatttgaagaatccgtctactgtattattgctaaatattttgtttatactaagggacaattattttaagaccatggatttaaaaaaaaaaaaaaaaactctgtttctgcaggggatgatattggtgagttgccaaagaagcaatacagcatatctgcttttgccttctgttgtttatcttacctgcagatattaagaatgtatgcattatgtaaaatgctcaattatatatttttgttgagttttttaattaaagacttgttaaaaaaaaaaaaaaaa

SEQ ID NO: 1133 - protein, 421 aa, Homo sapiens
MASFPPRVNEKEIVRLRTIGELLAPAAPFDKKCGRENWTVAFAPDGSYFAWSQGHRTVKLVPWSQCLQNFLLHGTKNVTNSSSLRLPRQNSDGGQKNKPREHIIDCGDIVWSLAFGSSVPEKQSRCVNIEWHRFRFGQDQLLLATGLNNGRIKIWDVYTGKLLLNLVDHTEVVRDLTFAPDGSLILVSASRDKTLRVWDLKDDGNMMKVLRGHQNWVYSCAFSPDSSMLCSVGASKAVFLWNMDKYTMIRKLEGHHHDVVACDFSPDGALLATASYDTRVYIWDPHNGDILMEFGHLFPPPTPIFAGGANDRWVRSVSFSHDGLHVASLADDKMVRFWRIDEDYPVQVAPLSNGLCCAFSTDGSVLAAGTHDGSVYFWATPRQVPSLQHLCRMSIRRVMPTQEVQELPIPSKLLEFLSYRI

SEQ ID NO: 1134 - DNA, 2411 bp, Homo sapiens
agatatctccggcgccgcccgccattttgactccagtgtctcgtttgcagtcggcgctttaggggaactgtcttcctccgcaggcgcgaggctgggtacagggtctattgtctgtggttgactccgtactttggtctgaggccttcgggagctttcccgaggcagttagcagaagccgcagcggccgcccccgcccgtctcctctgtccctgggcccgggagggaccaacttggcgtcacgcccctcagcggtcgccactctcttctctgttgttgggtccgcatcgtattcccggaatcagacggtgccccatagatggccagctttcccccgagggtcaacgagaaagagatcggaaaactcctccttaacttggtagatcatactgaagtggtcagagatttaacttttgctccagatggaagcttgatcctggtgtcagcttcaagagacaaaactctcagagtatgggacctgaaagatgatggaaacatgatgaaagtattgagggggcatcagaattgggtgtacagctgtgcattctctcctgactcttctatgctgtgttcagtcggagccagtaaagcagttttcctttggaatatggataaatacaccatgatacggaaactagaaggacatcaccatgatgtggtagcttgtgacttttctcctgatggagcattactggctactgcatcttatgatactcgagtatatatctgggatccacataatggagacattctgatggaatttgggcacctgtttcccccacctactccaatatttgctggaggagcaaatgaccggtgggtacgatctgtatcttttagccatgatggactgcatgttgcaagccttgctgatgataaaatggtgaggttctggagaattgatgaggattatccagtgcaagttgcacctttgagcaatggtctttgctgtgccttctctactgatggcagtgttttagctgctgggacacatgacggaagtgtgtatttttgggccactccacggcaggtccctagcctgcaacatttatgtcgcatgtcaatccgaagagtgatgcccacccaagaagttcaggagctgccgattccttccaagcttttggagtttctctcgtatcgtatttagaagattctgccttccctagtagtagggactgacagaatacacttaacacaaacctcaagctttactgacttcaattatctgtttttaaagacgtagaagatttatttaatttgatatgttcttgtactgcattttgatcagttgagcttttaaaatattatttatagacaatagaagtatttctgaacatatcaaatataaatttttttaaagatctaactgtgaaaacatacatacctgtacatatttagatataagctgctatatgttgaatggacccttttgcttttctgatttttagttctgacatgtatatattgcttcagtagagccacaatatgtatctttgctgtaaagtgcaaggaaattttaaattctgggacactgagttagatggtaaatactgacttacgaaagttgaattgggtgaggcgggcaaatcacctgaggtcagcagtttgagactagcctggcaaacatgatgaaaccctgtctctactaaaaatacaaaaaaaaaaaaaattagccaggcgtggtggtgcacacctgtagtcctagctacttgggaggctgaggcaggagaattgcttgaacccaggaggtggaggttgcagtaagccaagatcacaccactgcactccaacctggacaacagagcgagactccatctcaaaaaaaaaaaaaaattgtgttgcctcatacgaaatgtatttggttttgttggagagtgtcagactgatctggaagtgaaacacagtttatgtacagggaaaaggattttattatccttaggaatgtcatccaagacgtagagcttgaatgtgacgttatttaaaaacaacaacaaagaaggcagagccaggatataactagaaaaaggatgtctttttttttttttttactccccctctaaacactgctgctgccttaattttagaaagcagcttactagtttacccttgtggtataaagtattataaattgttgtgaatttgaagaatccgtctactgtattattgctaaatattttgtttatactaagggacaattattttaagaccatggatttaaaaaaaaaaaaaaaaactctgtttctgcaggggatgatattggtgagttgccaaagaagcaatacagcatatctgcttttgccttctgttgtttatcttacctgcagatattaagaatgtatgcattatgtaaaatgctcaattatatatttttgttgagttttttaattaaagacttgttaaaaaaaaaaaaaaaa

SEQ ID NO: 1135 - protein, 275 aa, Homo sapiens
MASFPPRVNEKEIGKLLLNLVDHTEVVRDLTFAPDGSLILVSASRDKTLRVWDLKDDGNMMKVLRGHQNWVYSCAFSPDSSMLCSVGASKAVFLWNMDKYTMIRKLEGHHHDVVACDFSPDGALLATASYDTRVYIWDPHNGDILMEFGHLFPPPTPIFAGGANDRWVRSVSFSHDGLHVASLADDKMVRFWRIDEDYPVQVAPLSNGLCCAFSTDGSVLAAGTHDGSVYFWATPRQVPSLQHLCRMSIRRVMPTQEVQELPIPSKLLEFLSYRI

SEQ ID NO: 1136 - DNA, 1506 bp, Homo sapiens
gcgcttctgacaagcccgaaagtcatttccaatctcaagtggactttgttccaactattgggggcgtcgctccccctcttcatggtcgcgggcaaacttcctcctcggcgcctcttctaatggagccccacctgctcgggctgctcctcggcctcctgctcggtggcaccagggtcctcgctggctacccaatttggtggtccctggccctgggccagcagtacacatctctgggctcacagcccctgctctgcggctccatcccaggcctggtccccaagcaactgcgcttctgccgcaattacatcgagatcatgcccagcgtggccgagggcgtgaagctgggcatccaggagtgccagcaccagttccggggccgccgctggaactgcaccaccatagatgacagcctggccatctttgggcccgtcctcgacaaagccacccgcgagtcggccttcgttcacgccatcgcctcggccggcgtggccttcgccgtcacccgctcctgcgccgagggcacctccaccatttgcggctgtgactcgcatcataaggggccgcctggcgaaggctggaagtggggcggctgcagcgaggacgctgacttcggcgtgttagtgtccagggagttcgcggatgcgcgcgagaacaggccggacgcgcgctcggccatgaacaagcacaacaacgaggcgggccgcacgactatcctggaccacatgcacctcaaatgcaagtgccacgggctgtcgggcagctgtgaggtgaagacctgctggtgggcgcagcctgacttccgtgccatcggtgacttcctcaaggacaagtatgacagcgcctcggagatggtagtagagaagcaccgtgagtcccgaggctgggtggagaccctccgggccaagtactcgctcttcaagccacccacggagagggacctggtctactacgagaactcccccaacttttgtgagcccaacccagagacgggttcctttggcacaagggaccggacttgcaatgtcacctcccacggcatcgatggctgcgatctgctctgctgtggccggggccacaacacgaggacggagaagcggaaggaaaaatgccactgcatcttccactggtgctgctacgtcagctgccaggagtgtattcgcatctacgacgtgcacacctgcaagtagggcaccagggcgctgggaaggggtgaagtgtgtggctgggcggattcagcgaagtctcatgggaagcaggacctagagccgggcacagccctcagcgtcagacagcaaggaactgtcaccagccgcacgcgtggtaaatgacccagacccaactcgcctgtggacggggaggctctccctctctctcatcttacatttctcaccctactctggatggtgtgtggtttttaaagaagggggctttctttttagttctctagggtctgataggaacagacctgaggcttatctttgcacatgttaaagaaaaaaaaaaaaa

SEQ ID NO: 1137 - protein, 355 aa, Homo sapiens
MEPHLLGLLLGLLLGGTRVLAGYPIWWSLALGQQYTSLGSQPLLCGSIPGLVPKQLRFCRNYIEIMPSVAEGVKLGIQECQHQFRGRRWNCTTIDDSLAIFGPVLDKATRESAFVHAIASAGVAFAVTRSCAEGTSTICGCDSHHKGPPGEGWKWGGCSEDADFGVLVSREFADARENRPDARSAMNKHNNEAGRTTILDHMHLKCKCHGLSGSCEVKTCWWAQPDFRAIGDFLKDKYDSASEMVVEKHRESRGWVETLRAKYSLFKPPTERDLVYYENSPNFCEPNPETGSFGTRDRTCNVTSHGIDGCDLLCCGRGHNTRTEKRKEKCHCIFHWCCYVSCQECIRIYDVHTCK

SEQ ID NO: 1138 - DNA, 3570 bp, Homo sapiens
gcggccgcggtgaagcgcggagggcggcgcgggcaccggggccgggccggggctgcagccgcagcggccatgggggccctgacgagccggcagcacgcgggcgtggaggaggtggacatcccgtctaattccgtgtaccgctacccgcccaagtccggaagctattttgccagccacttcattatgggaggagagaagtttgactcaactcatcctgaaggttacctgtttggagagaacagcgatctgaactttctggggaacagaccagttgtgtttccttacgccgccccacctccccaagaacccgtgaagactctgagaagcctggtcaatatccgaaaggacacactgaggctcgtcaaatgtgctgaggaagtgaagagccctggagaagaggccagtaaagctaaagtccactataatgttgagttcacctttgacacagatgctcgggtagccatcaccatctattaccaggccacggaagagttccagaatggtattgccagctacattcccaaagacaacagcctccagtcggagactgtgcagtacaagcgaggagtgtgtcagcagttctgcctgccctcccacaccgtggatccctccgagtgggccgaagaggagcttggctttgatttagaccgagaagtttaccctctagtggtacatgccgtggtggatgaaggagacgagtattttggccattgccatgtactgctgggtacttttgagaagcacacagatggaactttctgtgtcaagcccctcaaacagaaacaagtagtagacggggtcagctacctccttcaggagatctatggaattgaaaacaagtacaacacacaagattctaaggtggctgaagacgaagtgagtgataacagtgccgagtgtgtggtgtgtctctcggatgtccgggacaccttgattctgccctgtcgccacctctgcctctgtaacacctgtgcagacacgctgcgctaccaggccaacaactgccccatctgccgactgcccttccgggcactgcttcagatccgagccatgaggaaaaaattgggccccttgtccccaaccagctttaaccccatcatctcatcccagacatctgactctgaagagcatccatcctcagagaatattccaccaggctatgaagtagtatctcttctggaggccctcaacgggcccctcaccccgtccccagcagttcctccacttcacgtgcttggagatggccacctctcaggaatgctcccttcatatggcagtgatggccacctgccccccgtcaggacgatctcgcctcttgaccgcctgtctgacagcagcagtcagggactcaaactcaaaaagagtctctccaaatccacttcccaaaactcttccgtgctgcatgaagaggaagatgagcattcctgcagcgagtcggagacacagctctctcagagaccgtcggttcagcatctcggagaggaatgtggtgtgactccagaaagtgagaatctcaccctgtcgtcatctggagctattgaccagtcgtcttgcacagggacgcctctgtcatccactatttcctccccagaaggccctgccagcagcagcttggcccagtctgtcatgtccatggcatcctcccagatcagcactgacaccgtctcctccatgtctggctcctacatcgcccctggcactgaagaggagggagaggctctctcttccccccagcctgccagcagggccccctcagaagaaggagaggggctgccagcggagtctccagacagcaactttgctggcctcccagctggagagcaggatgcagagggaaatgatgttatagaggaagaggatggatcacccacgcaggaaggccagaggacgtgcgcatttctaggtatggagtgtgacaataacaatgactttgacatcgcaagcgtgaaagcactggacaataagctgtgctctgaggtctgcttacctggtgcctggcaggctgatgacaatgccgtcagtcggaatgcccagcgccggcgcttgtcatccagcagcctggaggactctgagacgaggccctgtgtgtggggccctttggctgtctgagccccagcctctgcacttgggctcccctcctgccctgcattccatccatcctcactcagctgctgcctactgggcatcctcagcaagatgctggagactttttaccctcctgtgacagctgttacaacctgtaaccacaatccctcacctctcagagggaactggaaccctcctttctccgtgtgacctaaagccactcaatgaactgcagctcacgagaccttttgcagggactctggaatgtcctcacggtatattgatgttcaggtggagctggggtccatgggctaatttcttacacatcttttttctccttagggggtagaacaagaaggcttagagtttggcagctttgttacaaacatccctctggcatttcctggtctctggcacatcataaccaattggaaacctgcagtttggggtagggctggaggatcgctcctgtggaaagggagagccatactgcacggacgtagcgtttccctctacaagcactaggagcacctttctcaaggacaagaaatggtagcaaccaaaaggttggttgaaggaaacaatccttccttctggtggcagagccagtcttctgggcctcacatgcctgtgcggttaagaaggagctcttggccgggcgcggtggctcacgcctgtaatctcagcactttgggaggccgaggcgggtggatcatgagatcaggagatcgagaccatcctggctaacacggcgaaaccccgtctctactaaaaatacaaaaaattagctgggcatggttgcaggcgcctgtagtcccagctacttgggaggctgaggcaggagaatggcctgaacccgggaggcggagcttgcagtgagccgagatcgcgccaatgcactccagcctgggcgacagagaaaaaaaaaaaaaaaagaaggagcccttgaatctgagaatcccccagttaagatgatttcccttaaggagcatttctcctgatcaggtgcattcagggaggcctgcaactccatcctaaggtgacatttcaagaaacacatgtgttgaccacctctgtgtgccaagcactgggtgaggagtggtcgtatattaccataattcatcctcactcaattgggaggtggcattcttgtccctgttgcccccatctctacccccttttgttaatggttgagagaaatgtggaccagtgattctcagtttggtgcccaggtccccaaaggaagtgatggagagccttgagctaagttcaggcagcagcatgtggccagcagcagtgtgctgggagcagaggttggaatcagggctcagggccttcacttcaagggccctccccagctactcgggaggctgaggcaggagaatcgcttgaactcaggaggtggaggttgcggtgagccaagatcgtgccactgcactccagcctgggctacaagattgaaaagatcgaaactctgtctcaaac

SEQ ID NO: 1139 - protein, 679 aa, Homo sapiens
MGALTSRQHAGVEEVDIPSNSVYRYPPKSGSYFASHFIMGGEKFDSTHPEGYLFGENSDLNFLGNRPVVFPYAAPPPQEPVKTLRSLVNIRKDTLRLVKCAEEVKSPGEEASKAKVHYNVEFTFDTDARVAITIYYQATEEFQNGIASYIPKDNSLQSETVQYKRGVCQQFCLPSHTVDPSEWAEEELGFDLDREVYPLVVHAVVDEGDEYFGHCHVLLGTFEKHTDGTFCVKPLKQKQVVDGVSYLLQEIYGIENKYNTQDSKVAEDEVSDNSAECVVCLSDVRDTLILPCRHLCLCNTCADTLRYQANNCPICRLPFRALLQIRAMRKKLGPLSPTSFNPIISSQTSDSEEHPSSENIPPGYEVVSLLEALNGPLTPSPAVPPLHVLGDGHLSGMLPSYGSDGHLPPVRTISPLDRLSDSSSQGLKLKKSLSKSTSQNSSVLHEEEDEHSCSESETQLSQRPSVQHLGEECGVTPESENLTLSSSGAIDQSSCTGTPLSSTISSPEGPASSSLAQSVMSMASSQISTDTVSSMSGSYIAPGTEEEGEALSSPQPASRAPSEEGEGLPAESPDSNFAGLPAGEQDAEGNDVIEEEDGSPTQEGQRTCAFLGMECDNNNDFDIASVKALDNKLCSEVCLPGAWQADDNAVSRNAQRRRLSSSSLEDSETRPCVWGPLAV

SEQ ID NO: 1140 - DNA, 1440 bp, Homo sapiens
atttggcatttctactttgcctgcccacagatgtagttttttccgcacgtgcacgccttccctcctccccgccctcagggtccacggccaccatggcatattaggggcagcagtgcctgcggcagcattggcctttgcagcggcggcagcagcaccaggctctgcagcggcaccccccagcggcttaagccatggcgcttcccacggcattcagcagcagcattgctgtaaccgacaaagacaccttcgaattaagcacattactcgattccagcaaagcaccgcaacatgaccgaaatgagcttcctgagcaacgaggtgttggtgggggacttgatgtcccccttcgaccagtcgggtttgggggctgaagaaagcataggtctcttagatgactacgtggaggtggccaagcacttcaaacctcatgggttctccagcgacaaggctaaggcgggctcctccgaatggctgactgtggatgggttggtcagtccctccaacaacagcaaggaggatgccttctctgggacacattggatgttggagaaaatggatttgaaggagttcgactttggtgccctgttgggtatagatgacctggaaaccatgccagatgaccttttgaccacgttggatgacacttgtaatctctttgcccccctagtccaggagactaataaggtgcccccccagatggtgaacccaattggccatctcccagaaagtttaacaaaacccgaccaggttgcccccttcaccttcttgcaacttcttcccctttccccaggggtccagtcctccactccagatcattcctttagtttagagctgggcagtgaagtggatatcactgaagaagataggaagccggactccactgcttacgttgccatgatccctcagtgcataaaggaggaagacaccccttcagataatgatagtggcatctgtatgagcccagagtcctatctggggtctcctcagcatagcccctctaccaggggctctccaaataggagcctcccatctccaggtgttctctgtgggtctgcccaccccaaaccttacgatcctcctggagagaagatggtagcagcaaaagtaaagggtgagaaactggataagaagctgaaaaaaatggagcaaaacaagacagcagccactaggtaccgccagaagaagagggcggagcaggaggctctcactggcgagtgcaaagagctggaaaagaagaacgaggctctaaaagagagggcagattccctggccaaggagatccagtacctgaaagatttgatagaagaggtccgcaaggcaagggggaagaaaagggtcccctagttgagggtaggtcaggagtgtcaacgtgcttgtacatagagtgtctgctgtagctgtgtgttccaataaattattttgtagggaaaaaaatacata

SEQ ID NO: 1141 - protein, 351 aa, Homo sapiens [sequence omitted]

SEQ ID NO: 1142 - DNA, 959 bp, Homo sapiens
ctctttcccatcttgcaagatggcaggtgaaaaagttgagaagccagatactaaagagaagaaacccgaagccaagaaggttgatgctggtggcaaggtgaaaaagggtaacctcaaagctaaaaagcccaagaaggggaagccccattgcagccgcaaccctgtccttgtcagaggaattggcaggtattcccgatctgccatgtattccagaaaggccatgtagaagaggaagtactcagccgctaaatccaaggttgaaaagaaaaagaaggagaaggttcttgcagctgttacaaaaccagttggtggtgacaagaacggcggtacccgggtggttaaacttcgcaaaatgcctagatagtatcctactgaagatgtgcctcgaaagctgttgagccacggcaaaaaacccttcagtcagcacgtgagaaaactgcgagccagcattacccccgggaccattctgatcatcctcactggacgccacaggggcaagagggtggttttcctgaagcagctggctagtggcttattacttgtgactggacctctggtcctcaatcgagttcctctacgaagaacacaccagaaatttgtcattgccacctcaaccaaaatcgatatcagcaatgtaaaaatcccaaaacatcttactgatgcttacttcaagaagaagaagctgcggaagcccagacaccaggaaggtgagatcttcgacacagaaaaagagaaatatgagattacggagcagcgcaagattgatcagaaagctgtggactcacaaattttaccaaaaatcaaagctattcctcagctccagggctacctgcgatctgtgtttgctctgacgaatggaatttatcctcacaaattggtgttctaaatgtcttaagaacctaattaaatagctgactacaaaaaaaaaaaaaaaaaaaaaaagacactgacaggattga

SEQ ID NO: 1143 - DNA, 7109 bp, Homo sapiens
attaattgtggctggacgcagtggcgcggcagtttaattctccggcggctgcagattgacgggacgagatggtcctggcagggctcatcaggaaactcggtcatcagctggccgagatcagggagcgcgctctcaagagtattctctgcaagattgagcacaacttaatctgctacgctgatctcattcaggagaggcaactttttcttcatttgctggaatggttcaatttcccgtccgttccgatgaaggaagaggttctgaacctgttaagcagattggttaagtatcccccagcagtccaacatttggttgacgttggtgcagtagagttcttatctaagcttcggtctaatgtggagccaaatctgcaggctgaaattgatggcattctggatggactttttcttcttccttcggaagttcctgcactatcttctgcctcataccaaaccaatcaaactgaattgtcaaaaaaccctgaaatcttaacaggatattttccccaagacaaaagtaatttccagcagatggaagtgccgccacgaccagtggtaaatcagactgtgaagtgcttgaagttttctacatttccttggctacccctgaccaccacagacagacatgtcctctcctctaatgaaagctctttaagaagtagtaaccacactttaatctggaacacctgtgaactattgaaggatgttatcatgcaagattttcctgctgagattttccttcaaaggccaaaaattgttcagagccttttatctctgttgaaactggcctttggagatggaaagcatcgcctggcattacagtcggtgtcctgcctgcagcagctgtgcatgtatttaagaaacagacttaactttcaccgagatccaggttttttctccaataaacacgacacagtttcccaaaattcttctttgtcttattgtcatgaagcaagaggtactcatcattcccagaatccttccccaggaagcagcagccctcggccttctgtggttgggcgcacaggccagcgacccagaggagatggccaggactgggatgcagcgtcctctagtggaagtagtagtcatgctcatgtaaactccaggatatccgttcattcacctttggatatgggacacatagatctgccagagctggaaactgaagacacattggaactacaattccagcagctcagtcttccccagttttgtgtctccattctggaatcagctgttcctctcttaagaacaggtagcagacaagtgataataagagttctggaattgcttacagaggatatgacacttattggtgaagcaatttcaacagatatctgggatgacagcagcctttttggtatagatatgaaggagaaactactcctggtgttgggagcccttggagaaaccatgtgctaccataaaagtagtatcagtttggagcagccagaggtgatgcttgtgcaccacagaatggcctttatcagcatttccctgtttgcagttcgactgctacaaacgcttctccctgttgaaaaggcaagcgagtttttatcagagcctatgtcaacagcattatttctcctttctttggacatgcctatttctttggaatatccaaatattcatgaagctgttgtggcctatttggaacagctgaattctgaaaactacagtatttataaacgaactgcagaggccgtttattcaattgaatgcacctgtaacttcctgtctgatattgggaaagagggagagaagaatctcttagaattagtggagctggcagaccaagccttgcgtagcttttcctatcatcagcatttcccgctaataaaggaaatcatcagcatttgttcaaagatctggaaatctgctcaggccagtccattactacaaggagaaagtcagaaggtgcttctccatatgttgtctcacccattgccacgagtgaaagctgaaacttaccactgctgtctggaaatcacgaaggaatgtttaggtgtccataatgtcactaaacccgtgtcttcactttgcaatggaattcattttctacttcatccaaaagttctgtatgaaatctctgtatttggcattcaagagcccgaaagtgaggtgaacactgctgccaaggccattctgttatacctgcttcagggacgattgatgatgacagcattgacctggaacaagtttattgaatctctctgtcctgtcatcccaatactacagggctatgccgacacagaagatcctctgggtaactgcattctccttctaagcaaagcaagttctgacacagaagagatgcttccgtgtactacccgattaaagtccatgctgcgacttttgctagtgaaaaagccatcggtccgttcgctagcattaaagcttttagcattccatcttaccagtgaagaaggggctgatacaaagcgtcctctaatagacgccagagttctctccagagttactgatttattcattgggaagaaacctattgaactcagactggatgacagaagagagctggttattaagttggagactgttgaaaaggtatatgaaatcttcacctcagatgatgttgatctcgttttgagaaagtcagctgctgaacagttagctgtgattatgcaagatattaaaatgcatgctgtggtgaaaaagttatgcttaattgacaaaataattgagtatttaaatgaatgtgtgagtcaagatggcaaggttgtagaatgtttggtacaaccatgcctcacactcttgaggaaggttttatgtggtgatccagtcatgcgtgtttcgctctcgcaacagtcttctcttttgaccgtgttattcagagtttccttaatatttcatgaagattgtagtgtcgtgactgaagttggagcactattttgtcttctattatttgatgaagtatcgagaatggatatgtggtctgttaatccttccaataaaccttctttgccatcggtcttcagtttgcctgtttccgtttttagaaggtaccatctacctgttcatgtaattggacaccatgctgtgagtccttactccatagttttgcccttatctgctgattgtttggccttgaagccggtgtcagatatgctgagaatagcttggaacctgtcatggtatcatgggagtgataatctgttgaagcaaatgaactctgaaactaaaacgcaagaaattttagatgcattgaagttatctacagaggacatcctcactctgaagataacacacatggctagtgggctgcaggactgcctccattccattgttcaggctgcaacccacagggaagttagggctgctgtcaccaggatgagtttttatcttctgaatgacagattgtctttaaagggttgccctggtccatgtggggttaccttgaagtccttggcttggcacaccgcactaaacaggtttttacaggtgcttcctgcttgcactgaagatgagaaactgctaatagatatcatacattttttaaataaattaataaaggaacaaagaaaaaattcttcactagaacttctaaactggattctcgaattacttcttagacatagtgcaaacccactgttagacctcttggttctgacagagtcacaggcacgagaagaaacagatgatatccggactgctgtcaggcaacaacttcagaaagaactgattgctctttttgataccttgctgctcaatttcatggaagttactgacaggaaatgctcggaacttctttacgtttttcaaacgcagctggctctgaaactgctccagtgtctgaaagtgacggatgcgcctcatttctatggcctgccgtcccttgagcggaccttacgagggatggctaacctcactgcgtttccgggatggagctcacactctcctctcacaaagcctctagatatctgtgtgaagtacttgtcaggtctccttgaggtcattacttctttttatgtggagcgtggaggaaatgctatgtccttcatgggaaaaggtgttacaaagagcacaattctttgcttgcttcacttatcccatgagatgatggcccaggctgggagcttggagtggatgtcactttggttcttgcctttgggtagtcatagtgaagaacatattcctactcaacaaggattggcttggttgattccattatgggttgatcgggacccagaggtgagattcacttcactgggattaggatcagcactgaccacccttgaaacgggctgtgtggccttagcaaacagttgtcagaacatttccggtgggctctggggaactgtggtgaacattcttctggaccagtcagaatgtagtatggtgcgccgggaggcggcatttattcttcagaatctccttgtaattccaatgcctacagaaattataaaggattatacttggcagggtccctgtgttcatgatgaggactctggcctatcgctcattggaaaacctgcccttcaggctcttttatatcactgccatttttatgaacatttgaatcagatggtaaagcattgttacctaggacggtgtatgtttgatttgaatttttctgcttttgatagaaattcagaaagcaatgatttaaatggtttagatgactcattcaagttttggagggctccatctaggacaagtcaggatcgagatccaagttctctctccacctcagaaacaacggtggcaccttcattggggagtactgaatttcagccacttgtgcagtcaacaacacttctacctgaagcctcccatgaccagtttgtggctcaaggtcaccaggaaagtacatcaccacggccacctcatgattcatctctttctgctcccctgcccaaactgtgtgtttttgttactccatctcttctttcagcaatgtgcagcctcttggacaacctcttgacgattgctcccagagacactgcaaaggcttttcgacaagctcatctcatagaacttctctgtagcattgcagatgctaccctcatacagacatgtgtccaggaactcagagccctgctgccttcatcacctccagctgaacacactcaggctcaggtttcctttctcctggaatacctatcctctttgtccaggcttctgcagtcatgtttattggtggagcctgaccttgtgattcaggatgagcttgtgaaacctcttatcaccaatatcattggaattctcaccatatgtaccaaagatgtattagataaagagttaatatcagctttttatcacacatggacacatttatttaatcttctggccatgctcctgaggaaagctggtgccatcacactcccgtttgttaccgtggccctggccaagcactggacagcggcgattgatatgttctgcacatgtgcaggcttgtctgccacgtgtcctgccctgtatactgccagcttgcaattcctttctgttctcttgaccgaagaagcaaaagggcatctccaggctaagagcaaaacacatttatgctgtagtccaacagtggcttcacttcttgatgactctcaggaaaatcagaaatctctagaacaacttagtgatgtaatccttcagtgctatgaagggaaatcctccaaagatatcctgaaaagagtagctgcaaatgcattgatgtcactgctggctgtcagtagaagagcacagaaacatgctttgaaagccaatcttatagacaattgcatggagcagatgaaacacataaatgcacaactgaacctagattctctgaggcctgggaaagcagcattgaaaaaaaaggaggatggtgttattaaagagttaagcattgccatgcagctcctaagaaactgtctttatcaaaatgaggaatgtaaagaagcagctcttgaagctcaccttgtccctgtcttgcactctctctggccttggattttgatggatgattcattgatgcaaatttctctgcagctcctttgtgtctatactgcaaattttccaaatggttgcagttctctttgttggtcaagttgtggacaacaccctgttcaagctacacatagaggagccgtgagcaactctctgatgctgtgtatcctaaagttggcttcccagatgccactggagaacaccacggttcagcagatggtttttatgcttctttcaaacctggccttgtcgcatgactgtaaaggagtaattcagaagagtaacttcttacagaacttcctctctctagcattgccaaaaggaggaaataaacatctaagtaatctgactattctttggttgaagttactcctgaatatatcatctggagaagatgggcaacaaatgattctgaggcttgatggctgtctagacttactaacagagatgagcaaatacaagcacaagagcagccctttattgcctcttcttatctttcataatgtttgcttcagtcctgcaaataaacccaagatcctggctaatgaaaaagtcattactgtgcttgctgcctgtctggaaagtgagaatcaaaatgctcagaggattggagcagctgccctttgggctctgatttacaattatcagaaggcaaaaacagctttgaaaagcccatcagtaaaaagaagagtggatgaagcatactccttagcaaagaaaactttcccaaactcagaagcaaaccctctaaatgcctattatttgaaatgtcttgaaaacctcgtgcagctccttaattcttcctgagtgccatgggatgctacaccttgaagctgacagtcatcaacaggggagctaaagttgaagccagctgtgtgtagcagctgttacctgaagacgtgctacctctctacaaagtgttgatccccttctttcccatgagagagagaactggtgatactccaacaccgtccagttgtggcagctctccagaagtaatagcagctgacaactttctgtgccttttcctttctgttgaaaaggcatagaaagttctgggaacataaacatttttacccttttctatgccatttattttgtaaaaatcctatttaacagttatttaataaaacaatatttttagaaactaaaaaaaaaaaaaaaaaa

SEQ ID NO: 1144 - protein, 2226 aa, Homo sapiens
MVLAGLIRKLGHQLAEIRERALKSILCKIEHNLICYADLIQERQLFLHLLEWFNFPSVPMKEEVLNLLSRLVKYPPAVQHLVDVGAVEFLSKLRSNVEPNLQAEIDGILDGLFLLPSEVPALSSASYQTNQTELSKNPEILTGYFPQDKSNFQQMEVPPRPVVNQTVKCLKFSTFPWLPLTTTDRHVLSSNESSLRSSNHTLIWNTCELLKDVIMQDFPAEIFLQRPKIVQSLLSLLKLAFGDGKHRLALQSVSCLQQLCMYLRNRLNFHRDPGFFSNKHDTVSQNSSLSYCHEARGTHHSQNPSPGSSSPRPSVVGRTGQRPRGDGQDWDAASSSGSSSHAHVNSRISVHSPLDMGHIDLPELETEDTLELQFQQLSLPQFCVSILESAVPLLRTGSRQVIIRVLELLTEDMTLIGEAISTDIWDDSSLFGIDMKEKLLLVLGALGETMCYHKSSISLEQPEVMLVHHRMAFISISLFAVRLLQTLLPVEKASEFLSEPMSTALFLLSLDMPISLEYPNIHEAVVAYLEQLNSENYSIYKRTAEAVYSIECTCNFLSDIGKEGEKNLLELVELADQALRSFSYHQHFPLIKEIISICSKIWKSAQASPLLQGESQKVLLHMLSHPLPRVKAETYHCCLEITKECLGVHNVTKPVSSLCNGIHFLLHPKVLYEISVFGIQEPESEVNTAAKAILLYLLQGRLMMTALTWNKFIESLCPVIPILQGYADTEDPLGNCILLLSKASSDTEEMLPCTTRLKSMLRLLLVKKPSVRSLALKLLAFHLTSEEGADTKRPLIDARVLSRVTDLFIGKKPIELRLDDRRELVIKLETVEKVYEIFTSDDVDLVLRKSAAEQLAVIMQDIKMHAVVKKLCLIDKIIEYLNECVSQDGKVVECLVQPCLTLLRKVLCGDPVMRVSLSQQSSLLTVLFRVSLIFHEDCSVVTEVGALFCLLLFDEVSRMDMWSVNPSNKPSLPSVFSLPVSVFRRYHLPVHVIGHHAVSPYSIVLPLSADCLALKPVSDMLRIAWNLSWYHGSDNLLKQMNSETKTQEILDALKLSTEDILTLKITHMASGLQDCLHSIVQAATHREVRAAVTRMSFYLLNDRLSLKGCPGPCGVTLKSLAWHTALNRFLQVLPACTEDEKLLIDIIHFLNKLIKEQRKNSSLELLNWILELLLRHSANPLLDLLVLTESQAREETDDIRTAVRQQLQKELIALFDTLLLNFMEVTDRKCSELLYVFQTQLALKLLQCLKVTDAPHFYGLPSLERTLRGMANLTAFPGWSSHSPLTKPLDICVKYLSGLLEVITSFYVERGGNAMSFMGKGVTKSTILCLLHLSHEMMAQAGSLEWMSLWFLPLGSHSEEHIPTQQGLAWLIPLWVDRDPEVRFTSLGLGSALTTLETGCVALANSCQNISGGLWGTVVNILLDQSECSMVRREAAFILQNLLVIPMPTEIIKDYTWQGPCVHDEDSGLSLIGKPALQALLYHCHFYEHLNQMVKHCYLGRCMFDLNFSAFDRNSESNDLNGLDDSFKFWRAPSRTSQDRDPSSLSTSETTVAPSLGSTEFQPLVQSTTLLPEASHDQFVAQGHQESTSPRPPHDSSLSAPLPKLCVFVTPSLLSAMCSLLDNLLTIAPRDTAKAFRQAHLIELLCSIADATLIQTCVQELRALLPSSPPAEHTQAQVSFLLEYLSSLSRLLQSCLLVEPDLVIQDELVKPLITNIIGILTICTKDVLDKELISAFYHTWTHLFNLLAMLLRKAGAITLPFVTVALAKHWTAAIDMFCTCAGLSATCPALYTASLQFLSVLLTEEAKGHLQAKSKTHLCCSPTVASLLDDSQENQKSLEQLSDVILQCYEGKSSKDILKRVAANALMSLLAVSRRAQKHALKANLIDNCMEQMKHINAQLNLDSLRPGKAALKKKEDGVIKELSIAMQLLRNCLYQNEECKEAALEAHLVPVLHSLWPWILMDDSLMQISLQLLCVYTANFPNGCSSLCWSSCGQHPVQATHRGAVSNSLMLCILKLASQMPLENTTVQQMVFMLLSNLALSHDCKGVIQKSNFLQNFLSLALPKGGNKHLSNLTILWLKLLLNISSGEDGQQMILRLDGCLDLLTEMSKYKHKSSPLLPLLIFHNVCFSPANKPKILANEKVITVLAACLESENQNAQRIGAAALWALIYNYQKAKTALKSPSVKRRVDEAYSLAKKTFPNSEANPLNAYYLKCLENLVQLLNSS

SEQ ID NO: 1145 - DNA, 3014 bp, Homo sapiens
caggtggccctgaattcattgcctgctcagcaaaataaaggcccagtgtggaagccggaacttgcatttgaagaaggatgggaaggatgggttgaggagggcccatccccagcagcccgagagggaggaggccacggagacttggagcattcccgtttcttccagagcgctgcgggataaaggaggagcgtcctgcttcccggctgccctgttgctgtcggagtcacaggatggcggctgtcatcctgccctcgactgctgctccgtcttccctgttcccagcctctcagcaaaaaggacacacacagggcggagagctggttaatgagctcctgacaagctggctacggggcttggtaaccttcgaggatgtggccgtggagttcacccaggaggagtgggcgttgctggaccctgcccaaaggacactgtacagggatgtgatgctggagaactgcaggaacctggcctcactagggtgtcgtgttaataaacccagtctgatatcccagttggaacaagacaagaaggtggtgacagaggaaagaggaattctaccaagcacctgtccagatttggagactctacttaaagccaaatggttaactcctaagaagaatgttttcagaaaagaacagtctaaaggtgtaaaaacggaaagaagtcatcgtggagtgaaactcaatgaatgtaatcagtgttttaaagtcttcagcacgaaatctaacctaactcagcacaagagaattcatactggagaaaaaccctatgactgtagtcaatgtgggaagtccttcagtagcagatcttaccttactattcataagagaatccataatggggagaaaccctatgaatgcaatcactgtgggaaagcatttagtgatccctcatcccttagactgcatttgagaattcacactggagaaaaaccctatgaatgtaaccagtgttttcacgttttccgcaccagttgtaacctcaaaagccacaagaggattcacacgggggagaatcaccatgaatgtaatcagtgtggaaaagctttcagcacaaggtcctctctcactgggcacaatagcattcatacaggggagaaaccttatgaatgtcacgattgtgggaaaaccttcaggaagagctcctatctgacacagcacgtaagaactcatactggagaaaaaccctatgaatgtaacgagtgtgggaaatccttcagcagtagcttttctcttactgtgcacaagagaatacataccggagagaaaccctacgagtgcagtgactgtggaaaagcctttaataatctctcagctgtgaagaaacacttaagaactcacactggagaaaaaccctatgaatgtaatcattgtgggaaatccttcacaagtaactcctatctttctgtgcacaagagaatacataatagatggatatgaattactgcaggaacttctggaggaaagcactcattgatctttcatccctaagatagtttgagagagctcacactggatatataagttatttgttgcagcataacaaatgatccccgcaaattttgtggcttcaaacacgaaatgtttattctctaacaatttctacagatcaggaattcaagaacagcttatctctgtagttacactgcaggatctctcatgcctttacttacaatcaagatgtcagccaaagctatagtcatctaacatctttactgatgaacagtccacttccaagatgacttattcacatgcctggaaagttgatgttggttgttgtcaggggaccttcagtcattaccatgtaggcctctttacaaggcccagctccttgacaatttggcaataagttctcgccaaggttagtgatccaagagaggaccaatacagaggccaaaatggcttttatggcctatcctcaggaggactgctaagctttcacttatttcctattgtgttggtctcacaacacaccaatcctgatacaatgtgagagactgcagaaggtatgaataccaggaaacagataactcagaagcatctgggaaatttgccatggaattaatgaagaaaagccctcagcacatcatccttctactctaatcaatatgaaatagcattcagtaactcctattaattcactctgaagagaaaccttttgaggacaatctgtatggtaaagctctcagctcgaattctcaccttcatgggcccagaagattatgtactgagagaatcctgaagaatggaacagctgtagaaagccttcagtgctatcagcagggattcatgtgacagctcacactaagggagaaaacctgtgaaggtctcagaaggcttcagtgacagtcatcccttaagacacactggaaatcacacaatggaacaacactcagaaatgcggaataccctgcagcaaaagtgttcacattactgagcaaactatagtgtggtattctgcagtgactatgggaaagccttgaatgttctatcggtttttaagggacttgagaattaattctggagagaatgccccattgaacatcatcaatattggagagctttctgtttttctacatttgttaggaaacttgtgagcattcacactacagagaaacttgaaatataaagaagaagagaaagccttcagtgatgcctctgtgttagggaaaatatggaacttctccctggatgcaaaacctatgagtatattaatattggaaaatttttcagtgattcttctctttcttgtatatgagagaacttacatggagaaacccctaggaatgtaatcagtgttaggatgcctcagcctgaactcttcactgagtggccacaattttcactgggaacaaaaagtataatcactgttttgagtgtgggatatcctttatcagtgtctcatctgtagattggactgctggctcattaatttttttagtctttttttcttttaatataaacatttgtgtatagctgttccctaaaataaacattaacatatttcataatttt

SEQ ID NO: 1146 - protein, 402 aa, Homo sapiens
MAAVILPSTAAPSSLFPASQQKGHTQGGELVNELLTSWLRGLVTFEDVAVEFTQEEWALLDPAQRTLYRDVMLENCRNLASLGCRVNKPSLISQLEQDKKVVTEERGILPSTCPDLETLLKAKWLTPKKNVFRKEQSKGVKTERSHRGVKLNECNQCFKVFSTKSNLTQHKRIHTGEKPYDCSQCGKSFSSRSYLTIHKRIHNGEKPYECNHCGKAFSDPSSLRLHLRIHTGEKPYECNQCFHVFRTSCNLKSHKRIHTGENHHECNQCGKAFSTRSSLTGHNSIHTGEKPYECHDCGKTFRKSSYLTQHVRTHTGEKPYECNECGKSFSSSFSLTVHKRIHTGEKPYECSDCGKAFNNLSAVKKHLRTHTGEKPYECNHCGKSFTSNSYLSVHKRIHNRWI

SEQ ID NO: 1147 - DNA, 664 bp, Homo sapiens
agtgtaagaggaaaagaagtgtgatggccaagagttcacagaggaagcaacgtgactgtgtaaaccaatgcaaatcaaagcctggcttgagcacctcaatccctttgagaatgtccagttacacattcaagaggccagtaacgagaattacaccccatcctggcaatgaggtcagataccatcaatgggaggagagcttggagaagcctcagcaggtctgctggcagaggagactgcagggactccaggcttacagcagtgcaggagaactttcaagcactttggatcttgccaataccttgcaaaaacttgtccctagttacacaggtggatctctgctggaggatcttgccagtggtctggagcactcctgccccatgccccaccttgcctgctcttcagatgcggtggagataattcctgcagagggagtgggtatctcgcagctcctctgcaaacaatttctggtcactgaggaagatatcaggaaacaggaagggaaagtgaagacagtcagagagagactcgcaatagcactgattgcggatggactcgctaatgaggcagagaaagtgagagaccaagaaggctgtcctgaaaaacgctaagaaaaaaagggaagatagtgcagatgaaataaagtgtaatcctttattaacatctc

SEQ ID NO: 1148 - protein, 194 aa, Homo sapiens
MAKSSQRKQRDCVNQCKSKPGLSTSIPLRMSSYTFKRPVTRITPHPGNEVRYHQWEESLEKPQQVCWQRRLQGLQAYSSAGELSSTLDLANTLQKLVPSYTGGSLLEDLASGLEHSCPMPHLACSSDAVEIIPAEGVGISQLLCKQFLVTEEDIRKQEGKVKTVRERLAIALIADGLANEAEKVRDQEGCPEKR

SEQ ID NO: 1149 - DNA, 43816 bp, Homo sapiens
aagcgttgcacaattcccccaacctccatacatacggcagctcttctagacacaggttttcccaggtcaaatgcggggaccccagccatatctcccaccctgagaaattttggagtttcagggagctcagaagctctgcagaggccaccctctctgaggggattcttcttagacctccatccagaggcaaatgttgacctgtccatgctgaaaccctcaggccttcctgggtcatcttctcccacccgctccttgatgacagggagcaggagcactaaagccacaccagaaatggattcaggactgacaggagccaccttgtcacctaagacatctacaggtgcaatcgtggtgacagaacatactctgccctttacttccccagataagaccttggccagtcctacatcttcggttgtgggaagaaccacccagtctttgggggtgatgtcctctgctctccctgagtcaacctctagaggaatgacacactccgagcaaagaaccagcccatcgctgagtccccaggtcaatggaactccctctaggaactaccctgctacaagcatggtttcaggattgagttccccaaggaccaggaccagttccacagaaggaaattttaccaaagaagcatctacatacacactcactgtagagaccacaagtggcccagtcactgagaagtacacagtccccactgagacctcaacaactgaaggtgacagcacagagaccccctgggacacaagatatattcctgtaaaaatcacatctccaatgaaaacatttgcagattcaactgcatccaaggaaaatgccccagtgtctatgactccagctgagaccacagttactgactcacatactccaggaaggacaaacccatcatttgggacactttattcttccttccttgacctatcacctaaagggaccccaaattccagaggtgaaacaagcctggaactgattctatcaaccactggatatcccttctcctctcctgaacctggctctgcaggacacagcagaataagtaccagtgcgcctttgtcatcatctgcttcagttctcgataataaaatatcagagaccagcatattctcaggccagagtctcacctcccctctgtctcctggggtgcccgaggccagagccagcacaatgcccaactcagctatccctttttccatgacactaagcaatgcagaaacaagtgccgaaagggtcagaagcacaatttcctctctggggactccatcaatatccacaaagcagacagcagagactatccttaccttccatgccttcgctgagaccatggatatacccagcacccacatagccaagactttggcttcagaatggttgggaagtccaggtacccttggtggcaccagcacttcagcgctgacaaccacatctccatctaccactttagtctcagaggagaccaacacccatcactccacgagtggaaaggaaacagaaggaactttgaatacatctatgactccacttgagacctctgctcctggagaagagtccgaaatgactgccaccttggtccccactctaggttttacaactcttgacagcaagatcagaagtccatctcaggtctcttcatcccacccaacaagagagctcagaaccacaggcagcacctctgggaggcagagttccagcacagctgcccacgggagctctgacatcctgagggcaaccacttccagcacctcaaaagcatcatcatggaccagtgaaagcacagctcagcaatttagtgaaccccagcacacacagtgggtggagacaagtcctagcatgaaaacagagagacccccagcatcaaccagtgtggcagcccctatcaccacttctgttccctcagtggtctctggcttcaccaccctgaagaccagctccacaaaagggatttggcttgaagaaacatctgcagacacactcatcggagaatccacagctggcccaaccacccatcagtttgctgttcccactgggatttcaatgacaggaggcagcagcaccaggggaagccagggcacaacccacctactcaccagagccacagcatcatctgagacatccgcagatttgactctggccacgaacggtgtcccagtctccgtgtctccagcagtgagcaagacggctgctggctcaagtcctccaggagggacaaagccatcatatacaatggtttcttctgtcatccctgagacatcatctctacagtcctcagctttcagggaaggaaccagcctgggactgactccattaaacactagacatcccttctcttcccctgaaccagactctgcaggacacaccaagataagcaccagcattcctctgttgtcatctgcttcagttcttgaggataaagtgtcagcgaccagcacattctcacaccacaaagccacctcatctattaccacagggactcctgaaatctcaacaaagacaaagcccagctcagccgttctttcctccatgaccctaagcaatgcagcaacaagtcctgaaagagtcagaaatgcaacttcccctctgactcatccatctccatcaggggaagagacagcagggagtgtcctcactctcagcacctctgctgagactacagactcacctaacatccacccaactgggacactgacttcagaatcgtcagagagtcctagcactctcagcctcccaagtgtctctggagtcaaaaccacattttcttcatctactccttccactcatctatttactagtggagaagaaacagaggaaacttcgaatccatctgtgtctcaacctgagacttctgtttccagagtaaggaccaccttggccagcacctctgtccctaccccagtattccccaccatggacacctggcctacacgttcagctcagttctcttcatcccacctagtgagtgagctcagagctacgagcagtacctcagttacaaactcaactggttcagctcttcctaaaatatctcacctcactgggacggcaacaatgtcacagaccaatagagacacgtttaatgactctgctgcaccccaaagcacaacttggccagagactagtcccagattcaagacagggttaccttcagcaacaaccactgtttcaacctctgccacttctctctctgctactgtaatggtctctaaattcacttctccagcaactagttccatggaagcaacttctatcagggaaccatcaacaaccatcctcacaacagagaccacgaatggcccaggctctatggctgtggcttctaccaacatcccaattggaaagggctacattactgaaggaagattggacacaagccatctgcccattggaaccacagcttcctctgagacatctatggattttaccatggccaaagaaagtgtctcaatgtcagtatctccatctcagtccatggatgctgctggctcaagcactccaggaaggacaagccaattcgttgacacattttctgatgatgtctatcatttaacatccagagaaattacaatacctagagatggaacaagctcagctctgactccacaaatgactgcaactcaccctccatctcctgatcctggctctgctagaagcacctggcttggcatcttgtcctcatctccttcttctcctactcccaaagtcacaatgagctccacattttcaactcagagagtcaccacaagcatgataatggacacagttgaaactagtcggtggaacatgcccaacttaccttccacgacttccttgacaccaagtaatattccaacaagtggtgccataggaaaaagcaccctggttcccttggacactccatctccagccacatcattggaggcatcagaagggggacttccaaccctcagcacctaccctgaatcaacaaacacacccagcatccacctcggagcacacgctagttcagaaagtccaagcaccatcaaacttaccatggcttcagtagtaaaacctggctcttacacacctctcaccttcccctcaatagagacccacattcatgtatcaacagccagaatggcttactcttctgggtcttcacctgagatgacagctcctggagagactaacactggtagtacctgggaccccaccacctacatcaccactacggatcctaaggatacaagttcagctcaggtctctacaccccactcagtgaggacactcagaaccacagaaaaccatccaaagacagagtccgccaccccagctgcttactctggaagtcctaaaatctcaagttcacccaatctcaccagtccggccacaaaagcatggaccatcacagacacaactgaacactccactcaattacattacacaaaattggcagaaaaatcatctggatttgagacacagtcagctccaggacctgtctctgtagtaatccctacctcccctaccattggaagcagcacattggaactaacttctgatgtcccaggggaacccctggtccttgctcccagtgagcagaccacaatcactctccccatggcaacatggctgagtaccagtttgacagaggaaatggcttcaacagaccttgatatttcaagtccaagttcacccatgagtacatttgctatttttccacctatgtccacaccttctcatgaactttcaaagtcagaggcagataccagtgccattagaaatacagattcaacaacgttggatcagcacctaggaatcaggagtttgggcagaactggggacttaacaactgttcctatcaccccactgacaaccacgtggaccagtgtgattgaacactcaacacaagcacaggacaccctttctgcaacgatgagtcctactcacgtgacacagtcactcaaagatcaaacatctataccagcctcagcatccccttcccatcttactgaagtctaccctgagctcgggacacaagggagaagctcctctgaggcaaccactttttggaaaccatctacagacacactgtccagagagattgagactggcccaacaaacattcaatccactccacccatggacaacacaacaacagggagcagtagtagtggagtcaccctgggcatagcccaccttcccataggaacatcctccccagctgagacatccacaaacatggcactggaaagaagaagttctacagccactgtctctatggctgggacaatgggactccttgttactagtgctccaggaagaagcatcagccagtcattaggaagagtttcctctgtcctttctgagtcaactactgaaggagtcacagattctagtaagggaagcagcccaaggctgaacacacagggaaatacagctctctcctcctctcttgaacccagctatgctgaaggaagccagatgagcacaagcatccctctaacctcatctcctacaactcctgatgtggaattcatagggggcagcacattttggaccaaggaggtcaccacagttatgacctcagacatctccaagtcttcagcaaggacagagtccagctcagctacccttatgtccacagctttgggaagcactgaaaatacaggaaaagaaaaactcagaactgcctctatggatcttccatctccaactccatcaatggaggtgacaccatggatttctctcactctcagtaatgcccccaataccacagattcacttgacctcagccatggggtgcacaccagctctgcagggactttggccactgacaggtcattgaatactggtgtcactagagcctccagattggaaaacggctctgatacctcttctaagtccctgtctatgggaaacagcactcacacttccatgacttacacagagaagagtgaagtgtcttcttcaatccatccccgacctgagacctcagctcctggagcagagaccactttgacttccactcctggaaacagggccataagcttaacattgcctttttcatccattccagtggaagaagtcatttctacaggcataacctcaggaccagacatcaactcagcacccatgacacattctcccatcaccccaccaacaattgtatggaccagtacaggcacaattgaacagtccactcaaccactacatgcagtttcttcagaaaaagtttctgtgcagacacagtcaactccatatgtcaactctgtggcagtgtctgcttcccctacccatgagaattcagtctcttctggaagcagcacatcctctccatattcctcagcctcacttgaatccttggattccacaatcagtaggaggaatgcaatcacttcctggctatgggacctcactacatctctccccactacaacttggccaagtactagtttatctgaggcactgtcctcaggccattctggggtttcaaacccaagttcaactacgactgaatttccactcttttcagctgcatccacatctgctgctaagcaaagaaatccagaaacagagacccatggtccccagaatacagccgcgagtactttgaacactgatgcatcctcggtcacaggtctttctgagactcctgtgggggcaagtatcagctctgaagtccctcttccaatggccataacttctagatcagatgtttctggccttacatctgagagtactgctaacccgagtttaggcacagcctcttcagcagggaccaaattaactaggacaatatccctgcccacttcagagtctttggtttcctttagaatgaacaaggatccatggacagtgtcaatccctttggggtcccatccaactactaatacagaaacaagcatcccagtaaacagcgcaggtccacctggcttgtccacagtagcatcagatgtaattgacacaccttcagatggggctgagagtattcccactgtctccttttccccctcccctgatactgaagtgacaactatctcacatttcccagaaaagacaactcattcatttagaaccatttcatctctcactcatgagttgacttcaagagtgacacctattcctggggattggatgagttcagctatgtctacaaagcccacaggagccagtccctccattacactgggagagagaaggacaatcacctctgctgctccaaccacttcccccatagttctcactgctagtttcacagagaccagcacagtttcactggataatgaaactacagtaaaaacctcagatatccttgacgcacggaaaacaaatgagctcccctcagatagcagttcttcttctgatctgatcaacacctccatagcttcttcaactatggatgtcactaaaacagcctccatcagtcccactagcatctcaggaatgacagcaagttcctccccatctctcttctcttcagatagaccccaggttcccacatctacaacagagacaaatacagccacctctccatctgtttccagtaacacctattctcttgatgggggctccaatgtgggtggcactccatccactttaccaccctttacaatcacccaccctgtcgagacaagctcggccctattagcctggtctagaccagtaagaactttcagcaccatggtcagcactgacactgcctccggagaaaatcctacctctagcaattctgtggtgacttctgttccagcaccaggtacatggaccagtgtaggcagtactactgacttacctgccatgggctttctcaagacaagtcctgcaggagaggcacactcacttctagcatcaactattgaaccagccactgccttcactccccatctctcagcagcagtggtcactggatccagtgctacatcagaagccagtcttctcactacgagtgaaagcaaagccattcattcttcaccacagaccccaactacacccacctctggagcaaactgggaaacttcagctactcctgagagccttttggtagtcactgagacttcagacacaacacttacctcaaagattttggtcacagataccatcttgttttcaactgtgtccacgccaccttctaaatttccaagtacggggactctgtctggagcttccttccctactttactcccggacactccagccatccctctcactgccactgagccaacaagttcattagctacatcctttgattccaccccactggtgactatagcttcggatagtcttggcacagtcccagagactaccctgaccatgtcagagacctcaaatggtgatgcactggttcttaagacagtaagtaacccagataggagcatccctggaatcactatccaaggagtaacagaaagtccactccatccttcttccacttccccctctaagattgttgctccacggaatacaacctatgaaggttcgatcacagtggcactttctactttgcctgcgggaactactggttcccttgtattcagtcagagttctgaaaactcagagacaacggctttggtagactcatcagctgggcttgagagggcatctgtgatgccactaaccacaggaagccagggtatggctagctctggaggaatcagaagtgggtccactcactcaactggaaccaaaacattttcttctctccctctgaccatgaacccaggtgaggttacagccatgtctgaaatcaccacgaacagactgacagctactcaatcaacagcacccaaagggatacctgtgaagcccaccagtgctgagtcaggcctcctaacacctgtctctgcctcctcaagcccatcaaaggcctttgcctcactgactacagctcccccaacttgggggatcccacagtctaccttgacatttgagttttctgaggtcccaagtttggatactaagtccgcttctttaccaactcctggacagtccctgaacaccattccagactcagatgcaagcacagcatcttcctcactgtccaagtctccagaaaaaaacccaagggcaaggatgatgacttccacaaaggccataagtgcaagctcatttcaatcaacaggttttactgaaacccctgagggatctgcctccccttctatggcagggcatgaacccagagtccccacttcaggaacaggggaccctagatatgcctcagagagcatgtcttatccagacccaagcaaggcatcatcagctatgacatcgacctctcttgcatcaaaactcacaactctcttcagcacaggtcaagcagcaaggtctggttctagttcctctcccataagcctatccactgagaaagaaacaagcttcctttcccccactgcatccacctccagaaagacttcactatttcttgggccttccatggcaaggcagcccaacatattggtgcatcttcagacttcagctctgacactttctccaacatccactctaaatatgtcccaggaggagcctcctgagttaacctcaagccagaccattgcagaagaagagggaacaacagctgaaacacagacgttaaccttcacaccatctgagaccccaacatccttgttacctgtctcttctcccacagaacccacagccagaagaaagagttctccagaaacatgggcaagctctatttcagttcctgccaagacctccttggttgaaacaactgatggaacgctagtgaccaccataaagatgtcaagccaggcagcacaaggaaattccacgtggcctgccccagcagaggagacggggagcagtccagcaggcacatccccaggaagcccagaaatgtctaccactctcaaaatcatgagctccaaggaacccagcatcagcccagagatcaggtccactgtgagaaattctccttggaagactccagaaacaactgttcccatggagaccacagtggaaccagtcacccttcagtccacagccctaggaagtggcagcaccagcatctctcacctgcccacaggaaccacatcaccaaccaagtcaccaacagaaaatatgttggctacagaaagggtctccctctccccatccccacctgaggcttggaccaacctttattctggaactccaggagggaccaggcagtcactggccacaatgtcctctgtctccctagagtcaccaactgctagaagcatcacagggactggtcagcaaagcagtccagaactggtttcaaagacaactggaatggaattctctatgtggcatggctctactggagggaccacaggggacacacatgtctctctgagcacatcttccaatatccttgaagaccctgtaaccagcccaaactctgtgagctcattgacagataaatccaaacataaaaccgagacatgggtaagcaccacagccattccctccactgtcctgaataataagataatggcagctgaacaacagacaagtcgatctgtggatgaggcttattcatcaactagttcttggtcagatcagacatctgggagtgacatcacccttggtgcatctcctgatgtcacaaacacattatacatcacctccacagcacaaaccacctcactagtgtctctgccctctggagaccaaggcattacaagcctcaccaatccctcaggaggaaaaacaagctctgcgtcatctgtcacatctccttcaatagggcttgagactctgagggccaatgtaagtgcagtgaaaagtgacattgcccctactgctgggcatctatctcagacttcatctcctgcggaagtgagcatcctggacgtaaccacagctcctactccaggtatctccaccaccatcaccaccatgggaaccaactcaatctcaactaccacacccaacccagaagtgggtatgagtaccatggacagcaccccggccacagagaggcgcacaacttctacagaacacccttccacctggtcttccacagctgcatcagattcctggactgtcacagacatgacttcaaacttgaaagttgcaagatctcctggaacaatttccacaatgcatacaacttcattcttagcctcaagcactgaattagactccatgtctactccccatggccgtataactgtcattggaaccagcctggtcactccatcctctgatgcttcagctgtaaagacagagaccagtacaagtgaaagaacattgagtccttcagacacaactgcatctactcccatctcaactttttctcgtgtccagaggatgagcatctcagttcctgacattttaagtacaagttggactcccagtagtacagaagcagaagatgtgcctgtttcaatggtttctacagatcatgctagtacaaagactgacccaaatacgcccctgtccacttttctgtttgattctctgtccactcttgactgggacactgggagatctctgtcatcagccacagccactacctcagctcctcagggggccacaactccccaggaactcactttggaaaccatgatcagcccagctacctcacagttgcccttctctatagggcacattacaagtgcagtcacaccagctgcaatggcaaggagctctggagttactttttcaagaccagatcccacaagcaaaaaggcagagcagacttccactcagcttcccaccaccacttctgcacatccagggcaggtgcccagatcagcagcaacaactctggatgtgatcccacacacagcaaaaactccagatgcaacttttcagagacaagggcagacagctcttacaacagaggcaagagctacatctgactcctggaatgagaaagaaaaatcaaccccaagtgcaccttggatcactgagatgatgaattctgtctcagaagataccatcaaggaggttaccagctcctccagtgtattaaggaccctgaatacgctggacataaacttggaatctgggacgacttcatccccaagttggaaaagcagcccatatgagagaattgccccttctgagtccaccacagacaaagaggcaattcacccttctacaaacacagtagagaccacaggctgggtcacaagttccgaacatgcttctcattccactatcccagcccactcagcgtcatccaaactcacatctccagtggttacaacctccaccagggaacaagcaatagtttctatgtcaacaaccacatggccagagtctacaagggctagaacagagcctaattccttcttgactattgaactgagggacgtcagcccttacatggacaccagctcaaccacacaaacaagtattatctcttccccaggttccactgcgatcaccaaggggcctagaacagaaattacctcctctaagagaatatccagctcattccttgcccagtctatgaggtcgtcagacagcccctcagaagccatcaccaggctgtctaactttcctgccatgacagaatctggaggaatgatccttgctatgcaaacaagtccacctggcgctacatcactaagtgcacctactttggatacatcagccacagcctcctggacagggactccactggctacgactcagagatttacatactcagagaagaccactctctttagcaaaggtcctgaggatacatcacagccaagccctccctctgtggaagaaaccagctcttcctcttccctggtacctatccatgctacaacctcgccttccaatattttgttgacatcacaagggcacagtccctcctctactccacctgtgacctcagttttcttgtctgagacctctggcctggggaagaccacagacatgtcgaggataagcttggaacctggcacaagtttacctcccaatttgagcagtacagcaggtgaggcgttatccacttatgaagcctccagagatacaaaggcaattcatcattctgcagacacagcagtgacgaatatggaggcaaccagttctgaatattctcctatcccaggccatacaaagccatccaaagccacatctccattggttacctcccacatcatgggggacatcacttcttccacatcagtatttggctcctccgagaccacagagattgagacagtgtcctctgtgaaccagggacttcaggagagaagcacatcccaggtggccagctctgctacagagacaagcactgtcattacccatgtgtctagtggtgatgctactactcatgtcaccaagacacaagccactttctctagcggaacatccatctcaagccctcatcagtttataacttctaccaacacatttacagatgtgagcaccaacccctccacctctctgataatgacagaatcttcaggagtgaccatcaccacccaaacaggtcctactggagctgcaacacagggtccatatctcttggacacatcaaccatgccttacttgacagagactccattagctgtgactccagattttatgcaatcagagaagaccactctcataagcaaaggtcccaaggatgtgtcctggacaagccctccctctgtggcagaaaccagctatccctcttccctgacacctttcttggtcacaaccatacctcctgccacttccacgttacaagggcaacatacatcctctcctgtttctgcgacttcagttcttacctctggactggtgaagaccacagatatgttgaacacaagcatggaacctgtgaccaattcacctcaaaatttgaacaatccatcaaatgagatactggccactttggcagccaccacagatatagagactattcatccttccataaacaaagcagtgaccaatatggggactgccagttcagcacatgtactgcattccactctcccagtcagctcagaaccatctacagccacatctccaatggttcctgcctccagcatgggggacgctcttgcttctatatcaatacctggttctgagaccacagacattgagggagagccaacatcctccctgactgctggacgaaaagagaacagcaccctccaggagatgaactcaactacagagtcaaacatcatcctctccaatgtgtctgtgggggctattactgaagccacaaaaatggaagtcccctcttttgatgcaacattcataccaactcctgctcagtcaacaaagttcccagatattttctcagtagccagcagtagactttcaaactctcctcccatgacaatatctacccacatgaccaccacccagacagggtcttctggagctacatcaaagattccacttgccttagacacatcaaccttggaaacctcagcagggactccatcagtggtgactgaggggtttgcccactcaaaaataaccactgcaatgaacaatgatgtcaaggacgtgtcacagacaaaccctccctttcaggatgaagccagctctccctcttctcaagcacctgtccttgtcacaaccttaccttcttctgttgctttcacaccgcaatggcacagtacctcctctcctgtttctatgtcctcagttcttacttcttcactggtaaagaccgcaggcaaggtggatacaagcttagaaacagtgaccagttcacctcaaagtatgagcaacactttggatgacatatcggtcacttcagcagccaccacagatatagagacaacgcatccttccataaacacagtagttaccaatgtggggaccaccggttcagcatttgaatcacattctactgtctcagcttacccagagccatctaaagtcacatctccaaatgttaccacctccaccatggaagacaccacaatttccagatcaatacctaaatcctctaagactacaagaactgagactgagacaacttcctccctgactcctaaactgagggagaccagcatctcccaggagatcacctcgtccacagagacaagcactgttccttacaaagagctcactggtgccactaccgaggtatccaggacagatgtcacttcctctagcagtacatccttccctggccctgatcagtccacagtgtcactagacatctccacagaaaccaacaccaggctgtctacctccccaataatgacagaatctgcagaaataaccatcaccacccaaacaggtcctcatggggctacatcacaggatacttttaccatggacccatcaaatacaaccccccaggcagggatccactcagctatgactcatggattttcacaattggatgtgaccactcttatgagcagaattccacaggatgtatcatggacaagtcctccctctgtggataaaaccagctccccctcttcctttctgtcctcacctgcaatgaccacaccttccctgatttcttctaccttaccagaggataagctctcctctcctatgacttcacttctcacctctggcctagtgaagattacagacatattacgtacacgcttggaacctgtgaccagctcacttccaaatttcagcagcacctcagataagatactggccacttctaaagacagtaaagacacaaaggaaatttttccttctataaacacagaagagaccaatgtgaaagccaacaactctggacatgaatcccattcccctgcactggctgactcagagacacccaaagccacaactcaaatggttatcaccaccactgtgggagatccagctccttccacatcaatgccagtgcatggttcctctgagactacaaacattaagagagagccaacatatttcttgactcctagactgagagagaccagtacctctcaggagtccagctttcccacggacacaagttttctactttccaaagtccccactggtactattactgaggtctccagtacaggggtcaactcttctagcaaaatttccaccccagaccatgataagtccacagtgccacctgacaccttcacaggagagatccccagggtcttcacctcctctattaagacaaaatctgcagaaatgacgatcaccacccaagcaagtcctcctgagtctgcatcgcacagtacccttcccttggacacatcaaccacactttcccagggagggactcattcaactgtgactcagggattcccatactcagaggtgaccactctcatgggcatgggtcctgggaatgtgtcatggatgacaactccccctgtggaagaaaccagctctgtgtcttccctgatgtcttcacctgccatgacatccccttctcctgtttcctccacatcaccacagagcatcccctcctctcctcttcctgtgactgcacttcctacttctgttctggtgacaaccacagatgtgttgggcacaacaagcccagagtctgtaaccagttcacctccaaatttgagcagcatcactcatgagagaccggccacttacaaagacactgcacacacagaagccgccatgcatcattccacaaacaccgcagtgaccaatgtagggacttccgggtctggacataaatcacaatcctctgtcctagctgactcagagacatcgaaagccacacctctgatgagtaccacctccaccctgggggacacaagtgtttccacatcaactcctaatatctctcagactaaccaaattcaaacagagccaacagcatccctgagccctagactgagggagagcagcacgtctgagaagaccagctcaacaacagagacaaatactgccttttcttatgtgcccacaggtgctattactcaggcctccagaacagaaatctcctctagcagaacatccatctcagaccttgatcggcccacaatagcacccgacatctccacaggaatgatcaccaggctcttcacctcccccatcatgacaaaatctgcagaaatgaccgtcaccactcaaacaactactcctggggctacatcacagggtatccttccctgggacacatcaaccacacttttccagggagggactcattcaaccgtgtctcagggattcccacactcagagataaccactcttcggagcagaacccctggagatgtgtcatggatgacaactccccctgtggaagaaaccagctctgggttttccctgatgtcaccttccatgacatccccttctcctgtttcctccacatcaccagagagcatcccctcctctcctctccctgtgactgcacttcttacttctgttctggtgacaaccacaaatgtattgggcacaacaagcccagagcccgtaacgagttcacctccaaatttaagcagccccacacaggagagactgaccacttacaaagacactgcgcacacagaagccatgcatgcttccatgcatacaaacactgcagtggccaacgtggggacctccatttctggacatgaatcacaatcttctgtcccagctgattcacacacatccaaagccacatctccaatgggtatcaccttcgccatgggggatacaagtgtttctacatcaactcctgccttctttgagactagaattcagactgaatcaacatcctctttgattcctggattaagggacaccaggacgtctgaggagatcaacactgtgacagagaccagcactgtcctttcagaagtgcccactactactactactgaggtctccaggacagaagttatcacttccagcagaacaaccatctcagggcctgatcattccaaaatgtcaccctacatctccacagaaaccatcaccaggctctccacttttccttttgtaacaggatccacagaaatggccatcaccaaccaaacaggtcctatagggactatctcacaggctacccttaccctggacacatcaagcacagcttcctgggaagggactcactcacctgtgactcagagatttccacactcagaggagaccactactatgagcagaagtactaagggcgtgtcatggcaaagccctccctctgtggaagaaaccagttctccttcttccccagtgcctttacctgcaataacctcacattcatctctttattccgcagtatcaggaagtagccccacttctgctctccctgtgacttcccttctcacctctggcaggaggaagaccatagacatgttggacacacactcagaacttgtgaccagctccttaccaagtgcaagtagcttctcaggtgagatactcacttctgaagcctccacaaatacagagacaattcacttttcagagaacacagcagaaaccaatatggggaccaccaattctatgcataaactacattcctctgtctcaatccactcccagccatccggacacacacctccaaaggttactggatctatgatggaggacgctattgtttccacatcaacacctggttctcctgagactaaaaatgttgacagagactcaacatcccctctgactcctgaactgaaagaggacagcaccgccctggtgatgaactcaactacagagtcaaacactgttttctccagtgtgtccctggatgctgctactgaggtctccagggcagaagtcacctactatgatcctacattcatgccagcttctgctcagtcaacaaagtccccagacatttcacctgaagccagcagcagtcattctaactctcctcccttgacaatatctacacacaagaccatcgccacacaaacaggtccttctggggtgacatctcttggccaactgaccctggacacatcaaccatagccacctcagcaggaactccatcagccagaactcaggattttgtagattcagaaacaaccagtgtcatgaacaatgatctcaatgatgtgttgaagacaagccctttctctgcagaagaagccaactctctctcttctcaggcacctctccttgtgacaacctcaccttctcctgtaacttccacattgcaagagcacagtacctcctctcttgtttctgtgacctcagtacccacccctacactggcgaagatcacagacatggacacaaacttagaacctgtgactcgttcacctcaaaatttaaggaacaccttggccacttcagaagccaccacagatacacacacaatgcatccttctataaacacagcagtggccaatgtggggaccaccagttcaccaaatgaattctattttactgtctcacctgactcagacccatataaagccacatccgcagtagttatcacttccacctcgggggactcaatagtttccacatcaatgcctagatcctctgcgatgaaaaagattgagtctgagacaactttctccctgatatttagactgagggagactagcacctcccagaaaattggctcatcctcagacacaagcacggtctttgacaaagcattcactgctgctactactgaggtctccagaacagaactcacctcctctagcagaacatccatccaaggcactgaaaagcccacaatgtcaccggacacctccacaagatctgtcaccatgctttctacttttgctggcctgacaaaatccgaagaaaggaccattgccacccaaacaggtcctcatagggcgacatcacagggtacccttacctgggacacatcaatcacaacctcacaggcagggacccactcagctatgactcatggattttcacaattagatttgtccactcttacgagtagagttcctgagtacatatcagggacaagcccaccctctgtggaaaaaaccagctcttcctcttcccttctgtctttaccagcaataacctcaccgtcccctgtacctactacattaccagaaagtaggccgtcttctcctgttcatctgacttcactccccacctctggcctagtgaagaccacagatatgctggcatctgtggccagtttacctccaaacttgggcagcacctcacataagataccgactacttcagaagacattaaagatacagagaaaatgtatccttccacaaacatagcagtaaccaatgtggggaccaccacttctgaaaaggaatcttattcgtctgtcccagcctactcagaaccacccaaagtcacctctccaatggttacctctttcaacataagggacaccattgtttccacatccatgcctggctcctctgagattacaaggattgagatggagtcaacattctccctggctcatgggctgaagggaaccagcacctcccaggaccccatcgtatccacagagaaaagtgctgtccttcacaagttgaccactggtgctactgagacctctaggacagaagttgcctcttctagaagaacatccattccaggccctgatcattccacagagtcaccagacatctccactgaagtgatccccagcctgcctatctcccttggcattacagaatcttcaaatatgaccatcatcactcgaacaggtcctcctcttggctctacatcacagggcacatttaccttggacacaccaactacatcctccagggcaggaacacactcgatggcgactcaggaatttccacactcagaaatgaccactgtcatgaacaaggaccctgagattctatcatggacaatccctccttctatagagaaaaccagcttctcctcttccctgatgccttcaccagccatgacttcacctcctgtttcctcaacattaccaaagaccattcacaccactccttctcctatgacctcactgctcacccctagcctagtgatgaccacagacacattgggcacaagcccagaacctacaaccagttcacctccaaatttgagcagtacctcacatgagatactgacaacagatgaagacaccacagctatagaagccatgcatccttccacaagcacagcagcgactaatgtggaaaccaccagttctggacatgggtcacaatcctctgtcctagctgactcagaaaaaaccaaggccacagctccaatggataccacctccaccatggggcatacaactgtttccacatcaatgtctgtttcctctgagactacaaaaattaagagagagtcaacatattccttgactcctggactgagagagaccagcatttcccaaaatgccagcttttccactgacacaagtattgttctttcagaagtccccactggtactactgctgaggtctccaggacagaagtcacctcctctggtagaacatccatccctggcccttctcagtccacagttttgccagaaatatccacaagaacaatgacaaggctctttgcctcgcccaccatgacagaatcagcagaaatgaccatccccactcaaacaggtccttctgggtctacctcacaggatacccttaccttggacacatccaccacaaagtcccaggcaaagactcattcaactttgactcagagatttccacactcagagatgaccactctcatgagcagaggtcctggagatatgtcatggcaaagctctccctctctggaaaatcccagctctctcccttccctgctgtctttacctgccacaacctcacctcctcccatttcctccacattaccagtgactatctcctcctctcctcttcctgtgacttcacttctcacctctagcccggtaacgaccacagacatgttacacacaagcccagaacttgtaaccagttcacctccaaagctgagccacacttcagatgagagactgaccactggcaaggacaccacaaatacagaagctgtgcatccttccacaaacacagcagcgtccaatgtggagattcccagctctggacatgaatccccttcctctgccttagctgactcagagacatccaaagccacatcaccaatgtttattacctccacccaggaggatacaactgttgccatatcaacccctcacttcttggagactagcagaattcagaaagagtcaatttcctccctgagccctaaattgagggagacaggcagttctgtggagacaagctcagccatagagacaagtgctgtcctttctgaagtgtccattggtgctactactgagatctccaggacagaagtcacctcctctagcagaacatccatctctggttctgctgagtccacaatgttgccagaaatatccaccacaagaaaaatcattaagttccctacttcccccatcctggcagaatcatcagaaatgaccatcaagacccaaacaagtcctcctgggtctacatcagagagtacctttacattagacacatcaaccactccctccttggtaataacccattcgactatgactcagagattgccacactcagagataaccactcttgtgagtagaggtgctggggatgtgccacggcccagctctctccctgtggaagaaacaagccctccatcttcccagctgtctttatctgccatgatctcaccttctcctgtttcttccacattaccagcaagtagccactcctcttctgcttctgtgacttcacttctcacaccaggccaagtgaagactactgaggtgttggacgcaagtgcagaacctgaaaccagttcacctccaagtttgagcagcacctcagttgaaatactggccacctctgaagtcaccacagatacggagaaaattcatcctttctcaaacacggcagtaaccaaagttggaacttccagttctggacatgaatccccttcctctgtcctacctgactcagagacaaccaaagccacatcggcaatgggtaccatctccattatgggggatacaagtgtttctacattaactcctgccttatctaacactaggaaaattcagtcagagccagcttcctcactgaccaccagattgagggagaccagcacctctgaagagaccagcttagccacagaagcaaacactgttctttctaaagtgtccactggtgctactactgaggtctccaggacagaagccatctcctttagcagaacatccatgtcaggccctgagcagtccacaatgtcacaagacatctccataggaaccatccccaggatttctgcctcctctgtcctgacagaatctgcaaaaatgaccatcacaacccaaacaggtccttcggagtctacactagaaagtacccttaatttgaacacagcaaccacaccctcttgggtggaaacccactctatagtaattcagggatttccacacccagagatgaccacttccatgggcagaggtcctggaggtgtgtcatggcctagccctccctttgtgaaagaaaccagccctccatcctccccgctgtctttacctgccgtgacctcacctcatcctgtttccaccacattcctagcacatatccccccctctccccttcctgtgacttcacttctcacctctggcccggcgacaaccacagatatcttgggtacaagcacagaacctggaaccagttcatcttcaagtttgagcaccacctcccatgagagactgaccacttacaaagacactgcacatacagaagccgtgcatccttccacaaacacaggagggaccaatgtggcaaccaccagctctggatataaatcacagtcctctgtcctagctgactcatctccaatgtgtaccacctccaccatgggggatacaagtgttctcacatcaactcctgccttccttgagactaggaggattcagacagagctagcttcctccctgacccctggattgagggagtccagcggctctgaagggaccagctcaggcaccaagatgagcactgtcctctctaaagtgcccactggtgctactactgagatctccaaggaagacgtcacctccatcccaggtcccgctcaatccacaatatcaccagacatctccacaagaaccgtcagctggttctctacatcccctgtcatgacagaatcagcagaaataaccatgaacacccatacaagtcctttaggggccacaacacaaggcaccagtactttggacacgtcaagcacaacctctttgacaatgacacactcaactatatctcaaggattttcacactcacagatgagcactcttatgaggaggggtcctgaggatgtatcatggatgagccctccccttctggaaaaaactagaccttccttttctctgatgtcttcaccagccacaacttcaccttctcctgtttcctccacattaccagagagcatctcttcctctcctcttcctgtgacttcactcctcacgtctggcttggcaaaaactacagatatgttgcacaaaagctcagaacctgtaaccaactcacctgcaaatttgagcagcacctcagttgaaatactggccacctctgaagtcaccacagatacagagaaaactcatccttcttcaaacagaacagtgaccgatgtggggacctccagttctggacatgaatccacttcctttgtcctagctgactcacagacatccaaagtcacatctccaatggttattacctccaccatggaggatacgagtgtctccacatcaactcctggcttttttgagactagcagaattcagacagaaccaacatcctccctgacccttggactgagaaagaccagcagctctgaggggaccagcttagccacagagatgagcactgtcctttctggagtgcccactggtgccactgctgaagtctccaggacagaagtcacctcctctagcagaacatccatctcaggctttgctcagctcacagtgtcaccagagacttccacagaaaccatcaccagactccctacctccagcataatgacagaatcagcagaaatgatgatcaagacacaaacagatcctcctgggtctacaccagagagtactcatactgtggacatatcaacaacacccaactgggtagaaacccactcgactgtgactcagagattttcacactcagagatgaccactcttgtgagcagaagccctggtgatatgttatggcctagtcaatcctctgtggaagaaaccagctctgcctcttccctgctgtctctgcctgccacgacctcaccttctcctgtttcctctacattagtagaggatttcccttccgcttctcttcctgtgacttctcttctcaaccctggcctggtgataaccacagacaggatgggcataagcagagaacctggaaccagttccacttcaaatttgagcagcacctcccatgagagactgaccactttggaagacactgtagatacagaagacatgcagccttccacacacacagcagtgaccaacgtgaggacctccatttctggacatgaatcacaatcttctgtcctatctgactcagagacacccaaagccacatctccaatgggtaccacctacaccatgggggaaacgagtgtttccatatccacttctgacttctttgagaccagcagaattcagatagaaccaacatcctccctgacttctggattgagggagaccagcagctctgagaggatcagctcagccacagagggaagcactgtcctttctgaagtgcccagtggtgctaccactgaggtctccaggacagaagtgatatcctctaggggaacatccatgtcagggcctgatcagttcaccatatcaccagacatctctactgaagcgatcaccaggctttctacttcccccattatgacagaatcagcagaaagtgccatcactattgagacaggttctcctggggctacatcagagggtaccctcaccttggacacctcaacaacaaccttttggtcagggacccactcaactgcatctccaggattttcacactcagagatgaccactcttatgagtagaactcctggagatgtgccatggccgagccttccctctgtggaagaagccagctctgtctcttcctcactgtcttcacctgccatgacctcaacttcttttttctccacattaccagagagcatctcctcctctcctcatcctgtgactgcacttctcacccttggcccagtgaagaccacagacatgttgcgcacaagctcagaacctgaaaccagttcacctccaaatttgagcagcacctcagctgaaatattagccacgtctgaagtcaccaaagatagagagaaaattcatccctcctcaaacacacctgtagtcaatgtagggactgtgatttataaacatctatccccttcctctgttttggctgacttagtgacaacaaaacccacatctccaatggctaccacctccactctggggaatacaagtgtttccacatcaactcctgccttcccagaaactatgatgacacagccaacttcctccctgacttctggattaagggagatcagtacctctcaagagaccagctcagcaacagagagaagtgcttctctttctggaatgcccactggtgctactactaaggtctccagaacagaagccctctccttaggcagaacatccaccccaggtcctgctcaatccacaatatcaccagaaatctccacggaaaccatcactagaatttctactcccctcaccacgacaggatcagcagaaatgaccatcacccccaaaacaggtcattctggggcatcctcacaaggtacctttaccttggacacatcaagcagagcctcctggccaggaactcactcagctgcaactcacagatctccacactcagggatgaccactcctatgagcagaggtcctgaggatgtgtcatggccaagccgcccatcagtggaaaaaactagccctccatcttccctggtgtctttatctgcagtaacctcaccttcgccactttattccacaccatctgagagtagccactcatctcctctccgggtgacttctcttttcacccctgtcatgatgaagaccacagacatgttggacacaagcttggaacctgtgaccacttcacctcccagtatgaatatcacctcagatgagagtctggccacttctaaagccaccatggagacagaggcaattcagctttcagaaaacacagctgtgactcagatgggcaccatcagcgctagacaagaattctattcctcttatccaggcctcccagagccatccaaagtgacatctccagtggtcacctcttccaccataaaagacattgtttctacaaccatacctgcttcctctgagataacaagaattgagatggagtcaacatccaccctgacccccacaccaagggagaccagcacctcccaggagatccactcagccacaaagccaagcactgttccttacaaggcactcactagtgccacgattgaggactccatgacacaagtcatgtcctctagcagaggacctagccctgatcagtccacaatgtcacaagacatatccactgaagtgatcaccaggctctctacctcccccatcaagacagaatctacagaaatgaccattaccacccaaacaggttctcctggggctacatcaaggggtacccttaccttggacacttcaacaacttttatgtcagggacccactcaactgcatctcaaggattttcacactcacagatgaccgctcttatgagtagaactcctggagatgtgccatggctaagccatccctctgtggaagaagccagctctgcctctttctcactgtcttcacctgtcatgacctcatcttctcccgtttcttccacattaccagacagcatccactcttcttcgcttcctgtgacatcacttctcacctcagggctggtgaagaccacagagctgttgggcacaagctcagaacctgaaaccagttcacccccaaatttgagcagcacctcagctgaaatactggccatcactgaagtcactacagatacagagaaactggagatgaccaatgtggtaacctcaggttatacacatgaatctccttcctctgtcctagctgactcagtgacaacaaaggccacatcttcaatgggtatcacctaccccacaggagatacaaatgttctcacatcaacccctgccttctctgacaccagtaggattcaaacaaagtcaaagctctcactgactcctgggttgatggagaccagcatctctgaagagaccagctctgccacagaaaaaagcactgtcctttctagtgtgcccactggtgctactactgaggtctccaggacagaagccatctcttctagcagaacatccatcccaggccctgctcaatccacaatgtcatcagacacctccatggaaaccatcactagaatttctacccccctcacaaggaaagaatcaacagacatggccatcacccccaaaacaggtccttctggggctacctcgcagggtacctttaccttggactcatcaagcacagcctcctggccaggaactcactcagctacaactcagagatttccacagtcagtggtgacaactcctatgagcagaggtcctgaggatgtgtcatggccaagcccgctgtctgtggaaaaaaacagccctccatcttccctggtatcttcatcttcagtaacctcaccttcgccactttattccacaccatctgggagtagccactcctctcctgtccctgtcacttctcttttcacctctatcatgatgaaggccacagacatgttggatgcaagtttggaacctgagaccacttcagctcccaatatgaatatcacctcagatgagagtctggccgcttctaaagccaccacggagacagaggcaattcacgtttttgaaaatacagcagcgtcccatgtggaaaccaccagtgctacagaggaactctattcctcttccccaggcttctcagagccaacaaaagtgatatctccagtggtcacctcttcctctataagagacaacatggtttccacaacaatgcctggctcctctggcattacaaggattgagatagagtcaatgtcatctctgacccctggactgagggagaccagaacctcccaggacatcacctcatccacagagacaagcactgtcctttacaagatgccctctggtgccactcctgaggtctccaggacagaagttatgccctctagcagaacatccattcctggccctgctcagtccacaatgtcactagacatctccgatgaagttgtcaccaggctgtctacctctcccatcatgacagaatctgcagaaataaccatcaccacccaaacaggttattctctggctacatcccaggttacccttcccttgggcacctcaatgacctttttgtcagggacccactcaactatgtctcaaggactttcacactcagagatgaccaatcttatgagcaggggtcctgaaagtctgtcatggacgagccctcgctttgtggaaacaactagatcttcctcttctctgacatcattacctctcacgacctcactttctcctgtgtcctccacattactagacagtagcccctcctctcctcttcctgtgacttcacttatcctcccaggcctggtgaagactacagaagtgttggatacaagctcagagcctaaaaccagttcatctccaaatttgagcagcacctcagttgaaataccggccacctctgaaatcatgacagatacagagaaaattcatccttcctcaaacacagcggtggccaaagtgaggacctccagttctgttcatgaatctcattcctctgtcctagctgactcagaaacaaccataaccataccttcaatgggtatcacctccgctgtggacgataccactgttttcacatcaaatcctgccttctctgagactaggaggattccgacagagccaacattctcattgactcctggattcagggagactagcacctctgaagagaccacctcaatcacagaaacaagtgcagtcctttatggagtgcccactagtgctactactgaagtctccatgacagaaatcatgtcctctaatagaatacacatccctgactctgatcagtccacgatgtctccagacatcatcactgaagtgatcaccaggctctcttcctcatccatgatgtcagaatcaacacaaatgaccatcaccacccaaaaaagttctcctggggctacagcacagagtactcttaccttggccacaacaacagcccccttggcaaggacccactcaactgttcctcctagatttttacactcagagatgacaactcttatgagtaggagtcctgaaaatccatcatggaagagctctctctttgtggaaaaaactagctcttcatcttctctgttgtccttacctgtcacgacctcaccttctgtttcttccacattaccgcagagtatcccttcctcctctttttctgtgacttcactcctcaccccaggcatggtgaagactacagacacaagcacagaacctggaaccagtttatctccaaatctgagtggcacctcagttgaaatactggctgcctctgaagtcaccacagatacagagaaaattcatccttcttcaagcatggcagtgaccaatgtgggaaccaccagttctggacatgaactatattcctctgtttcaatccactcggagccatccaaggctacatacccagtgggtactccctcttccatggctgaaacctctatttccacatcaatgcctgctaattttgagaccacaggatttgaggctgagccattttctcatttgacttctggatttaggaagacaaacatgtccctggacaccagctcagtcacaccaacaaatacaccttcttctcctgggtccactcaccttttacagagttccaagactgatttcacctcttctgcaaaaacatcatccccagactggcctccagcctcacagtatactgaaattccagtggacataatcaccccctttaatgcttctccatctattacggagtccactgggataacctccttcccagaatccaggtttactatgtctgtaacagaaagtactcatcatctgagtacagatttgctgccttcagctgagactatttccactggcacagtgatgccttctctatcagaggccatgacttcatttgccaccactggagttccacgagccatctcaggttcaggtagtccattctctaggacagagtcaggccctggggatgctactctgtccaccattgcagagagcctgccttcatccactcctgtgccattctcctcttcaaccttcactaccactgattcttcaaccatcccagccctccatgagataacttcctcttcagctaccccatatagagtggacaccagtcttgggacagagagcagcactactgaaggacgcttggttatggtcagtactttggacacttcaagccaaccaggcaggacatcttcatcacccattttggataccagaatgacagagagcgttgagctgggaacagtgacaagtgcttatcaagttccttcactctcaacacggttgacaagaactgatggcattatggaacacatcacaaaaatacccaatgaagcagcacacagaggtaccataagaccagtcaaaggccctcagacatccacttcgcctgccagtcctaaaggactacacacaggagggacaaaaagaatggagaccaccaccacagctctgaagaccaccaccacagctctgaagaccacttccagagccaccttgaccaccagtgtctatactcccactttgggaacactgactcccctcaatgcatcaatgcaaatggccagcacaatccccacagaaatgatgatcacaaccccatatgttttccctgatgttccagaaacgacatcctcattggctaccagcctgggagcagaaaccagcacagctcttcccaggacaaccccatctgttttcaatagagaatcagagaccacagcctcactggtctctcgttctggggcagagagaagtccggttattcaaactctagatgtttcttctagtgagccagatacaacagcttcatgggttatccatcctgcagagaccatcccaactgtttccaagacaacccccaattttttccacagtgaattagacactgtatcttccacagccaccagtcatggggcagacgtcagctcagccattccaacaaatatctcacctagtgaactagatgcactgaccccactggtcactatttcggggacagatactagtacaacattcccaacactgactaagtccccacatgaaacagagacaagaaccacatggctcactcatcctgcagagaccagctcaactattcccagaacaatccccaatttttctcatcatgaatcagatgccacaccttcaatagccaccagtcctggggcagaaaccagttcagctattccaattatgactgtctcacctggtgcagaagatctggtgacctcacaggtcactagttctgggacagacagaaatatgactattccaactttgactctttctcctggtgaaccaaagacgatagcctcattagtcacccatcctgaagcacagacaagttcggccattccaacttcaactatctcgcctgctgtatcacggttggtgacctcaatggtcaccagtttggcggcaaagacaagtacaactaatcgagctctgacaaactcccctggtgaaccagctacaacagtttcattggtcacgcatcctgcacagaccagcccaacagttccctggacaacttccatttttttccatagtaaatcagacaccacaccttcaatgaccaccagtcatggggcagaatccagttcagctgttccaactccaactgtttcaactgaggtaccaggagtagtgacccctttggtcaccagttctagggcagtgatcagtacaactattccaattctgactctttctcctggtgaaccagagaccacaccttcaatggccaccagtcatggggaagaagccagttctgctattccaactccaactgtttcacctggggtaccaggagtggtgacctctctggtcactagttctagggcagtgactagtacaactattccaattctgactttttctcttggtgaaccagagaccacaccttcaatggccaccagtcatgggacagaagctggctcagctgttccaactgttttacctgaggtaccaggaatggtgacctctctggttgctagttctagggcagtaaccagtacaactcttccaactctgactctttctcctggtgaaccagagaccacaccttcaatggccaccagtcatggggcagaagccagctcaactgttccaactgtttcacctgaggtaccaggagtggtgacctctctggtcactagttctagtggagtaaacagtacaagtattccaactctgattctttctcctggtgaactagaaaccacaccttcaatggccaccagtcatggggcagaagccagctcagctgttccaactccaactgtttcacctggggtatcaggagtggtgacccctctggtcactagttccagggcagtgaccagtacaactattccaattctaactctttcttctagtgagccagagaccacaccttcaatggccaccagtcatggggtagaagccagctcagctgttctaactgtttcacctgaggtaccaggaatggtgacctctctggtcactagttctagagcagtaaccagtacaactattccaactctgactatttcttctgatgaaccagagaccacaacttcattggtcacccattctgaggcaaagatgatttcagccattccaactttagctgtctcccctactgtacaagggctggtgacttcactggtcactagttctgggtcagagaccagtgcgttttcaaatctaactgttgcctcaagtcaaccagagaccatagactcatgggtcgctcatcctgggacagaagcaagttctgttgttccaactttgactgtctccactggtgagccgtttacaaatatctcattggtcacccatcctgcagagagtagctcaactcttcccaggacaacctcaaggttttcccacagtgaattagacactatgccttctacagtcaccagtcctgaggcagaatccagctcagccatttcaacaactatttcacctggtataccaggtgtgctgacatcactggtcactagctctgggagagacatcagtgcaacttttccaacagtgcctgagtccccacatgaatcagaggcaacagcctcatgggttactcatcctgcagtcaccagcacaacagttcccaggacaacccctaattattctcatagtgaaccagacaccacaccatcaatagccaccagtcctggggcagaagccacttcagattttccaacaataactgtctcacctgatgtaccagatatggtaacctcacaggtcactagttctgggacagacaccagtataactattccaactctgactctttcttctggtgagccagagaccacaacctcatttatcacctattctgagacacacacaagttcagccattccaactctccctgtctcccctggtgcatcaaagatgctgacctcactggtcatcagttctgggacagacagcactacaactttcccaacactgacggagaccccatatgaaccagagacaacagccatacagctcattcatcctgcagagaccaacacaatggttcccaggacaactcccaagttttcccatagtaagtcagacaccacactcccagtagccatcaccagtcctgggccagaagccagttcagctgtttcaacgacaactatctcacctgatatgtcagatctggtgacctcactggtccctagttctgggacagacaccagtacaaccttcccaacattgagtgagaccccatatgaaccagagactacagccacgtggctcactcatcctgcagaaaccagcacaacggtttctgggacaattcccaacttttcccataggggatcagacactgcaccctcaatggtcaccagtcctggagtagacacgaggtcaggtgttccaactacaaccatcccacccagtataccaggggtagtgacctcacaggtcactagttctgcaacagacactagtacagctattccaactttgactccttctcctggtgaaccagagaccacagcctcatcagctacccatcctgggacacagactggcttcactgttccaattcggactgttccctctagtgagccagatacaatggcttcctgggtcactcatcctccacagaccagcacacctgtttccagaacaacctccagtttttcccatagtagtccagatgccacacctgtaatggccaccagtcctaggacagaagccagttcagctgtactgacaacaatctcacctggtgcaccagagatggtgacttcacagatcactagttctggggcagcaaccagtacaactgttccaactttgactcattctcctggtatgccagagaccacagccttattgagcacccatcccagaacagagacaagtaaaacatttcctgcttcaactgtgtttcctcaagtatcagagaccacagcctcactcaccattagacctggtgcagagactagcacagctctcccaactcagacaacatcctctctcttcaccctacttgtaactggaaccagcagagttgatctaagtccaactgcttcacctggtgtttctgcaaaaacagccccactttccacccatccagggacagaaaccagcacaatgattccaacttcaactctttcccttggtttactagagactacaggcttactggccaccagctcttcagcagagaccagcacgagtactctaactctgactgtttcccctgctgtctctgggctttccagtgcctctataacaactgataagccccaaactgtgacctcctggaacacagaaacctcaccatctgtaacttcagttggacccccagaattttccaggactgtcacaggcaccactatgaccttgataccatcagagatgccaacaccacctaaaaccagtcatggagaaggagtgagtccaaccactatcttgagaactacaatggttgaagccactaatttagctaccacaggttccagtcccactgtggccaagacaacaaccaccttcaatacactggctggaagcctctttactcctctgaccacacctgggatgtccaccttggcctctgagagtgtgacctcaagaacaagttataaccatcggtcctggatctccaccaccagcagttataaccgtcggtactggacccctgccaccagcactccagtgacttctacattctccccagggatttccacatcctccatccccagctccacagcagccacagtcccattcatggtgccattcaccctcaacttcaccatcaccaacctgcagtacgaggaggacatgcggcaccctggttccaggaagttcaacgccacagagagagaactgcagggtctgctcaaacccttgttcaggaatagcagtctggaatacctctattcaggctgcagactagcctcactcaggccagagaaggatagctcagccacggcagtggatgccatctgcacacatcgccctgaccctgaagacctcggactggacagagagcgactgtactgggagctgagcaatctgacaaatggcatccaggagctgggcccctacaccctggaccggaacagtctctatgtcaatggtttcacccatcgaagctctatgcccaccaccagcactcctgggacctccacagtggatgtgggaacctcagggactccatcctccagccccagccccacgactgctggccctctcctgatgccgttcaccctcaacttcaccatcaccaacctgcagtacgaggaggacatgcgtcgcactggctccaggaagttcaacaccatggagagtgtcctgcagggtctgctcaagcccttgttcaagaacaccagtgttggccctctgtactctggctgcagattgaccttgctcaggcccgagaaagatggggcagccactggagtggatgccatctgcacccaccgccttgaccccaaaagccctggactcaacagggagcagctgtactgggagctaagcaaactgaccaatgacattgaagagctgggcccctacaccctggacaggaacagtctctatgtcaatggtttcacccatcagagctctgtgtccaccaccagcactcctgggacctccacagtggatctcagaacctcagggactccatcctccctctccagccccacaattatggctgctggccctctcctggtaccattcaccctcaacttcaccatcaccaacctgcagtatggggaggacatgggtcaccctggctccaggaagttcaacaccacagagagggtcctgcagggtctgcttggtcccatattcaagaacaccagtgttggccctctgtactctggctgcagactgacctctctcaggtctgagaaggatggagcagccactggagtggatgccatctgcatccatcatcttgaccccaaaagccctggactcaacagagagcggctgtactgggagctgagccaactgaccaatggcatcaaagagctgggcccctacaccctggacaggaacagtctctatgtcaatggtttcacccatcggacctctgtgcccaccagcagcactcctgggacctccacagtggaccttggaacctcagggactccattctccctcccaagccccgcaactgctggccctctcctggtgctgttcaccctcaacttcaccatcaccaacctgaagtatgaggaggacatgcatcgccctggctccaggaagttcaacaccactgagagggtcctgcagactctgcttggtcctatgttcaagaacaccagtgttggccttctgtactctggctgcagactgaccttgctcaggtccgagaaggatggagcagccactggagtggatgccatctgcacccaccgtcttgaccccaaaagccctggagtggacagggagcagctatactgggagctgagccagctgaccaatggcatcaaagagctgggcccctacaccctggacaggaacagtctctatgtcaatggtttcacccattggatccctgtgcccaccagcagcactcctgggacctccacagtggaccttgggtcagggactccatcctccctccccagccccacaactgctggccctctcctggtgccgttcaccctcaacttcaccatcaccaacctgaagtacgaggaggacatgcattgccctggctccaggaagttcaacaccacagagagagtcctgcagagtctgcttggtcccatgttcaagaacaccagtgttggccctctgtactctggctgcagactgaccttgctcaggtccgagaaggatggagcagccactggagtggatgccatctgcacccaccgtcttgaccccaaaagccctggagtggacagggagcagctatactgggagctgagccagctgaccaatggcatcaaagagctgggtccctacaccctggacagaaacagtctctatgtcaatggtttcacccatcagacctctgcgcccaacaccagcactcctgggacctccacagtggaccttgggacctcagggactccatcctccctccccagccctacatctgctggccctctcctggtgccattcaccctcaacttcaccatcaccaacctgcagtacgaggaggacatgcatcacccaggctccaggaagttcaacaccacggagcgggtcctgcagggtctgcttggtcccatgttcaagaacaccagtgtcggccttctgtactctggctgcagactgaccttgctcaggcctgagaagaatggggcagccactggaatggatgccatctgcagccaccgtcttgaccccaaaagccctggactcaacagagagcagctgtactgggagctgagccagctgacccatggcatcaaagagctgggcccctacaccctggacaggaacagtctctatgtcaatggtttcacccatcggagctctgtggcccccaccagcactcctgggacctccacagtggaccttgggacctcagggactccatcctccctccccagccccacaacagctgttcctctcctggtgccgttcaccctcaactttaccatcaccaatctgcagtatggggaggacatgcgtcaccctggctccaggaagttcaacaccacagagagggtcctgcagggtctgcttggtcccttgttcaagaactccagtgtcggccctctgtactctggctgcagactgatctctctcaggtctgagaaggatggggcagccactggagtggatgccatctgcacccaccaccttaaccctcaaagccctggactggacagggagcagctgtactggcagctgagccagatgaccaatggcatcaaagagctgggcccctacaccctggaccggaacagtctctacgtcaatggtttcacccatcggagctctgggctcaccaccagcactccttggacttccacagttgaccttggaacctcagggactccatcccccgtccccagccccacaaccaccggccctctcctggtgccattcacactcaacttcaccatcactaacctacagtatgaggagaacatgggtcaccctggctccaggaagttcaacatcacggagagtgttctgcagggtctgctcaagcccttgttcaagagcaccagtgttggccctctgtattctggctgcagactgaccttgctcaggcctgagaaggatggagtagccaccagagtggacgccatctgcacccaccgccctgaccccaaaatccctgggctagacagacagcagctatactgggagctgagccagctgacccacagcatcactgagctgggaccctacaccctggatagggacagtctctatgtcaatggtttcacccagcggagctctgtgcccaccaccagcactcctgggactttcacagtacagccggaaacctctgagactccatcatccctccctggccccacagccactggccctgtcctgctgccattcaccctcaattttaccatcactaacctgcagtatgaggaggacatgcgtcgccctggctccaggaagttcaacaccacggagagggtccttcagggtctgcttatgcccttgttcaagaacaccagtgtcagctctctgtactctggttgcagactgaccttgctcaggcctgagaaggatggggcagccaccagagtggatgctgtctgcacccatcgtcctgaccccaaaagccctggactggacagagagcggctgtactggaagctgagccagctgacccacggcatcactgagctgggcccctacaccctggacaggcacagtctctatgtcaatggtttcacccatcagagctctatgacgaccaccagaactcctgatacctccacaatgcacctggcaacctcgagaactccagcctccctgtctggacccatgaccgccagccctctcctggtgctattcacaattaacttcaccatcactaacctgcggtatgaggagaacatgcatcaccctggctctagaaagtttaacaccacggagagagtccttcagggtctgctcaggcctgtgttcaagaacaccagtgttggccctctgtactctggctgcagactgaccttgctcaggcccaagaaggatggggcagccaccaaagtggatgccatctgcacctaccgccctgatcccaaaagccctggactggacagagagcagctatactgggagctgagccagctgacccacagcatcactgagctgggcccctacaccctggacagggacagtctctatgtcaatggtttcacacagcggagctctgtgcccaccactagcattcctgggacccccacagtggacctgggaacatctgggactccagtttctaaacctggtccctcggctgccagccctctcctggtgctattcactctcaacttcaccatcaccaacctgcggtatgaggagaacatgcagcaccctggctccaggaagttcaacaccacggagagggtccttcagggcctgctcaggtccctgttcaagagcaccagtgttggccctctgtactctggctgcagactgactttgctcaggcctgaaaaggatgggacagccactggagtggatgccatctgcacccaccaccctgaccccaaaagccctaggctggacagagagcagctgtattgggagctgagccagctgacccacaatatcactgagctgggcccctatgccctggacaacgacagcctctttgtcaatggtttcactcatcggagctctgtgtccaccaccagcactcctgggacccccacagtgtatctgggagcatctaagactccagcctcgatatttggcccttcagctgccagccatctcctgatactattcaccctcaacttcaccatcactaacctgcggtatgaggagaacatgtggcctggctccaggaagttcaacactacagagagggtccttcagggcctgctaaggcccttgttcaagaacaccagtgttggccctctgtactctggctgcaggctgaccttgctcaggccagagaaagatggggaagccaccggagtggatgccatctgcacccaccgccctgaccccacaggccctgggctggacagagagcagctgtatttggagctgagccagctgacccacagcatcactgagctgggcccctacacactggacagggacagtctctatgtcaatggtttcacccatcggagctctgtacccaccaccagcaccggggtggtcagcgaggagccattcacactgaacttcaccatcaacaacctgcgctacatggcggacatgggccaacccggctccctcaagttcaacatcacagacaacgtcatgcagcacctgctcagtcctttgttccagaggagcagcctgggtgcacggtacacaggctgcagggtcatcgcactaaggtctgtgaagaacggtgctgagacacgggtggacctcctctgcacctacctgcagcccctcagcggcccaggtctgcctatcaagcaggtgttccatgagctgagccagcagacccatggcatcacccggctgggcccctactctctggacaaagacagcctctaccttaacggttacaatgaacctggtccagatgagcctcctacaactcccaagccagccaccacattcctgcctcctctgtcagaagccacaacagccatggggtaccacctgaagaccctcacactcaacttcaccatctccaatctccagtattcaccagatatgggcaagggctcagctacattcaactccaccgagggggtccttcagcacctgctcagacccttgttccagaagagcagcatgggccccttctacttgggttgccaactgatctccctcaggcctgagaaggatggggcagccactggtgtggacaccacctgcacctaccaccctgaccctgtgggccccgggctggacatacagcagctttactgggagctgagtcagctgacccatggtgtcacccaactgggcttctatgtcctggacagggatagcctcttcatcaatggctatgcaccccagaatttatcaatccggggcgagtaccagataaatttccacattgtcaactggaacctcagtaatccagaccccacatcctcagagtacatcaccctgctgagggacatccaggacaaggtcaccacactctacaaaggcagtcaactacatgacacattccgcttctgcctggtcaccaacttgacgatggactccgtgttggtcactgtcaaggcattgttctcctccaatttggaccccagcctggtggagcaagtctttctagataagaccctgaatgcctcattccattggctgggctccacctaccagttggtggacatccatgtgacagaaatggagtcatcagtttatcaaccaacaagcagctccagcacccagcacttctacctgaatttcaccatcaccaacctaccatattcccaggacaaagcccagccaggcaccaccaattaccagaggaacaaaaggaatattgaggatgcgctcaaccaactcttccgaaacagcagcatcaagagttatttttctgactgtcaagtttcaacattcaggtctgtccccaacaggcaccacaccggggtggactccctgtgtaacttctcgccactggctcggagagtagacagagttgccatctatgaggaatttctgcggatgacccggaatggtacccagctgcagaacttcaccctggacaggagcagtgtccttgtggatgggtattctcccaacagaaatgagcccttaactgggaattctgaccttcccttctgggctgtcatcctcatcggcttggcaggactcctgggagtcatcacatgcctgatctgcggtgtcctggtgaccacccgccggcggaagaaggaaggagaatacaacgtccagcaacagtgcccaggctactaccagtcacacctagacctggaggatctgcaatgactggaacttgccggtgcctggggtgcctttcccccagccagggtccaaagaagcttggctggggcagaaataaaccatattggtcgga

SEQ ID NO: 1150 - protein, 14507 aa, Homo sapiens
MLKPSGLPGSSSPTRSLMTGSRSTKATPEMDSGLTGATLSPKTSTGAIVVTEHTLPFTSPDKTLASPTSSVVGRTTQSLGVMSSALPESTSRGMTHSEQRTSPSLSPQVNGTPSRNYPATSMVSGLSSPRTRTSSTEGNFTKEASTYTLTVETTSGPVTEKYTVPTETSTTEGDSTETPWDTRYIPVKITSPMKTFADSTASKENAPVSMTPAETTVTDSHTPGRTNPSFGTLYSSFLDLSPKGTPNSRGETSLELILSTTGYPFSSPEPGSAGHSRISTSAPLSSSASVLDNKISETSIFSGQSLTSPLSPGVPEARASTMPNSAIPFSMTLSNAETSAERVRSTISSLGTPSISTKQTAETILTFHAFAETMDIPSTHIAKTLASEWLGSPGTLGGTSTSALTTTSPSTTLVSEETNTHHSTSGKETEGTLNTSMTPLETSAPGEESEMTATLVPTLGFTTLDSKIRSPSQVSSSHPTRELRTTGSTSGRQSSSTAAHGSSDILRATTSSTSKASSWTSESTAQQFSEPQHTQWVETSPSMKTERPPASTSVAAPITTSVPSVVSGFTTLKTSSTKGIWLEETSADTLIGESTAGPTTHQFAVPTGISMTGGSSTRGSQGTTHLLTRATASSETSADLTLATNGVPVSVSPAVSKTAAGSSPPGGTKPSYTMVSSVIPETSSLQSSAFREGTSLGLTPLNTRHPFSSPEPDSAGHTKISTSIPLLSSASVLEDKVSATSTFSHHKATSSITTGTPEISTKTKPSSAVLSSMTLSNAATSPERVRNATSPLTHPSPSGEETAGSVLTLSTSAETTDSPNIHPTGTLTSESSESPSTLSLPSVSGVKTTFSSSTPSTHLFTSGEETEETSNPSVSQPETSVSRVRTTLASTSVPTPVFPTMDTWPTRSAQFSSSHLVSELRATSSTSVTNSTGSALPKISHLTGTATMSQTNRDTFNDSAAPQSTTWPETSPRFKTGLPSATTTVSTSATSLSATVMVSKFTSPATSSMEATSIREPSTTILTTETTNGPGSMAVASTNIPIGKGYITEGRLDTSHLPIGTTASSETSMDFTMAKESVSMSVSPSQSMDAAGSSTPGRTSQFVDTFSDDVYHLTSREITIPRDGTSSALTPQMTATHPPSPDPGSARSTWLGILSSSPSSPTPKVTMSSTFSTQRVTTSMIMDTVETSRWNMPNLPSTTSLTPSNIPTSGAIGKSTLVPLDTPSPATSLEASEGGLPTLSTYPESTNTPSIHLGAHASSESPSTIKLTMASVVKPGSYTPLTFPSIETHIHVSTARMAYSSGSSPEMTAPGETNTGSTWDPTTYITTTDPKDTSSAQVSTPHSVRTLRTTENHPKTESATPAAYSGSPKISSSPNLTSPATKAWTITDTTEHSTQLHYTKLAEKSSGFETQSAPGPVSVVIPTSPTIGSSTLELTSDVPGEPLVLAPSEQTTITLPMATWLSTSLTEEMASTDLDISSPSSPMSTFAIFPPMSTPSHELSKSEADTSAIRNTDSTTLDQHLGIRSLGRTGDLTTVPITPLTTTWTSVIEHSTQAQDTLSATMSPTHVTQSLKDQTSIPASASPSHLTEVYPELGTQGRSSSEATTFWKPSTDTLSREIETGPTNIQSTPPMDNTTTGSSSSGVTLGIAHLPIGTSSPAETSTNMALERRSSTATVSMAGTMGLLVTSAPGRSISQSLGRVSSVLSESTTEGVTDSSKGSSPRLNTQGNTALSSSLEPSYAEGSQMSTSIPLTSSPTTPDVEFIGGSTFWTKEVTTVMTSDISKSSARTESSSATLMSTALGSTENTGKEKLRTASMDLPSPTPSMEVTPWISLTLSNAPNTTDSLDLSHGVHTSSAGTLATDRSLNTGVTRASRLENGSDTSSKSLSMGNSTHTSMTYTEKSEVSSSIHPRPETSAPGAETTLTSTPGNRAISLTLPFSSIPVEEVISTGITSGPDINSAPMTHSPITPPTIVWTSTGTIEQSTQPLHAVSSEKVSVQTQSTPYVNSVAVSASPTHENSVSSGSSTSSPYSSASLESLDSTISRRNAITSWLWDLTTSLPTTTWPSTSLSEALSSGHSGVSNPSSTTTEFPLFSAASTSAAKQRNPETETHGPQNTAASTLNTDASSVTGLSETPVGASISSEVPLPMAITSRSDVSGLTSESTANPSLGTASSAGTKLTRTISLPTSESLVSFRMNKDPWTVSIPLGSHPTTNTETSIPVNSAGPPGLSTVASDVIDTPSDGAESIPTVSFSPSPDTEVTTISHFPEKTTHSFRTISSLTHELTSRVTPIPGDWMSSAMSTKPTGASPSITLGERRTITSAAPTTSPIVLTASFTETSTVSLDNETTVKTSDILDARKTNELPSDSSSSSDLINTSIASSTMDVTKTASISPTSISGMTASSSPSLFSSDRPQVPTSTTETNTATSPSVSSNTYSLDGGSNVGGTPSTLPPFTITHPVETSSALLAWSRPVRTFSTMVSTDTASGENPTSSNSVVTSVPAPGTWTSVGSTTDLPAMGFLKTSPAGEAHSLLASTIEPATAFTPHLSAAVVTGSSATSEASLLTTSESKAIHSSPQTPTTPTSGANWETSATPESLLVVTETSDTTLTSKILVTDTILFSTVSTPPSKFPSTGTLSGASFPTLLPDTPAIPLTATEPTSSLATSFDSTPLVTIASDSLGTVPETTLTMSETSNGDALVLKTVSNPDRSIPGITIQGVTESPLHPSSTSPSKIVAPRNTTYEGSITVALSTLPAGTTGSLVFSQSSENSETTALVDSSAGLERASVMPLTTGSQGMASSGGIRSGSTHSTGTKTFSSLPLTMNPGEVTAMSEITTNRLTATQSTAPKGIPVKPTSAESGLLTPVSASSSPSKAFASLTTAPPTWGIPQSTLTFEFSEVPSLDTKSASLPTPGQSLNTIPDSDASTASSSLSKSPEKNPRARMMTSTKAISASSFQSTGFTETPEGSASPSMAGHEPRVPTSGTGDPRYASESMSYPDPSKASSAMTSTSLASKLTTLFSTGQAARSGSSSSPISLSTEKETSFLSPTASTSRKTSLFLGPSMARQPNILVHLQTSALTLSPTSTLNMSQEEPPELTSSQTIAEEEGTTAETQTLTFTPSETPTSLLPVSSPTEPTARRKSSPETWASSISVPAKTSLVETTDGTLVTTIKMSSQAAQGNSTWPAPAEETGSSPAGTSPGSPEMSTTLKIMSSKEPSISPEIRSTVRNSPWKTPETTVPMETTVEPVTLQSTALGSGSTSISHLPTGTTSPTKSPTENMLATERVSLSPSPPEAWTNLYSGTPGGTRQSLATMSSVSLESPTARSITGTGQQSSPELVSKTTGMEFSMWHGSTGGTTGDTHVSLSTSSNILEDPVTSPNSVSSLTDKSKHKTETWVSTTAIPSTVLNNKIMAAEQQTSRSVDEAYSSTSSWSDQTSGSDITLGASPDVTNTLYITSTAQTTSLVSLPSGDQGITSLTNPSGGKTSSASSVTSPSIGLETLRANVSAVKSDIAPTAGHLSQTSSPAEVSILDVTTAPTPGISTTITTMGTNSISTTTPNPEVGMSTMDSTPATERRTTSTEHPSTWSSTAASDSWTVTDMTSNLKVARSPGTISTMHTTSFLASSTELDSMSTPHGRITVIGTSLVTPSSDASAVKTETSTSERTLSPSDTTASTPISTFSRVQRMSISVPDILSTSWTPSSTEAEDVPVSMVSTDHASTKTDPNTPLSTFLFDSLSTLDWDTGRSLSSATATTSAPQGATTPQELTLETMISPATSQLPFSIGHITSAVTPAAMARSSGVTFSRPDPTSKKAEQTSTQLPTTTSAHPGQVPRSAATTLDVIPHTAKTPDATFQRQGQTALTTEARATSDSWNEKEKSTPSAPWITEMMNSVSEDTIKEVTSSSSVLRTLNTLDINLESGTTSSPSWKSSPYERIAPSESTTDKEAIHPSTNTVETTGWVTSSEHASHSTIPAHSASSKLTSPVVTTSTREQAIVSMSTTTWPESTRARTEPNSFLTIELRDVSPYMDTSSTTQTSIISSPGSTAITKGPRTEITSSKRISSSFLAQSMRSSDSPSEAITRLSNFPAMTESGGMILAMQTSPPGATSLSAPTLDTSATASWTGTPLATTQRFTYSEKTTLFSKGPEDTSQPSPPSVEETSSSSSLVPIHATTSPSNILLTSQGHSPSSTPPVTSVFLSETSGLGKTTDMSRISLEPGTSLPPNLSSTAGEALSTYEASRDTKAIHHSADTAVTNMEATSSEYSPIPGHTKPSKATSPLVTSHIMGDITSSTSVFGSSETTEIETVSSVNQGLQERSTSQVASSATETSTVITHVSSGDATTHVTKTQATFSSGTSISSPHQFITSTNTFTDVSTNPSTSLIMTESSGVTITTQTGPTGAATQGPYLLDTSTMPYLTETPLAVTPDFMQSEKTTLISKGPKDVSWTSPPSVAETSYPSSLTPFLVTTIPPATSTLQGQHTSSPVSATSVLTSGLVKTTDMLNTSMEPVTNSPQNLNNPSNEILATLAATTDIETIHPSINKAVTNMGTASSAHVLHSTLPVSSEPSTATSPMVPASSMGDALASISIPGSETTDIEGEPTSSLTAGRKENSTLQEMNSTTESNIILSNVSVGAITEATKMEVPSFDATFIPTPAQSTKFPDIFSVASSRLSNSPPMTISTHMTTTQTGSSGATSKIPLALDTSTLETSAGTPSVVTEGFAHSKITTAMNNDVKDVSQTNPPFQDEASSPSSQAPVLVTTLPSSVAFTPQWHSTSSPVSMSSVLTSSLVKTAGKVDTSLETVTSSPQSMSNTLDDISVTSAATTDIETTHPSINTVVTNVGTTGSAFESHSTVSAYPEPSKVTSPNVTTSTMEDTTISRSIPKSSKTTRTETETTSSLTPKLRETSISQEITSSTETSTVPYKELTGATTEVSRTDVTSSSSTSFPGPDQSTVSLDISTETNTRLSTSPIMTESAEITITTQTGPHGATSQDTFTMDPSNTTPQAGIHSAMTHGFSQLDVTTLMSRIPQDVSWTSPPSVDKTSSPSSFLSSPAMTTPSLISSTLPEDKLSSPMTSLLTSGLVKITDILRTRLEPVTSSLPNFSSTSDKILATSKDSKDTKEIFPSINTEETNVKANNSGHESHSPALADSETPKATTQMVITTTVGDPAPSTSMPVHGSSETTNIKREPTYFLTPRLRETSTSQESSFPTDTSFLLSKVPTGTITEVSSTGVNSSSKISTPDHDKSTVPPDTFTGEIPRVFTSSIKTKSAEMTITTQASPPESASHSTLPLDTSTTLSQGGTHSTVTQGFPYSEVTTLMGMGPGNVSWMTTPPVEETSSVSSLMSSPAMTSPSPVSSTSPQSIPSSPLPVTALPTSVLVTTTDVLGTTSPESVTSSPPNLSSITHERPATYKDTAHTEAAMHHSTNTAVTNVGTSGSGHKSQSSVLADSETSKATPLMSTTSTLGDTSVSTSTPNISQTNQIQTEPTASLSPRLRESSTSEKTSSTTETNTAFSYVPTGAITQASRTEISSSRTSISDLDRPTIAPDISTGMITRLFTSPIMTKSAEMTVTTQTTTPGATSQGILPWDTSTTLFQGGTHSTVSQGFPHSEITTLRSRTPGDVSWMTTPPVEETSSGFSLMSPSMTSPSPVSSTSPESIPSSPLPVTALLTSVLVTTTNVLGTTSPEPVTSSPPNLSSPTQERLTTYKDTAHTEAMHASMHTNTAVANVGTSISGHESQSSVPADSHTSKATSPMGITFAMGDTSVSTSTPAFFETRIQTESTSSLIPGLRDTRTSEEINTVTETSTVLSEVPTTTTTEVSRTEVITSSRTTISGPDHSKMSPYISTETITRLSTFPFVTGSTEMAITNQTGPIGTISQATLTLDTSSTASWEGTHSPVTQRFPHSEETTTMSRSTKGVSWQSPPSVEETSSPSSPVPLPAITSHSSLYSAVSGSSPTSALPVTSLLTSGRRKTIDMLDTHSELVTSSLPSASSFSGEILTSEASTNTETIHFSENTAETNMGTTNSMHKLHSSVSIHSQPSGHTPPKVTGSMMEDAIVSTSTPGSPETKNVDRDSTSPLTPELKEDSTALVMNSTTESNTVFSSVSLDAATEVSRAEVTYYDPTFMPASAQSTKSPDISPEASSSHSNSPPLTISTHKTIATQTGPSGVTSLGQLTLDTSTIATSAGTPSARTQDFVDSETTSVMNNDLNDVLKTSPFSAEEANSLSSQAPLLVTTSPSPVTSTLQEHSTSSLVSVTSVPTPTLAKITDMDTNLEPVTRSPQNLRNTLATSEATTDTHTMHPSINTAVANVGTTSSPNEFYFTVSPDSDPYKATSAVVITSTSGDSIVSTSMPRSSAMKKIESETTFSLIFRLRETSTSQKIGSSSDTSTVFDKAFTAATTEVSRTELTSSSRTSIQGTEKPTMSPDTSTRSVTMLSTFAGLTKSEERTIATQTGPHRATSQGTLTWDTSITTSQAGTHSAMTHGFSQLDLSTLTSRVPEYISGTSPPSVEKTSSSSSLLSLPAITSPSPVPTTLPESRPSSPVHLTSLPTSGLVKTTDMLASVASLPPNLGSTSHKIPTTSEDIKDTEKMYPSTNIAVTNVGTTTSEKESYSSVPAYSEPPKVTSPMVTSFNIRDTIVSTSMPGSSEITRIEMESTFSLAHGLKGTSTSQDPIVSTEKSAVLHKLTTGATETSRTEVASSRRTSIPGPDHSTESPDISTEVIPSLPISLGITESSNMTIITRTGPPLGSTSQGTFTLDTPTTSSRAGTHSMATQEFPHSEMTTVMNKDPEILSWTIPPSIEKTSFSSSLMPSPAMTSPPVSSTLPKTIHTTPSPMTSLLTPSLVMTTDTLGTSPEPTTSSPPNLSSTSHEILTTDEDTTAIEAMHPSTSTAATNVETTSSGHGSQSSVLADSEKTKATAPMDTTSTMGHTTVSTSMSVSSETTKIKRESTYSLTPGLRETSISQNASFSTDTSIVLSEVPTGTTAEVSRTEVTSSGRTSIPGPSQSTVLPEISTRTMTRLFASPTMTESAEMTIPTQTGPSGSTSQDTLTLDTSTTKSQAKTHSTLTQRFPHSEMTTLMSRGPGDMSWQSSPSLENPSSLPSLLSLPATTSPPPISSTLPVTISSSPLPVTSLLTSSPVTTTDMLHTSPELVTSSPPKLSHTSDERLTTGKDTTNTEAVHPSTNTAASNVEIPSSGHESPSSALADSETSKATSPMFITSTQEDTTVAISTPHFLETSRIQKESISSLSPKLRETGSSVETSSAIETSAVLSEVSIGATTEISRTEVTSSSRTSISGSAESTMLPEISTTRKIIKFPTSPILAESSEMTIKTQTSPPGSTSESTFTLDTSTTPSLVITHSTMTQRLPHSEITTLVSRGAGDVPRPSSLPVEETSPPSSQLSLSAMISPSPVSSTLPASSHSSSASVTSLLTPGQVKTTEVLDASAEPETSSPPSLSSTSVEILATSEVTTDTEKIHPFSNTAVTKVGTSSSGHESPSSVLPDSETTKATSAMGTISIMGDTSVSTLTPALSNTRKIQSEPASSLTTRLRETSTSEETSLATEANTVLSKVSTGATTEVSRTEAISFSRTSMSGPEQSTMSQDISIGTIPRISASSVLTESAKMTITTQTGPSESTLESTLNLNTATTPSWVETHSIVIQGFPHPEMTTSMGRGPGGVSWPSPPFVKETSPPSSPLSLPAVTSPHPVSTTFLAHIPPSPLPVTSLLTSGPATTTDILGTSTEPGTSSSSSLSTTSHERLTTYKDTAHTEAVHPSTNTGGTNVATTSSGYKSQSSVLADSSPMCTTSTMGDTSVLTSTPAFLETRRIQTELASSLTPGLRESSGSEGTSSGTKMSTVLSKVPTGATTEISKEDVTSIPGPAQSTISPDISTRTVSWFSTSPVMTESAEITMNTHTSPLGATTQGTSTLDTSSTTSLTMTHSTISQGFSHSQMSTLMRRGPEDVSWMSPPLLEKTRPSFSLMSSPATTSPSPVSSTLPESISSSPLPVTSLLTSGLAKTTDMLHKSSEPVTNSPANLSSTSVEILATSEVTTDTEKTHPSSNRTVTDVGTSSSGHESTSFVLADSQTSKVTSPMVITSTMEDTSVSTSTPGFFETSRIQTEPTSSLTLGLRKTSSSEGTSLATEMSTVLSGVPTGATAEVSRTEVTSSSRTSISGFAQLTVSPETSTETITRLPTSSIMTESAEMMIKTQTDPPGSTPESTHTVDISTTPNWVETHSTVTQRFSHSEMTTLVSRSPGDMLWPSQSSVEETSSASSLLSLPATTSPSPVSSTLVEDFPSASLPVTSLLNPGLVITTDRMGISREPGTSSTSNLSSTSHERLTTLEDTVDTEDMQPSTHTAVTNVRTSISGHESQSSVLSDSETPKATSPMGTTYTMGETSVSISTSDFFETSRIQIEPTSSLTSGLRETSSSERISSATEGSTVLSEVPSGATTEVSRTEVISSRGTSMSGPDQFTISPDISTEAITRLSTSPIMTESAESAITIETGSPGATSEGTLTLDTSTTTFWSGTHSTASPGFSHSEMTTLMSRTPGDVPWPSLPSVEEASSVSSSLSSPAMTSTSFFSTLPESISSSPHPVTALLTLGPVKTTDMLRTSSEPETSSPPNLSSTSAEILATSEVTKDREKIHPSSNTPVVNVGTVIYKHLSPSSVLADLVTTKPTSPMATTSTLGNTSVSTSTPAFPETMMTQPTSSLTSGLREISTSQETSSATERSASLSGMPTGATTKVSRTEALSLGRTSTPGPAQSTISPEISTETITRISTPLTTTGSAEMTITPKTGHSGASSQGTFTLDTSSRASWPGTHSAATHRSPHSGMTTPMSRGPEDVSWPSRPSVEKTSPPSSLVSLSAVTSPSPLYSTPSESSHSSPLRVTSLFTPVMMKTTDMLDTSLEPVTTSPPSMNITSDESLATSKATMETEAIQLSENTAVTQMGTISARQEFYSSYPGLPEPSKVTSPVVTSSTIKDIVSTTIPASSEITRIEMESTSTLTPTPRETSTSQEIHSATKPSTVPYKALTSATIEDSMTQVMSSSRGPSPDQSTMSQDISTEVITRLSTSPIKTESTEMTITTQTGSPGATSRGTLTLDTSTTFMSGTHSTASQGFSHSQMTALMSRTPGDVPWLSHPSVEEASSASFSLSSPVMTSSSPVSSTLPDSIHSSSLPVTSLLTSGLVKTTELLGTSSEPETSSPPNLSSTSAEILAITEVTTDTEKLEMTNVVTSGYTHESPSSVLADSVTTKATSSMGITYPTGDTNVLTSTPAFSDTSRIQTKSKLSLTPGLMETSISEETSSATEKSTVLSSVPTGATTEVSRTEAISSSRTSIPGPAQSTMSSDTSMETITRISTPLTRKESTDMAITPKTGPSGATSQGTFTLDSSSTASWPGTHSATTQRFPQSVVTTPMSRGPEDVSWPSPLSVEKNSPPSSLVSSSSVTSPSPLYSTPSGSSHSSPVPVTSLFTSIMMKATDMLDASLEPETTSAPNMNITSDESLAASKATTETEAIHVFENTAASHVETTSATEELYSSSPGFSEPTKVISPVVTSSSIRDNMVSTTMPGSSGITRIEIESMSSLTPGLRETRTSQDITSSTETSTVLYKMPSGATPEVSRTEVMPSSRTSIPGPAQSTMSLDISDEVVTRLSTSPIMTESAEITITTQTGYSLATSQVTLPLGTSMTFLSGTHSTMSQGLSHSEMTNLMSRGPESLSWTSPRFVETTRSSSSLTSLPLTTSLSPVSSTLLDSSPSSPLPVTSLILPGLVKTTEVLDTSSEPKTSSSPNLSSTSVEIPATSEIMTDTEKIHPSSNTAVAKVRTSSSVHESHSSVLADSETTITIPSMGITSAVDDTTVFTSNPAFSETRRIPTEPTFSLTPGFRETSTSEETTSITETSAVLYGVPTSATTEVSMTEIMSSNRIHIPDSDQSTMSPDIITEVITRLSSSSMMSESTQMTITTQKSSPGATAQSTLTLATTTAPLARTHSTVPPRFLHSEMTTLMSRSPENPSWKSSLFVEKTSSSSSLLSLPVTTSPSVSSTLPQSIPSSSFSVTSLLTPGMVKTTDTSTEPGTSLSPNLSGTSVEILAASEVTTDTEKIHPSSSMAVTNVGTTSSGHELYSSVSIHSEPSKATYPVGTPSSMAETSISTSMPANFETTGFEAEPFSHLTSGFRKTNMSLDTSSVTPTNTPSSPGSTHLLQSSKTDFTSSAKTSSPDWPPASQYTEIPVDIITPFNASPSITESTGITSFPESRFTMSVTESTHHLSTDLLPSAETISTGTVMPSLSEAMTSFATTGVPRAISGSGSPFSRTESGPGDATLSTIAESLPSSTPVPFSSSTFTTTDSSTIPALHEITSSSATPYRVDTSLGTESSTTEGRLVMVSTLDTSSQPGRTSSSPILDTRMTESVELGTVTSAYQVPSLSTRLTRTDGIMEHITKIPNEAAHRGTIRPVKGPQTSTSPASPKGLHTGGTKRMETTTTALKTTTTALKTTSRATLTTSVYTPTLGTLTPLNASMQMASTIPTEMMITTPYVFPDVPETTSSLATSLGAETSTALPRTTPSVFNRESETTASLVSRSGAERSPVIQTLDVSSSEPDTTASWVIHPAETIPTVSKTTPNFFHSELDTVSSTATSHGADVSSAIPTNISPSELDALTPLVTISGTDTSTTFPTLTKSPHETETRTTWLTHPAETSSTIPRTIPNFSHHESDATPSIATSPGAETSSAIPIMTVSPGAEDLVTSQVTSSGTDRNMTIPTLTLSPGEPKTIASLVTHPEAQTSSAIPTSTISPAVSRLVTSMVTSLAAKTSTTNRALTNSPGEPATTVSLVTHPAQTSPTVPWTTSIFFHSKSDTTPSMTTSHGAESSSAVPTPTVSTEVPGVVTPLVTSSRAVISTTIPILTLSPGEPETTPSMATSHGEEASSAIPTPTVSPGVPGVVTSLVTSSRAVTSTTIPILTFSLGEPETTPSMATSHGTEAGSAVPTVLPEVPGMVTSLVASSRAVTSTTLPTLTLSPGEPETTPSMATSHGAEASSTVPTVSPEVPGVVTSLVTSSSGVNSTSIPTLILSPGELETTPSMATSHGAEASSAVPTPTVSPGVSGVVTPLVTSSRAVTSTTIPILTLSSSEPETTPSMATSHGVEASSAVLTVSPEVPGMVTSLVTSSRAVTSTTIPTLTISSDEPETTTSLVTHSEAKMISAIPTLAVSPTVQGLVTSLVTSSGSETSAFSNLTVASSQPETIDSWVAHPGTEASSVVPTLTVSTGEPFTNISLVTHPAESSSTLPRTTSRFSHSELDTMPSTVTSPEAESSSAISTTISPGIPGVLTSLVTSSGRDISATFPTVPESPHESEATASWVTHPAVTSTTVPRTTPNYSHSEPDTTPSIATSPGAEATSDFPTITVSPDVPDMVTSQVTSSGTDTSITIPTLTLSSGEPETTTSFITYSETHTSSAIPTLPVSPGASKMLTSLVISSGTDSTTTFPTLTETPYEPETTAIQLIHPAETNTMVPRTTPKFSHSKSDTTLPVAITSPGPEASSAVSTTTISPDMSDLVTSLVPSSGTDTSTTFPTLSETPYEPETTATWLTHPAETSTTVSGTIPNFSHRGSDTAPSMVTSPGVDTRSGVPTTTIPPSIPGVVTSQVTSSATDTSTAIPTLTPSPGEPETTASSATHPGTQTGFTVPIRTVPSSEPDTMASWVTHPPQTSTPVSRTTSSFSHSSPDATPVMATSPRTEASSAVLTTISPGAPEMVTSQITSSGAATSTTVPTLTHSPGMPETTALLSTHPRTETSKTFPASTVFPQVSETTASLTIRPGAETSTALPTQTTSSLFTLLVTGTSRVDLSPTASPGVSAKTAPLSTHPGTETSTMIPTSTLSLGLLETTGLLATSSSAETSTSTLTLTVSPAVSGLSSASITTDKPQTVTSWNTETSPSVTSVGPPEFSRTVTGTTMTLIPSEMPTPPKTSHGEGVSPTTILRTTMVEATNLATTGSSPTVAKTTTTFNTLAGSLFTPLTTPGMSTLASESVTSRTSYNHRSWISTTSSYNRRYWTPATSTPVTSTFSPGISTSSIPSSTAATVPFMVPFTLNFTITNLQYEEDMRHPGSRKFNATERELQGLLKPLFRNSSLEYLYSGCRLASLRPEKDSSATAVDAICTHRPDPEDLGLDRERLYWELSNLTNGIQELGPYTLDRNSLYVNGFTHRSSMPTTSTPGTSTVDVGTSGTPSSSPSPTTAGPLLMPFTLNFTITNLQYEEDMRRTGSRKFNTMESVLQGLLKPLFKNTSVGPLYSGCRLTLLRPEKDGAATGVDAICTHRLDPKSPGLNREQLYWELSKLTNDIEELGPYTLDRNSLYVNGFTHQSSVSTTSTPGTSTVDLRTSGTPSSLSSPTIMAAGPLLVPFTLNFTITNLQYGEDMGHPGSRKFNTTERVLQGLLGPIFKNTSVGPLYSGCRLTSLRSEKDGAATGVDAICIHHLDPKSPGLNRERLYWELSQLTNGIKELGPYTLDRNSLYVNGFTHRTSVPTSSTPGTSTVDLGTSGTPFSLPSPATAGPLLVLFTLNFTITNLKYEEDMHRPGSRKFNTTERVLQTLLGPMFKNTSVGLLYSGCRLTLLRSEKDGAATGVDAICTHRLDPKSPGVDREQLYWELSQLTNGIKELGPYTLDRNSLYVNGFTHWIPVPTSSTPGTSTVDLGSGTPSSLPSPTTAGPLLVPFTLNFTITNLKYEEDMHCPGSRKFNTTERVLQSLLGPMFKNTSVGPLYSGCRLTLLRSEKDGAATGVDAICTHRLDPKSPGVDREQLYWELSQLTNGIKELGPYTLDRNSLYVNGFTHQTSAPNTSTPGTSTVDLGTSGTPSSLPSPTSAGPLLVPFTLNFTITNLQYEEDMHHPGSRKFNTTERVLQGLLGPMFKNTSVGLLYSGCRLTLLRPEKNGAATGMDAICSHRLDPKSPGLNREQLYWELSQLTHGIKELGPYTLDRNSLYVNGFTHRSSVAPTSTPGTSTVDLGTSGTPSSLPSPTTAVPLLVPFTLNFTITNLQYGEDMRHPGSRKFNTTERVLQGLLGPLFKNSSVGPLYSGCRLISLRSEKDGAATGVDAICTHHLNPQSPGLDREQLYWQLSQMTNGIKELGPYTLDRNSLYVNGFTHRSSGLTTSTPWTSTVDLGTSGTPSPVPSPTTTGPLLVPFTLNFTITNLQYEENMGHPGSRKFNITESVLQGLLKPLFKSTSVGPLYSGCRLTLLRPEKDGVATRVDAICTHRPDPKIPGLDRQQLYWELSQLTHSITELGPYTLDRDSLYVNGFTQRSSVPTTSTPGTFTVQPETSETPSSLPGPTATGPVLLPFTLNFTITNLQYEEDMRRPGSRKFNTTERVLQGLLMPLFKNTSVSSLYSGCRLTLLRPEKDGAATRVDAVCTHRPDPKSPGLDRERLYWKLSQLTHGITELGPYTLDRHSLYVNGFTHQSSMTTTRTPDTSTMHLATSRTPASLSGPMTASPLLVLFTINFTITNLRYEENMHHPGSRKFNTTERVLQGLLRPVFKNTSVGPLYSGCRLTLLRPKKDGAATKVDAICTYRPDPKSPGLDREQLYWELSQLTHSITELGPYTLDRDSLYVNGFTQRSSVPTTSIPGTPTVDLGTSGTPVSKPGPSAASPLLVLFTLNFTITNLRYEENMQHPGSRKFNTTERVLQGLLRSLFKSTSVGPLYSGCRLTLLRPEKDGTATGVDAICTHHPDPKSPRLDREQLYWELSQLTHNITELGPYALDNDSLFVNGFTHRSSVSTTSTPGTPTVYLGASKTPASIFGPSAASHLLILFTLNFTITNLRYEENMWPGSRKFNTTERVLQGLLRPLFKNTSVGPLYSGCRLTLLRPEKDGEATGVDAICTHRPDPTGPGLDREQLYLELSQLTHSITELGPYTLDRDSLYVNGFTHRSSVPTTSTGVVSEEPFTLNFTINNLRYMADMGQPGSLKFNITDNVMQHLLSPLFQRSSLGARYTGCRVIALRSVKNGAETRVDLLCTYLQPLSGPGLPIKQVFHELSQQTHGITRLGPYSLDKDSLYLNGYNEPGPDEPPTTPKPATTFLPPLSEATTAMGYHLKTLTLNFTISNLQYSPDMGKGSATFNSTEGVLQHLLRPLFQKSSMGPFYLGCQLISLRPEKDGAATGVDTTCTYHPDPVGPGLDIQQLYWELSQLTHGVTQLGFYVLDRDSLFINGYAPQNLSIRGEYQINFHIVNWNLSNPDPTSSEYITLLRDIQDKVTTLYKGSQLHDTFRFCLVTNLTMDSVLVTVKALFSSNLDPSLVEQVFLDKTLNASFHWLGSTYQLVDIHVTEMESSVYQPTSSSSTQHFYLNFTITNLPYSQDKAQPGTTNYQRNKRNIEDALNQLFRNSSIKSYFSDCQVSTFRSVPNRHHTGVDSLCNFSPLARRVDRVAIYEEFLRMTRNGTQLQNFTLDRSSVLVDGYSPNRNEPLTGNSDLPFWAVILIGLAGLLGVITCLICGVLVTTRRRKKEGEYNVQQQCPGYYQSHLDLEDLQ

SEQ ID NO: 1151 - DNA, 1899 bp, Homo sapiens
ggtcgggacgccgggctaggggcgcgtcatgtggccgctcacggtcccgccgccgctgctgctgctgctgtgctcaggcctggccggacagactctcttccagaacccagaagagggctggcagctgtacacctcagcccaggcccctgacgggaaatgcatctgcacggccgtgatcccagcgcagagtacctgctctcgagatggcaggagtcgggagctgcggcaactgatggagaaggtccagaacgtctcccagtccatggaggtccttgagttgcggacgtatcgcgacctccagtatgtacgcggcatggagaccctcatgcggagcctggatgcgcggctccgggcagctgatgggtccctctcggccaagagcttccaggagctgaaggacaggatgacggaactgttgcccctgagctcggtcctggagcagtacaaggcagacacgcggaccattgtacgcttgcgggaggaggtgaggaatctctccggcagtctggcggccattcaggaggagatgggtgcctacgggtatgaggacctgcagcaacgggtgatggccctggaggcccggctccacgcctgcgcccagaagctgggctgtgggaagctgaccggggtcagtaaccccatcaccgttcgggccatggggtcccgcttcggctcctggatgactgacacgatggcccccagtgcggatagccgggtctggtacatggatggctattacaaaggccgccgggtcctggagttccgtaccctgggagacttcatcaaaggccagaactttatccagcacctgctgccccagccgtgggcgggcacgggccacgtggtgtacaacggctccctgttctataacaagtaccagagcaacgtggtggtcaaataccacttccgctcgcgctctgtgctggtgcagaggagcctcccgggcgccggttacaacaacaccttcccctactcctggggcggcttctccgacatggacttcatggtggacgagagcgggctctgggctgtgtacaccaccaaccagaacgcgggcaacatcgtggtcagccggctggacccgcacaccctcgaggtcatgcggtcctgggacaccggctaccccaagcgcagcgctggcgaggccttcatgatctgcggtgtgctctacgtgaccaactcccacctggctggggccaaggtctacttcgcctattttaccaacacgtccagttacgagtacacggacgtgcccttccacaaccagtattcccacatctcgatgctggattacaacccccgggagcgcgccctctatacctggaacaacggccaccaggtgctctacaatgtcaccctgtttcacgtcatcagcacctctggggacccctgagccaatgctgtggctcgggctgctgcctggggggcctccgggggctgggggcccttttcattctgcctgtgtccctcaagggtgatctctctgtctctgtcacgccctttctccccgcctttttgctgggcttttgttctctgcctatgtatttctgtctattttttcaatttcccctcttctcctttattgatctctgcttttaatacaccacttctttctttctgcctttttatggatgtctttttctttttatggctctggttctccagttctttccgtctctgcctctctctgtctctctctctctgtccttccacccctccctccttgcttcccacccattcctcatccctcactcccacccccacccccacccccaggagttgagtgcatggatctgtttctttttttatttacactttttctttccggtttgccggaataaacaggacctttgacatttgaaaaaaaaaaaaaaaaaaaaaaaaaaaaaaaaaaaaaaa

SEQ ID NO: 1152 - protein, 454 aa, Homo sapiens
MWPLTVPPPLLLLLCSGLAGQTLFQNPEEGWQLYTSAQAPDGKCICTAVIPAQSTCSRDGRSRELRQLMEKVQNVSQSMEVLELRTYRDLQYVRGMETLMRSLDARLRAADGSLSAKSFQELKDRMTELLPLSSVLEQYKADTRTIVRLREEVRNLSGSLAAIQEEMGAYGYEDLQQRVMALEARLHACAQKLGCGKLTGVSNPITVRAMGSRFGSWMTDTMAPSADSRVWYMDGYYKGRRVLEFRTLGDFIKGQNFIQHLLPQPWAGTGHVVYNGSLFYNKYQSNVVVKYHFRSRSVLVQRSLPGAGYNNTFPYSWGGFSDMDFMVDESGLWAVYTTNQNAGNIVVSRLDPHTLEVMRSWDTGYPKRSAGEAFMICGVLYVTNSHLAGAKVYFAYFTNTSSYEYTDVPFHNQYSHISMLDYNPRERALYTWNNGHQVLYNVTLFHVISTSGDP

SEQ ID NO: 1153 - DNA, 6192 bp, Homo sapiens
gcgagtgactgcaccgagcccgagaagtcgccgcgccccgcagccgccccgactggttccccgccttgcccgtgggccccgccgggatggggaaccgccgggacctgggccagccgcgggccggtctctgcctgctcctggccgcgctgcagcttctgccggggacgcaggccgatcctgtggatgtcctgaaggccctgggtgtgcagggaggccaggctggggtccccgaggggcctggcttctgtccccagaggactccagagggtgaccgggcattcagaattggccaggccagcacgctcggcatccccacgtgggaactctttccagaaggccactttcctgagaacttctccttgctgatcaccttgcggggacagccagccaatcagtctgtcctgctgtccatttatgatgaaaggggtgcccggcagttgggcctggcactggggccagcgctgggtctcctaggtgaccccttccgccccctcccccagcaggtcaacctcacagatggcaggtggcaccgtgtggccgtcagcatagatggtgagatggtgaccctggtagctgactgtgaagctcagccccctgttttgggccatggcccccgcttcatcagcatagctggactcactgtgctggggacccaggaccttggggaaaagactttcgagggagacattcaggagctgctgataagcccagatcctcaggctgccttccaggcttgtgagcggtacctccccgactgtgacaacctggcaccggcagccacagtggctccccagggtgaaccagaaacccctcgtcctcggcggaaggggaagggaaaagggaggaagaaagggcgaggtcgcaaggggaagggcaggaaaaagaacaaggaaatttggacctcaagtccacctcctgactccgcagagaaccagacctccactgacatccccaagacagagactccagctccaaatctgcctccgacccccacgcctttggtcgtcacctccactgtgactactggactcaatgccacgatcctagagaggagcttggaccctgacagtggaaccgagctggggaccctggagaccaaggcagccagggaggatgaagaaggagatgattccaccatgggccctgacttccgggcagcagaatatccatctcggactcagttccagatctttcctggtgctggagagaaaggagcaaaaggagagcccgcagtgattgaaaaggggcagcagtttgagggacctccaggagccccaggaccccaaggggtggttggcccctcaggccctcccggccccccaggattccctggcgaccctggtccaccgggccctgctggcctcccaggaatccccggcattgatgggatccgaggcccaccgggcactgtgatcatgatgccgttccagtttgcaggcggctcctttaaaggccccccagtctcattccagcaggcccaggctcaggcagttctgcagcagactcagctctctatgaaaggcccccctggtccagtggggctcactgggcgcccaggccctgtgggtctccccgggcatccaggtctgaaaggagaggagggagcagaagggccacagggtccccgaggcctgcagggacctcatggaccccctggccgagtgggcaagatgggccgccctggagcagatggagctcggggcctcccaggggacactggacctaagggtgatcgtggcttcgatggcctccctgggctgcctggtgagaagggccaaaggggtgactttggccatgtggggcaacccggtcccccaggagaggatggtgagaggggagcagagggacctccagggcccactggccaggctggggagccgggtccacgaggactgcttggccccagaggctctcctggccccacgggtcgcccgggtgtgactggaattgatggtgctcctggtgccaaaggcaatgtgggtcctccaggagaaccaggccctccgggacagcagggaaaccatgggtcccagggactccccggtccccagggactcattggcactcctggggagaagggtccccctggaaacccaggaattccaggcctcccaggatccgatggccctctgggtcacccaggacatgagggccccacgggagagaaaggggctcagggtccaccagggtcggcaggccctccgggctatcctggacctcggggagtgaagggcacttcaggcaaccggggcctccagggggagaaaggcgagaagggagaggacggcttcccaggcttcaagggcgatgtggggctcaaaggtgatcaggggaaacccggagctccaggtccccggggagaggatggtcctgaggggccgaaggggcaggcggggcaggctggcgaggaggggcccccaggctcagctggggagaagggcaagcttggggtgccaggcctcccaggttatccaggacgccctggacctaagggatctattggatttcccggtcccctgggacccataggagagaaagggaagtcgggaaagacagggcagccaggcctggaaggagagcggggaccaccaggttcccgtggagagagggggcaaccgggtgccacagggcaaccaggccccaagggcgatgtgggccaggatggagcccctgggatccctggagaaaagggcctccctggtctgcaaggccctccaggattccctgggccaaagggcccccctggtcaccaaggtaaagatgggcgaccagggcaccctggacagagaggagaactgggcttccaaggtcagacaggcccgcctggaccagctggtgtcttaggccctcagggaaagacaggagaagtgggacctctaggtgaaagggggcctccaggcccccctggacctcctggtgaacaaggtcttcctggcctggaaggcagagagggggccaagggggaactgggaccaccaggaccccttgggaaagaagggccagctggactcaggggctttcccggccccaaagggggccctggggacccgggacctactggcttaaagggtgataagggccccccagggcccgtgggggccaatggctcccctggtgagcgcggtcctttgggcccagcaggaggcattggacttcctggccaaagtggcagcgaaggccccgttggccctgcaggcaagaaggggtcccggggagaacgtggcccccctggccccactggcaaagatgggatcccagggcccctggggcctctgggaccccctggagctgctgggccttctggcgaggaaggggacaagggggatgtgggtgcccccggacacaaggggagtaaaggcgataaaggagacgcgggcccacctggacaaccagggatacggggtcctgcaggacacccaggtcccccgggagcagacggggctcaggggcgccggggacccccaggcctctttgggcagaaaggagatgacggagtcagaggctttgtgggggtgattggccctcctggactgcaggggctgccaggccctccgggagagaaaggggaggtcggagacgtcgggtccatgggtccccatggagctccaggtcctcggggtccccaaggccccactggatcagagggcactccagggctgcctggaggagttggtcagccaggcgccgtgggtgagaagggtgagcgaggggacgctggagacccagggcctccaggagccccaggcatcccggggcccaagggagacattggtgaaaagggggactcaggcccatctggagctgctggacccccaggcaagaaaggtccccctggagaggatggagccaaagggagcgtgggccccacggggctgcccggagatctagggcccccaggagaccctggagtttcaggcatagatggttccccaggggagaagggagaccctggtgatgttgggggaccgggtccgcctggagcttctggggagcccggcgcccccgggccccccggcaagaggggtccttcaggccacatgggtcgagaaggcagagaaggggagaaaggtgccaagggggagccaggtcctgatgggcccccagggaggacgggtccaatgggggctagagggccccctggacgtgtggggcctgagggtcttcgagggatccctggccctgtgggtgaaccaggcctcctgggagcccctggacagatgggccctcctggccccctggggccctctggcctcccagggctgaagggagacactggccccaagggggaaaagggccacattggattgatcggtctcattggccccccgggagaagctggtgagaaaggagatcaggggttgccaggcgtgcagggaccccctggtcccaagggagaccctggtccccctggtcccattggctctctgggccaccctgggcccccaggtgtggcgggccctctaggacagaaaggctcaaaagggtctccggggtccatgggcccccgtggagacactggacctgcaggcccaccaggccccccgggtgcccctgccgagctgcatgggctgcgcaggcgccggcgcttcgtcccagtcccgcttccagtcgtggagggcggcctggaggaggtgctggcctcgctcacatcgctgagcttggagctggagcagctgcggcgtcctcccggcactgcggagcgcccgggcctcgtgtgccacgagctgcaccgcaaccacccgcacctgcctgatggggaatactggattgaccccaaccagggctgcgcgcgggactcgttcagggttttttgcaacttcacggcgggaggagagacctgcctctatcccgacaagaagtttgagatcgtgaaattggcctcctggtccaaggaaaagcctggaggctggtatagcacattccgtcgagggaagaagttctcctacgtggacgccgacgggtccccagtgaatgtcgtgcagctgaacttcctgaaactgctgagtgccacagctcgccagaacttcacctactcctgccagaatgcagctgcctggctggacgaagccacgggtgactacagccactccgcccgcttccttggcaccaatggagaggagctgtctttcaaccagacgacagcagccactgtcagcgtcccccaggatggctgccggctccggaaaggacagacgaagacccttttcgaattcagctcttctcgagcgggatttctgcccctgtgggatgtggcggccactgactttggccagacgaaccaaaagtttgggtttgaactgggccccgtctgcttcagcagctgagagtgtccggggtgggagggaccatgagggagccccagaatggggtgcatttggtgctgaggctttgaagccaccgtatttttcgttacctgtgactatggagccaatgggatgtgacttcgctcatcacggacagtcattccttctcctttccagggtgctgggggctggggttccctggcccaagggtccagcctcctctcaccccattccaggtggcatactgcagtctggctctttctcccctccctccccacccaagcctcacctccccaccccttgaacccccatgcaatgagcttctaactcagagctgatgaacaaaagcccccccacccccaatgcctgcctcctcactcctccgtcgctgcccttcacaccttttggtgctacccctccccagagttaagcactggatgtctcctgatcccaggctgggacccctacccccaccccctttgatcctttctacttccacggtgaaaggactgaggtcggactacagagggaagagggacttcccttgactgggttgtgtttcttttcctgcctcagcccagctctgcaaatcccctccccctgccccccacctccccaggctcaccttgccatgccaggtggtttggggaccaagatgttgggggggtgaatcaggatcctaatggtgctgccctatttatacctgggtctgtattaaaagggaaagtcccccctgttgtagatttcatctgcttcctccttagggaaggctgggatatgatgagagattccagcccaagcctggccccccaccgccaggccatagggcataatttgcatctcaaatctgagaataaactgatgaactgtgaaaaaaaaaaaaaaaaaa

SEQ ID NO: 1154 - protein, 1745 aa, Homo sapiens
MGNRRDLGQPRAGLCLLLAALQLLPGTQADPVDVLKALGVQGGQAGVPEGPGFCPQRTPEGDRAFRIGQASTLGIPTWELFPEGHFPENFSLLITLRGQPANQSVLLSIYDERGARQLGLALGPALGLLGDPFRPLPQQVNLTDGRWHRVAVSIDGEMVTLVADCEAQPPVLGHGPRFISIAGLTVLGTQDLGEKTFEGDIQELLISPDPQAAFQACERYLPDCDNLAPAATVAPQGEPETPRPRRKGKGKGRKKGRGRKGKGRKKNKEIWTSSPPPDSAENQTSTDIPKTETPAPNLPPTPTPLVVTSTVTTGLNATILERSLDPDSGTELGTLETKAAREDEEGDDSTMGPDFRAAEYPSRTQFQIFPGAGEKGAKGEPAVIEKGQQFEGPPGAPGPQGVVGPSGPPGPPGFPGDPGPPGPAGLPGIPGIDGIRGPPGTVIMMPFQFAGGSFKGPPVSFQQAQAQAVLQQTQLSMKGPPGPVGLTGRPGPVGLPGHPGLKGEEGAEGPQGPRGLQGPHGPPGRVGKMGRPGADGARGLPGDTGPKGDRGFDGLPGLPGEKGQRGDFGHVGQPGPPGEDGERGAEGPPGPTGQAGEPGPRGLLGPRGSPGPTGRPGVTGIDGAPGAKGNVGPPGEPGPPGQQGNHGSQGLPGPQGLIGTPGEKGPPGNPGIPGLPGSDGPLGHPGHEGPTGEKGAQGPPGSAGPPGYPGPRGVKGTSGNRGLQGEKGEKGEDGFPGFKGDVGLKGDQGKPGAPGPRGEDGPEGPKGQAGQAGEEGPPGSAGEKGKLGVPGLPGYPGRPGPKGSIGFPGPLGPIGEKGKSGKTGQPGLEGERGPPGSRGERGQPGATGQPGPKGDVGQDGAPGIPGEKGLPGLQGPPGFPGPKGPPGHQGKDGRPGHPGQRGELGFQGQTGPPGPAGVLGPQGKTGEVGPLGERGPPGPPGPPGEQGLPGLEGREGAKGELGPPGPLGKEGPAGLRGFPGPKGGPGDPGPTGLKGDKGPPGPVGANGSPGERGPLGPAGGIGLPGQSGSEGPVGPAGKKGSRGERGPPGPTGKDGIPGPLGPLGPPGAAGPSGEEGDKGDVGAPGHKGSKGDKGDAGPPGQPGIRGPAGHPGPPGADGAQGRRGPPGLFGQKGDDGVRGFVGVIGPPGLQGLPGPPGEKGEVGDVGSMGPHGAPGPRGPQGPTGSEGTPGLPGGVGQPGAVGEKGERGDAGDPGPPGAPGIPGPKGDIGEKGDSGPSGAAGPPGKKGPPGEDGAKGSVGPTGLPGDLGPPGDPGVSGIDGSPGEKGDPGDVGGPGPPGASGEPGAPGPPGKRGPSGHMGREGREGEKGAKGEPGPDGPPGRTGPMGARGPPGRVGPEGLRGIPGPVGEPGLLGAPGQMGPPGPLGPSGLPGLKGDTGPKGEKGHIGLIGLIGPPGEAGEKGDQGLPGVQGPPGPKGDPGPPGPIGSLGHPGPPGVAGPLGQKGSKGSPGSMGPRGDTGPAGPPGPPGAPAELHGLRRRRRFVPVPLPVVEGGLEEVLASLTSLSLELEQLRRPPGTAERPGLVCHELHRNHPHLPDGEYWIDPNQGCARDSFRVFCNFTAGGETCLYPDKKFEIVKLASWSKEKPGGWYSTFRRGKKFSYVDADGSPVNVVQLNFLKLLSATARQNFTYSCQNAAAWLDEATGDYSHSARFLGTNGEELSFNQTTAATVSVPQDGCRLRKGQTKTLFEFSSSRAGFLPLWDVAATDFGQTNQKFGFELGPVCFSS

SEQ ID NO: 1155 - DNA, 2674 bp, Homo sapiens
cgggttcctgagaattgtcaatcaggcgcgaggcagagaggagggtgtgacgttccaggagctagtggcctcttcaccctggtgacctctgttccgtattctgtcactgagagacgccctgggacatctgtggtggcttttgtcgcgctgggacctaccctgactacgggagttgggaggacccgggacaccgcacagccgggaaatggactcagtggcctttgaggatgtggctgtgaacttcacccatgaggagtgggctttgctgggtccatcacagaagaatctctacagagatgtgatgcgagaaaccattaggaacctgaactgtataggaatgaaatgggaaaaccagaacattgatgatcagcaccaaaatctcaggagaaatccaaggtgtgatgtggtagagagatttggtaaaagtaaagatggtagtcagtgtggagaaaccttaagccagattcgaaatagtattgtaaacaagaacactcccgccagagtagatgcatgtggaagcagtgtgaatggagaagtcataatgggtcattcatccctgaattgctacatcagagttgatactggacacaaacaccgggagtgtcatgaatatgcagagaagtcatatacacataagcagtgtgggaaaggcttaagttatcgccactcctttcaaacatgtgaaaggcctcacactggaaagaaaccctatgattgtaaggaatgtggaaaaaccttcagttctcctggaaaccttcgaagacatatggtagtaaaaggtggagatggaccttataaatgtgaattgtgtgggaaagcctttttttggcccagtttattacgtatgcatgaaagaactcacactggagagaaaccatatgaatgtaagcagtgttctaaagccttccctgtttacagttcctatctaagacatgaaaaaatacacactggggagaaaccgtatgaatgtaagcagtgttctaaagccttccctgattacagttcatatctaagacatgaaagaactcacactggagagaaaccctacaaatgtaaacaatgtgggaaagccttcagtgtttccggttcccttcgagtacatgaaagaattcacactggagagaaaccctatacatgtaaacagtgtgggaaagcgttttgtcatcttggaagctttcaaagacacatgataatgcacagtggagatggacctcataaatgtaagatatgtgggaaaggctttgattttcctggttcagcacgaattcatgaaggaactcacactctagagaaaccctatgaatgtaagcaatgtgggaaattgttatctcatcgctcaagctttcgaagacacatgatggcacacactggagatggccctcataaatgcacagtatgtgggaaagcctttgattctcctagtgtatttcaaagacatgaaaggactcacactggagagaaaccctatgaatgcaagcaatgtgggaaagccttccgtacttccagttcccttcgaaaacatgaaacaacacacactggagagcaaccctataaatgtaaatgtggaaaagcttttagtgatttattttcctttcaaagtcatgaaacaacacacagtgaagaggagccttatgaatgtaaggagtgtgggaaagcatttagttcttttaaatacttttgtcgccatgaaaggactcacagtgaagaaaaatcttatgagtgtcaaatttgtggcaaagccttcagtcgtttcagttacttaaaaactcatgaaaggactcacacggcagagaagccatatgaatgtaagcaatgcaggaaagcattcttttggccctctttccttctaagacatgaaaggactcacactggagaaagaccctatgaatgtaaacactgtggtaaagccttcagtcgttccagtttctgtcgagaacatgaaagaactcacactggagagaagccctatgaatgtaaggaatgtgggaaagccttcagttctctcagttcctttaatagacataaaaggacacactggaaggatattctataagtgtatggaatgtgggaaagcattcattggttttatcacattcagatacttgaaagaaataaatcctgtgaatgtaaacgtggtaaagccttaagaagtttccaggctgggcgcagcggctcacacctgtaatcccagcactttgagaggccgaggagggcagatcacgaggccaggagatcgagaccagcctggctaacatgggaaaccctgtctctactaaaaatacggaaaaaaaaaaaaatagccaggcatagttgctcacacctgtagtcctagctactcaggaggctgaggcaggagaatcccttgaacccgggaggtggaggttgcagtgagccgagattgcactactgcactccagcttgggtgctagagcgagactccatctcaaaaaaaaaaaaaaaagtttccatttctttcaaatagagttgctgcctgctatatgcaagaagattggttccagtacaccctgagtatacctaaatccacagatgccagctcttttataaaatggaatattcgcatgtacctacccacattctcctgtatactctataaatgtctagattaattaaaatatctcatgcattgtaaaaaaaaaaaaaaaaaaaaaaaaaa

SEQ ID NO: 1156 - protein, 615 aa, Homo sapiens
MDSVAFEDVAVNFTHEEWALLGPSQKNLYRDVMRETIRNLNCIGMKWENQNIDDQHQNLRRNPRCDVVERFGKSKDGSQCGETLSQIRNSIVNKNTPARVDACGSSVNGEVIMGHSSLNCYIRVDTGHKHRECHEYAEKSYTHKQCGKGLSYRHSFQTCERPHTGKKPYDCKECGKTFSSPGNLRRHMVVKGGDGPYKCELCGKAFFWPSLLRMHERTHTGEKPYECKQCSKAFPVYSSYLRHEKIHTGEKPYECKQCSKAFPDYSSYLRHERTHTGEKPYKCKQCGKAFSVSGSLRVHERIHTGEKPYTCKQCGKAFCHLGSFQRHMIMHSGDGPHKCKICGKGFDFPGSARIHEGTHTLEKPYECKQCGKLLSHRSSFRRHMMAHTGDGPHKCTVCGKAFDSPSVFQRHERTHTGEKPYECKQCGKAFRTSSSLRKHETTHTGEQPYKCKCGKAFSDLFSFQSHETTHSEEEPYECKECGKAFSSFKYFCRHERTHSEEKSYECQICGKAFSRFSYLKTHERTHTAEKPYECKQCRKAFFWPSFLLRHERTHTGERPYECKHCGKAFSRSSFCREHERTHTGEKPYECKECGKAFSSLSSFNRHKRTHWKDIL

SEQ ID NO: 1157 - DNA, 889 bp, Homo sapiens
atggctgatgacgcaggtgcagcgcgggggtccagaggccctggggaccctgggatggggaaccgcagtggcttccgcggagatttcggcagtggcatccggggccggggccgcggagctctgagaggcaaggccgaggataagaagtggatgcccgttaccaagctgggctgcctggtcaaggacatgaagatctagtccctggaggagatctatctcttctccctgcccatcaaggaatctgagatcattgacttgttcctgggggcctctctcaaggacgaggttttgattacaccagtgcagaagcagacccgtgccggccagtgcaccaggttcaaggcgtttgttgccatcggggactacaatggccatgtccgtctgggagttaagtgctccaaggaggcagccactgccatccgcggggccatcatcctggccaagctctccactgtcctcgtgcgcagaggctactgggggaacaagatcggcaagccccacaccgtcccttgcaaggtgacaggccactgcggctctgtgctggtgcgcctcatccccgcacccagggacactggcatcgtctcagcgcctgtgcccaagaagctgctcatgatggctggtatcagtgactgatacacctcagcccggggctgcactgccatcctgggcaacttcgccaaggccacctttgatgtcatctctaagacctacagctacctaacccctgacctctggaaggagactgtattcaccaagtctccctatcaggaattcactgaccacctcgttaagacccacaccagagtctctgtgcagaggacccaggctccagctgtggctacaacatagggctttcatacaagaaaaataaagtaaattaagcctgaaa

SEQ ID NO: 1158 - DNA, 2755 bp, Homo sapiens
gccaggttcaaagagcccgcggcgtcttcacgcccctgcgctcagctctagactcagtcgctcgctgagagacgccctggaacgtctgtgtagcctcagtcgctgagagacgccctggaacgtctgtggcagcctctgtcacagtgggacccgcactggcagcgggaggcagagggaggaccctggaacatcccggaagccgggaaatggacgcagtggcctttgaggatgtggctgtgaacttcacccaggaggaatgggctttgctgggtccatcacagaagaatttatacagatatgtgatgcaagaaaccatcaggaacctggactgtataagaatgatatgggaagaacagaatactgaagatcagtacaaaaatcctaggagaaatctaagatgtcatatggtagagagattcagtgaaagtaaagacagtagtcagtgtggagaaacatttagcctcattcgagatagtattgtgaacaacagcatttgtcctggagaagatccatgtcaaagcgctgagtgtgaagaagtcataatgggtcatttatcccttaatagccacatcagagttgattctggacacaaaccacatgagtatcaggaatatggagagaagccacatacacataaacaacgtgggaaagccttcagttaccatcactcctttcagtcgcgtggaaggcctcacactggaaagaaacgctatgagtgtaaggaatgtggaaaaaccttcagttctcgtagaaaccttcgaagacacatggtagtgcaaggtggaaatagaccttataaatgtaagttgtgtgggaaagcttttttttggcccagtttattacgtatgcatgaaagaactcacactggagagaaaccgtatgaatgtaagcagtgttctaaagcctttcctttttacagttcctatcgaagacatgagagaatgcacactggggagaaaccgtatgaatgtaagcagtgttctaaagccttgcctgattccagttcctatataagacatgaaagaactcacactggagagaaaccatatacatgtaaacagtgtgggaaagccttcagtgtttccagttcccttcgaagacatgaaaccactcacagtgcagagaaaccctatgagtgtaagcaatgcgggaaaacatttcatcatcttggaagctttcagatacacatgaaaaggcacactggagatcgacctcataaatgtaagatatgtgggaaaggctttgatcgtcccagtttagttcgatatcatgaacgaattcacactggagagaaaccctatgaatgcaagcagtgtgggaaaacgttatctcatagctcaagctttcgaagacacatgataatgcacactggaggtggacctcataaatgcaagatatgtgggaaagcttttgtttatcctagtgtatgtcaaagacacgaaaagtctcacagtggagagaaaccctatgaatgcaagcagtgtgggaaagcgttatctcatagctcaagctttcgaagacatatggtaatgcatacgggagatgggccgaataaatgcaaggtatgtgggaaagcctttgtttatcccagtgtatgtcaaagacatgaaaagactcactggagagaaacaatatgaatgtaaactattataaagccttctatatttccagttccctttgatatcatgaataaacttacactggacagaaaccctataaatgtaaatgtgggaaagcctttcataatttttattcctttcaaaatcatgaaatatctcacactggagagatgctgtatgatataaggaatgtgggaaagtgttcgattttttttttaacaccattgtcaacataaaacaactcacagagcagaaaaactctgtgagtgtaaaatatgtagggaagccttcagtcattttggtaacttaaaagtacatgaggctgggcacagtggctcacgcctgtaatcccagcacttagggtgggcaaattgcttgacctcaggaatttgaggcctgcctgggcaaaatggtgaaaccatgtctctacaaaaaatagaaaaagtagcaggtgtggtggtatgcccctgtagtcccagctacttgggaggctgaggtgggaagatctcttgagccgagggggtgggggttgcagtgagccaagatgcactgcaccccagcctgggcgacagagccagaccctgtctcaaaaaaaaaaaaaaagtacatgaaaggattcactctggagagaagtcatatgaatgtaagaaatgtagaaaatcattgagttctctcaggtccttgcatagacataaaaggactcactggagagatactctataaatgtgtgaaatgtagggaagtattctttaatgttatttcatttcagatagaaataattctcattggagataaacgctatgaatgtaaacacatagtaaagccttaattttaagcctcagtttctttcaaatacagttatcccctaatatttgaggagcgtggttctaccaccccctgggcatacataaatcgacacatgccaagtccttttttaaaaatgacatatttggtacaaaattacccggatgtgatggcacatgcctgtaatcccagctactcaggaggctgaggcaggataatcacttgaatccgggaggcggaggttgcggtgagccaaggtcgcgccactgcactccagcctgggcagcaagagcaaaacaacctctgtcacacacacaaaaaaaaaaaaaaaa

SEQ ID NO: 1159 - protein, 476 aa, Homo sapiens
MDAVAFEDVAVNFTQEEWALLGPSQKNLYRYVMQETIRNLDCIRMIWEEQNTEDQYKNPRRNLRCHMVERFSESKDSSQCGETFSLIRDSIVNNSICPGEDPCQSAECEEVIMGHLSLNSHIRVDSGHKPHEYQEYGEKPHTHKQRGKAFSYHHSFQSRGRPHTGKKRYECKECGKTFSSRRNLRRHMVVQGGNRPYKCKLCGKAFFWPSLLRMHERTHTGEKPYECKQCSKAFPFYSSYRRHERMHTGEKPYECKQCSKALPDSSSYIRHERTHTGEKPYTCKQCGKAFSVSSSLRRHETTHSAEKPYECKQCGKTFHHLGSFQIHMKRHTGDRPHKCKICGKGFDRPSLVRYHERIHTGEKPYECKQCGKTLSHSSSFRRHMIMHTGGGPHKCKICGKAFVYPSVCQRHEKSHSGEKPYECKQCGKALSHSSSFRRHMVMHTGDGPNKCKVCGKAFVYPSVCQRHEKTHWRETI

SEQ ID NO: 1160 - DNA, 1990 bp, Homo sapiens
ttaaatttggcagtgatttattggatacgacatttaaggcacagacaaccaataaaagataaactggactacatcgaaattaaaaacttttgcgcaccaaaggacaatctcaagatgaaaagaaaacctacagaaagggagaacacatctgcatatcacatatcaaataagggcttaatacccacagtgtataaagaattcctacaactctcttccaagcacttgggagctgaaaaaagaaagaaattttctaaatattaaaaactaaaaattttaaataagaattcctataactcaacaacaaaacacaaatgactcaattttaatgagcaaaggattttaaaacaaactggttcaaaaaatatataaacaaccaacaaaaacaaaaaccaatgtgcattattattggtcattagggaaatgcaaatcaaaaccacaatgaaaaagcagtacagaaccattaattggctattatgaaaaaaatacgacaaccagtatatgtgacaatgtggaaaatagaaacccttatgcattgctggagagaatgtaaaacattgtagccactttgtaaagcaatatacctgttcctgaaaaaggtttacaccaattattctgtgaaccagcaattacactcctagggatacatatatccaaaagaattgaaagcagggactcacacagacatagacataccacatccacagcagccttattgatagcagtcaaattattactgtggaaacaacccatgtttatcaacataaaaatggataaacaaagtatgctttaaccatacagtggaaatttattcagacacaaaaacaatgagttcctgatacatgctaccacatggataaaccttgaaaacgttctaagtgaaataagccagacatggaaggacacatgcatacttccacatatctctctctctatgaatagtcaaattcacagacagagaaagtagaatggagattttcagtactttgggataggatggaataggtaattacatgtatggaacactaagtagatagagcaagtagcacagtaacacgtataaaatgatcccttcctttgtgtattctagtttgtaccagcactgtaagaggcttccagatgagcagttccagtggttaatgttggtagttcaaagggtaacactgccctctaggcaacatcgtggaggtctatttgagatatatttcactacaagttattctcatgaatacttcaatgaaacagctcttatcaaggcccccagtgaccaaatacttgccaaaatctacagtcaaccctttttccttgtcttattcaaattctcagtgacctgtgacacagctgaccactctccccatattgaaataccttcttctggaggcttccaggagaagaaacccatgttttcctcctactacttcattgggtgttggaaaccattatggagtgaggaagtcaatgatttcaggagcttctccactattgatgaagtatcaggaatatctcaaatgctgcaagggaggttggtggggaaaacaatctatgacatgcttgaagactttattgaggaacacattgacaggacaagagcaccgccatctttataacactccaccatcctaagctttaagtttctatttggccacctggccaaaactgaaaatgtcagccccgcccataacttcaacagagaataacggccctaactgtaacagaacagccaggacttccccaacccctccctaacagaattttgtttcaaagcacacttctccactgggccctttaaaaaagcctcaggctgtaagagaagtttgcacctgaccctgccgctggaagcccttctcaggtttactcccaataaaactgtctcaactgttgagccaccttctcatctctcctttccttaatctttctatcccaacacaaataagagagcataaatactaacaaggaactcgaagatatactgaaattctctgcagataatgat

SEQ ID NO: 1161 - protein, 180 aa, Homo sapiens [sequence omitted]

SEQ ID NO: 1162 - DNA, 2825 bp, Homo sapiens
gctcccgctcctggctctgtagctgagagaagccctggcaggtcagtggcaggcactgtcacgctgagtcctatgctggcagcggggaaccttggggagaacacgggacaccgcggaagccgggaaatgattgtgcggctgtaaccggcacaggttcgcggtccgagtcactgcaccgagactccaaggcctgcagcagaaacagtttaatagggggagaggagagaagaccccagttccgcctccatgagaggtttggggatgggggtgtttaggggtctggacaggggcggctgaagtgtggggtcgctggttggtggggaagtgacaggcgaatcctgggacgggaggtgaagaaaccgcattctcctgctgagtgggttccctcgtggggttttcaccctgcttggcgccagcctttccgttggaattcaagatctgagaaagaacttgggcaactcgagcagctctccgagatcttatccccaggcacaatgcagaagccggcggtcagtgtcttctgtgacctgactctcaggaaggcggcccccgcgaggcagtggggctcaggtttccattccttggggacacacggctggtcagccagttgaatgattgtatttgggggagaagacagaagtgatctcttccttcctgactctcagactaatgaagagagaaaacaatatgattcagtagcctttgaggatgtggcggtgaacttcacccaggaagagtgggctttgctgggtccatcacagaagagtctgtacagagatgtgatgtgggaaaccattaggaacctggactgtataggaatgaaatgggaagacacaaacattgaagatcagcacagaaatcccaggaggagcctaagatgtcatatcatagagagatttagtgaaagtcgccagccagatagtactgtgaatgaaaaacctcctggagtagatccatgtaaaagcagtgtgtgtggagaaatcatgggttgttcattccttaattgctatatcacatttgatgctggacacaaaccagatgagtgtcaggaatatggagagaagccacatacacataaacaatgtgggacagccttcaattatcaccactcctttcaaacacaggaaagacctcacactggaaagaaacgctatgattgtaaggaatgtgggaaaaccttcagttcttcgggaaaccttcgaagacacataatagtacaacgtggaggtggaccttatatatgtaagttgtgtgggaaagcctttttttggcctagtttatttcgtatgcatgaaagaactcacactggagagaaaccgtatgaatgtaagcagtgttgtaaagccttccctatttacagttcctatctaagacatgaaagaacacacactggggagaaaccatatgaatgcaagcactgttccaaagccttccctgattacagttcctatgtaagacatgaaagaactcacactggagaaaaaccctataaatgtaaacgatgtggaagagccttcagtgtttccagttcccttcgaatacatgaaagaactcacactggagagaaaccctatgaatgcaagcaatgcgggaaagcatttcatcatctgggaagctttcaaagacacatgataaggcacactggagatggacctcataaatgtaagatatgtgggaaaggctttgattgtcctagttcactgcaaagtcatgaaagaactcacactggagagaaaccctatgaatgcaagcagtgtgggaaagcgttatctcatcactcaagctttcgaagtcatatgataatgcacactggagatggacctcacaaatgcaaggtatgtgggaaagccttcatttatcccagtgtatttcaaggacatgaaaggactcatactggtgagaaaccctatgaatgtaaagaatgtggtaaagccttccgtatttctagttcccttcgaagacatgaaacaactcacactggagagaaaccctataaatgtaaatgtgggaaagcctttattgatttctattcctttcaaaatcatgaaacaactcacactggagagaagccatatgagtgtaaggaatgtgggaaagcattcagttgtttcacatacctttctcaacatagaaggactcacatggctgaaaaaccttatgaatgtaaaacatgtaagaaagccttcagtcattttggtaacttaaaagtccatgaaaggattcacactggagagaagccatatgaatgtaaggaatgcaggaaagcattctcttggctcacttgccttctgcgacatgaaagaattcacactggaaagaaatcttatgaatgtcaacaatgtggtaaagccttcactcgttctcgtttccttcgaggacatgaaaaaactcacactggagagaagatgcatgaatgtaaggaatgtgggaaggcactgagttctctcagttccttgcatagacataaaaggactcactggagagatactctataaatgtggaaaagcattcattaattttatttcatttcagaaacgtgaaagaaatcacataggagataagcctcatgaatgcaaacacatggtaaagccttaagatgtttcttttgaatatggttatcccctaaccatatgcaggggattggttccagaccccctaagcatacctaaatccacagatgctgtgttccttttataaaaggacatttgcatgtaacctatccacatcctcctgcatcccataaatcatgcctagattacttaatttttcaccaacccaaagcttttgtaaaagtaaaaataaaaagtaggttactaaaatacctc

SEQ ID NO: 1163 - protein, 627 aa, Homo sapiens
MIVFGGEDRSDLFLPDSQTNEERKQYDSVAFEDVAVNFTQEEWALLGPSQKSLYRDVMWETIRNLDCIGMKWEDTNIEDQHRNPRRSLRCHIIERFSESRQPDSTVNEKPPGVDPCKSSVCGEIMGCSFLNCYITFDAGHKPDECQEYGEKPHTHKQCGTAFNYHHSFQTQERPHTGKKRYDCKECGKTFSSSGNLRRHIIVQRGGGPYICKLCGKAFFWPSLFRMHERTHTGEKPYECKQCCKAFPIYSSYLRHERTHTGEKPYECKHCSKAFPDYSSYVRHERTHTGEKPYKCKRCGRAFSVSSSLRIHERTHTGEKPYECKQCGKAFHHLGSFQRHMIRHTGDGPHKCKICGKGFDCPSSLQSHERTHTGEKPYECKQCGKALSHHSSFRSHMIMHTGDGPHKCKVCGKAFIYPSVFQGHERTHTGEKPYECKECGKAFRISSSLRRHETTHTGEKPYKCKCGKAFIDFYSFQNHETTHTGEKPYECKECGKAFSCFTYLSQHRRTHMAEKPYECKTCKKAFSHFGNLKVHERIHTGEKPYECKECRKAFSWLTCLLRHERIHTGKKSYECQQCGKAFTRSRFLRGHEKTHTGEKMHECKECGKALSSLSSLHRHKRTHWRDTL

SEQ ID NO: 1164 - DNA, 2635 bp, Homo sapiens
cgtccgctggaagttctgaggcagcctttgtctggctggaacacgcattggcagcgggagctgtcggtaggacctgggacaccgcggaagtcgggaaatggcctcagtggctttagaggatgtggctgtgaacttcacccgagaagagtgggctttgctgggtccttgtcagaagaatctctacaaagatgtgatgcaggaaaccatcaggaacctggattgtgtagtaatgaaatggaaagaccagaacattgaagatcaatatagatatcccaggaaaaatctaagatgtcgtatgttagagagatttattgaaagtaaagatggaactcaatgtggagaaacatctagccagattcaagatagtattgtgaccaagaacactcttcctggagtaggtccttgtgaaagcagtatgagaggagaaaaagtcatgggtcattcatcccttaattgttacatcagagttggtgctgggcacaaaccacatgagtatcatgaatgtggagagaagccagatacgcataaacaacgtgggaaagccttcagttaccacaactcatttcaaacacatgagaggcttcacactggaaagaaaccatatgattgtaaagaatgtgggaagtccttcagttctttgggaaaccttcaaagacacatggcagtgcagcgtggagatggaccttataaatgtaagttgtgtgggaaagcgtttttttggcccagtttattacatatgcatgaaagaacgcacactggagagaaaccatatgaatgtaagcagtgttctaaagccttttctttttacagttcctatctaagacatgaaagaacacatactggggagaaaccgtatgaatgtaaacagtgttctaaagcctttcctttttacagttcctatctaagacatgaaagaacacatactggggagaaaccatataaatgtaagcagtgttctaaagccttccctgattccagttcttgtctaatacatgaaagaactcacactggagagaaaccctatacatgtaaacaatgtgggaaagccttcagtgtttccggttcccttcaaagacatgaaaccactcacagtgcagagaaaccctatgcatgtcagcaatgtgggaaagcgtttcatcatctgggaagctttcaaagacacatgataaggcacactggaaatggacctcataaatgtaagatatgtgggaaaggctttgattgtcctagttcactgcaaagtcatgaaagaactcacactggagagaaaccctatgaatgcaagcagtgtgggaaagcattatctcatcgctcaagctttcgaagtcatatgataatgcacactggagatggacctcataaatgcaaggtatgtgggaaagcctttgtttatcccagtgtatttcaaagacatgaaaggactcacactgcagagaaaccctataaatgtaaacaatgtggcaaagcctaccgtatttccagttcccttcgaaggcatgaaacaactcatactggagagaaaccctataaatgcacacttgggaaagcctttattgatttctgttcctttcaaaatcacaaaacaactcacactggagagaagccatatgagtgtaaggaatgtgggaaagcattcagtcgtttcagatacctttctcgacataaaaggactcacacaggagagaaaccttatgagtgtaaaacatgtaggaaagccttcggtcattatgataacttaaaggtacatgaaagaattcactctggagagaagccgtatgaatgtaaggaatgtgggaaagcattctcttggctcacttgctttctacgacatgaaagaattcacatgagagagaaatcctatgaatgtccacaatgtggtaaagccttcactcattcccgttttcttcaaggacatgaaaaaactcatactggagagaacccgtatgaatgtaaggaatgtgggaaagcatttgcttctctcagttccttgcatagacataaaaagactcactggaaaaaaactcacactggagagaacccatatgaatgtaaggaatgtgggaaagcatttgcttctctcagttccttgcatagacataaaaagactcactagcattctctctaaatgtatggaatgtgggaaagcatttattaattttatttcatttcagatacttgtacgaaacacattggagatagaccctgtgaatgtaagcacttggtaaagccttaagtagtttcagtttctttccagtacagtcatcccttgatacctgctgggtattggttccagcactctgtgagccatgtccagtcccttttataaaatgacatgtttgtatgtaacttacccacatcctcttgtatagtctcaattatgtctagattacttaaaatacctcatgcattataaaagctatgcaaatagttgttctattgtattgtttagggactcatgataaggaaaagagtctatgtattttcagtatagatgcagtaattgtcagcctatcaacatagtgtagtcagccagaacattaaagtttctttgtttcaactctcaaaaaaaaaaaaaaaaaaaaaaaaaaaaaaaaaaaaaaaaaaaaaaaaaaaaaaaaaaaaaaaaaaaaaaaaa

SEQ ID NO: 1165 - protein, 671 aa, Homo sapiens
MASVALEDVAVNFTREEWALLGPCQKNLYKDVMQETIRNLDCVVMKWKDQNIEDQYRYPRKNLRCRMLERFIESKDGTQCGETSSQIQDSIVTKNTLPGVGPCESSMRGEKVMGHSSLNCYIRVGAGHKPHEYHECGEKPDTHKQRGKAFSYHNSFQTHERLHTGKKPYDCKECGKSFSSLGNLQRHMAVQRGDGPYKCKLCGKAFFWPSLLHMHERTHTGEKPYECKQCSKAFSFYSSYLRHERTHTGEKPYECKQCSKAFPFYSSYLRHERTHTGEKPYKCKQCSKAFPDSSSCLIHERTHTGEKPYTCKQCGKAFSVSGSLQRHETTHSAEKPYACQQCGKAFHHLGSFQRHMIRHTGNGPHKCKICGKGFDCPSSLQSHERTHTGEKPYECKQCGKALSHRSSFRSHMIMHTGDGPHKCKVCGKAFVYPSVFQRHERTHTAEKPYKCKQCGKAYRISSSLRRHETTHTGEKPYKCTLGKAFIDFCSFQNHKTTHTGEKPYECKECGKAFSRFRYLSRHKRTHTGEKPYECKTCRKAFGHYDNLKVHERIHSGEKPYECKECGKAFSWLTCFLRHERIHMREKSYECPQCGKAFTHSRFLQGHEKTHTGENPYECKECGKAFASLSSLHRHKKTHWKKTHTGENPYECKECGKAFASLSSLHRHKKTH

SEQ ID NO: 1166 - DNA, 2154 bp, Homo sapiens
gcgcaaacggcgagggcgtggctaccagccgctgcgctccgctctggggtctcctcaccccagaaggccctcaggtggaggaagggcctcaggtggaggtaggacctgtgctggccgcgggagaggtaaacagaacaccaggacatcccagagtctgggaaatggactcagtggtctttgaggatgtggctgtgaacttcacccaggaggagtgggctttgctgggtccctctcagaagaaactctacagagatgtgatgcaagaaacctttgttaacttggcctctataggggaaaactgggaggagaagaacattgaagatcacaaaaatcaggggagaaagctaagaagtcatatggtagagaggctctgtgaaaggaaagaaggtagtcagtttggagaaaccatcagtcagactccaaatcctaaaccaaacaagaaaacttttactagagtaaaaccatatgaatgtagtgtgtgtggaaaggactatatgtgtcattcatctcttaataggcacatgagatctcatactgaacatagatcatatgaatatcacaaatatggagagaaatcatatgaatgtaaggaatgtgggaaaagattcagctttcgaagttcatttcgaatacatgaaagaactcacactggagagaaaccctataaatgtaaacagtgtggtaaggctttcagttggcccagttcctttcaaatacatgaaagaactcatactggagagaaaccttatgaatgtaaggaatgtgggaaggccttcatttatcacacaacctttcgaggacacatgagaatgcacacaggggagaaaccctataaatgtaaagaatgcgggaaaacgttcagtcatcccagttcttttcgaaatcatgaaagaactcactctggagagaaaccctatgaatgtaaacaatgtggaaaagctttcagatattaccaaacttttcaaatacatgaaaggactcacactggggaaaaaccctatcagtgtaagcaatgtggtaaagctcttagttgtcccacatcctttcgaagtcatgaaaggattcacactggagaaaaaccctataaatgtaaaaaatgtgggaaagccttcagttttcctagttcctttagaaaacatgaaagaattcatacaggagagaaaccctatgattgtaaggaatgtgggaaagcattcatttctcttccaagctatcgaagacatatgataatgcacactggaaatggaccttataaatgcaaggaatgtgggaaagcctttgattgtcctagttcttttcaaatccatgaacgaactcacactggagagaaaccctatgaatgtaaacagtgtggtaaagccttcagttgttccagttcctttcgaatgcatgaaagaactcacactggagagaaaccccatgaatgtaaacaatgtggtaaagccttcagttgttccagttctgttcgaatacatgaaaggactcacactggagagaaaccctatgaatgtaaacagtgtggtaaagccttcagttgttccagttcctttcgaatgcatgaaagaattcacactggagagaaaccctatgaatgtaaacagtgtggtaaagcctttagtttttctagttcctttcggatgcatgaaaggactcacactggagagaaaccctatgaatgtaaacaatgtggtaaagccttcagttgttccagttcctttcgaatgcatgaaaggactcacactggggagaaaccctatgaatgtaaacagtgtggtaaggcgtttagttgttccagttccattcgaatacatgaaaggactcacactggagagaaaccttatgagtgtaaacaatgtggtaaggccttcagttgttctagttctgttcgaatgcatgaaaggactcacactggagtgaaaccctatgaatgtaaacaatgtgacaaagccttcagttgctcacgttcctttcgaatccatgaacgaactcacactggagagaaaccctatgcatgtcaacaatgtggtaaagccttcaagtgttcccgttcctttcgaatacatgaaagagttcatagtggagagtaaccctatgtatataagcaatatggcaaagttttcagttgtcctatttccttttttttttttttttttt

SEQ ID NO: 1167 - protein, 641 aa, Homo sapiens
MDSVVFEDVAVNFTQEEWALLGPSQKKLYRDVMQETFVNLASIGENWEEKNIEDHKNQGRKLRSHMVERLCERKEGSQFGETISQTPNPKPNKKTFTRVKPYECSVCGKDYMCHSSLNRHMRSHTEHRSYEYHKYGEKSYECKECGKRFSFRSSFRIHERTHTGEKPYKCKQCGKAFSWPSSFQIHERTHTGEKPYECKECGKAFIYHTTFRGHMRMHTGEKPYKCKECGKTFSHPSSFRNHERTHSGEKPYECKQCGKAFRYYQTFQIHERTHTGEKPYQCKQCGKALSCPTSFRSHERIHTGEKPYKCKKCGKAFSFPSSFRKHERIHTGEKPYDCKECGKAFISLPSYRRHMIMHTGNGPYKCKECGKAFDCPSSFQIHERTHTGEKPYECKQCGKAFSCSSSFRMHERTHTGEKPHECKQCGKAFSCSSSVRIHERTHTGEKPYECKQCGKAFSCSSSFRMHERIHTGEKPYECKQCGKAFSFSSSFRMHERTHTGEKPYECKQCGKAFSCSSSFRMHERTHTGEKPYECKQCGKAFSCSSSIRIHERTHTGEKPYECKQCGKAFSCSSSVRMHERTHTGVKPYECKQCDKAFSCSRSFRIHERTHTGEKPYACQQCGKAFKCSRSFRIHERVHSGE

SEQ ID NO: 1168 - DNA, 2553 bp, Homo sapiens
aatgttcaacaactccgcggggtcttcctgtttcgtgtccgctgcgtttgggttccggtctccgcttctccagtggccccggtggctccaccgcagcgtctggcgcgctgggacctgcacaggccggagagagccgtaggcaggaccccgggacaccctggaagccaggaaatggactcagtggcctctgaggatgtggctgtgaacttcacacttgaggagtgggctttgctggatccttcccagaagaaactctacagagatgtgatgcgggaaacctttagaaacctggcctgtgtaggaaaaaaatgggaagaccagagcattgaagattggtacaaaaatcaggggagaattttaagaaatcatatggaagagggactcagtgaaagtaaagaatatgatcaatgtggagaagccttcagtcagattctcaatcttaatctgaacaagaaaattcctactatagtaagaccatgtgaatgtagtttgtgtgggaaagtcttcatgcatcattcatcccttagtaggcacatcagatctcaccttggacacaaaccatatgactatcaggaatatggagagaaaccatataaatgtaagcagtgtgggaaagccttcagttcttgtcaatcctttcgaagacatgaaagaactcacactggtgagaaaccctatgcatgtccggaatgtgggaaagccttcatttctctcccaagtgttcgaagacacatgattaagcacactggagatggaccatataaatgtcaggaatgtgggaaagcctttgatcgcccaagtttatttcagatacatgaaagaactcacactggagagaaaccctatgaatgtcaggaatgtgcaaaagctttcatttctcttccaagttttcaaagacacatgattaggcacactggagatggaccttataaatgtcaggaatgtggaaaagcctttgaccgccccagtttatttcgaatacatgaaagaactcatactggagagaaaccccatgaatgtaaacagtgtgggaaggccttcatttctttcacaaattttcaaagtcatatgattaggcacactggggatggaccttataaatgtaaagtatgtgggagagcctttatttttcccagttatgttcgaaagcatgaaagaactcatactggggagaaaccctatgaatgtaataaatgtggtaaaaccttcagttcttccagtaatgttcgaacacatgaaaggactcacactggagagaagccctatgaatgtaaggaatgcgggaaagccttcatttctctcccaagtgtccgaagacacatgataaagcacactggagatggaccttataaatgtcaggtatgtggtagagcctttgactgtcccagttcatttcaaatacacgaaagaactcacactggagagaaaccctatgaatgtcaggtatgtgggaaagccttcatttctcttaaaaggattagaaaacatatgatactgcacactggagatggaccttataaatgtcaggtatgtggtaaagcctttgactgtcctagttctgtccgaacacatgaaagaactcatactggagaaaaaccctatgaatgtaaagaatgtgggaaagcattcaattatgccagttccattagaatacatgaaagaactcataccggagaaaaaccctatgaatgtaagcaatgtggaaaaacgttcagttattccagttcctttcaaagacatgaaagagctcataatggagataaaccttacgtaaagaatgtgggaaagctttcatttatcacacaaccttcgaatacctgtgaaaatgaatagtggaggacaggtctacaagtatctacatatctaaagaatatggaaagtcttcagtttgctttctgggtttcagacttgtttgggagctcacccctttctcctgtttctcacttttggaataggaatctctatcctgtgcctgtctcatattttggaaatacatgactagtttggttttcaccggttcggagctgaagaagaattttgcctcagcatgaattgagtctcatccatatctgagtgatgtgatattgagatgacactttggagtttgagtttaaacattaggcttcatgctggaattaactgagacttttgaggcctttgggatgagatgaatatattttacatgtgatgacatggattttgggggccagaggtgtaatgttttggctgagtgtatgccacctcagattcatatgttgaaaccttacccccgtgccccccctctcccccacaatgtgatggtatttggaggccctgtctctggtggtttttaggattggaggacatcatgaagatggaggccttgtaattgggattagtttcctgataggaatccctagagagctagctttgcccttcaccatgagagggtgcagtgagaagatagctatctttgaaccgggaagcaggcccttaccagacatggactatgccagtgccttgatattggacttcccagcctcccaaaccatgagaaataaatgtttgttgatt

SEQ ID NO: 1169 - protein, 553 aa, Homo sapiens
MDSVASEDVAVNFTLEEWALLDPSQKKLYRDVMRETFRNLACVGKKWEDQSIEDWYKNQGRILRNHMEEGLSESKEYDQCGEAFSQILNLNLNKKIPTIVRPCECSLCGKVFMHHSSLSRHIRSHLGHKPYDYQEYGEKPYKCKQCGKAFSSCQSFRRHERTHTGEKPYACPECGKAFISLPSVRRHMIKHTGDGPYKCQECGKAFDRPSLFQIHERTHTGEKPYECQECAKAFISLPSFQRHMIRHTGDGPYKCQECGKAFDRPSLFRIHERTHTGEKPHECKQCGKAFISFTNFQSHMIRHTGDGPYKCKVCGRAFIFPSYVRKHERTHTGEKPYECNKCGKTFSSSSNVRTHERTHTGEKPYECKECGKAFISLPSVRRHMIKHTGDGPYKCQVCGRAFDCPSSFQIHERTHTGEKPYECQVCGKAFISLKRIRKHMILHTGDGPYKCQVCGKAFDCPSSVRTHERTHTGEKPYECKECGKAFNYASSIRIHERTHTGEKPYECKQCGKTFSYSSSFQRHERAHNGDKPYVKNVGKLSFITQPSNTCENE

SEQ ID NO: 1170 - DNA, 1690 bp, Homo sapiens
atggaggccacgccccccctctgccctagttggccctggttacaccttctctggtcagtctcacagctgcgcggtggcagacaggacttgttccacagtggtaactgggatagagctgatgtggccccaaccccacctcccttcccgccctgccatgtcggaagaaacccgacgagcaaattggcagcagcaaagaaaaagttgagagactatcagtggaggaacagccctggtgttcctacaggagtgaaaaagaaaattaaaaattgcagtaaccccgagacaaccacttctggtggttgccactcacctggagatgtaatggaggcatgtagacaaatacaactggagagagatacatttgctgagattcttaaaggagagagagccacatggcagcagaggatgaatcagatgtcggagcagatgcacacactgagggaggagaaggagtgtattatgaatcggttacaggagctggagacaagcttggtggaattgagaaaacagatgactgaactcccagccctggcacccccagcaaggccctccgaggtggagcagcagctacaagaggaggctgagcacctgagggaggagctggagagtctggcaggacagctccaagcccaggtacaggacaatgagggcttgagttgcctgaaccgggagcaggaggagaggctgctggagctggagcgggcagctgagctctggcggaagcaagaggaggatgaggatgaggaggagaaggagaaggagaagaagaagaagaagaaggaggagaaggagaaggaggaggaggcgtctcggcccatgaagagcatcctgcaggacctggaaagccaggagtccatggtggcatttttaacatcagctgtagccagtgcagatggggagcaggctcggctccgtgggcagctgaaggagcaaaggctgcgctgccggtgcctggctcacctgctggcctgggcccagaagcagccagaggcagcagccccagccccagggactgggatggattctagctgctttatgcagctgatgcaggaaaaggtggacctgaaagagcgggtggaggagctggaacatcgctgcatccagctctctggagagacagacaccatcggagtctacactgccctctctcagccagggggcagcgctgaaggagcagcaccgagaggaggaggagcacatccacaggctagcccaggacaaggaggagatgaaggtgaagctgctggagttgcaggagctggtgttgcggcttgtgggcgacaggactgagggccatggcagattcctggcagctgcccagagccctgctcatgagccagctccaggggccccagccccccagagctcagggctgccgacaagcagggtgatgagtagtgccctcaggcggtttgggcaggcaagagcaagggaggctggcagtgtgctcagagccctcctccctctctccaaagatctttgccaggtgaccctcaccagcagcgtggagcctgcacaaggagaggccggggagggttctcccctcgacaaccccagtgcacagcagatcatgcagctgtttggtgagatgcagaaccctcaggagcgcccaggcttgggcagcatcccctgcattctgttttcccaccaggctgacaaaaaccaccaggtgaagatcaccctcatctga

SEQ ID NO: 1171 - DNA, 790 bp, Homo sapiens
atggtccagcgtttgacataccaatgtaggcattcctacagtacagcctctaacaaaagtaggctgttccgaacccctggtaatagaatacctttataccaagaaggttggaaaagcatcaaaatctgcttgtggcatgtgcccaggcagacttcgaggggttcgtgctgtaagacttaaagttcttatgaaattgtccaaaacaaacaaacatgtcagcagggcctatggtggttccatgtgtgctaaatgtgttcgtggcaggatcaagcgtgctttccttattgaggagcagaaaatcgttgtgaaagtgttgaaggcacaagcagagtcttctcactcattttatttagctttgcagctaaataaaaactctaggcagtttctcctggttcttctgttcctggcgtctgagatttgtcagcagggccagattttcaggaaccatgcatggctatcgcctcctcccgcctggagggctgctcctgcgcctctgaccggcgctggttccagccgcggcccagctgagcacagcaggaaccgcagtagcagccggagcgcccacgcccggggtcgcctagcccaggaacgccttagttgcaaccctgcgtcgaggcccagctccgtgcgcagaaagccgaggccaaccagagcatttcctggacgagtcctctcggcctgcggggccagttcctcctaccagcttcctgctgccacctcggcttccatcagagggacgcttaggatggcgcaggggcccggagacactgtgaagagtccaggggaatga

SEQ ID NO: 1172 - DNA, 2011 bp, Homo sapiens
cagagacagccagacccccggggacccagcctctcacagtcagtcctcccacccgagtgaccccgatggcggcctcccagctggcggcgctggaaggagtggactccggtcccagggtgcccggggccagccccggctttctatattccgagggccagcggctggcactggaggctctgttgagcaagggcgcggaggcgttccagacctgcgtgcagcgcgaggagctgtggcccttcctcagtgcggatgaggttcagggcttggcagcggcagctgaagactggacagtggccaagcaggagcccagcgggatggcagagggagccaccaccaccgatgtggacgcgggcagcctgagctactggcctgggcagtcggagcagccggcgcccgtcctgcggctgggctggccagtggactctgcgtggaaaggcatcacccgggcgcagctgtacacccagcctcctggagagggtcagccgcccctcaaggagctggtgcggctggagatccaggctgcccacaagctggtggccgtggtcatggacgtcttcactgacccagacctgcttttggacttggtggatgctgccacgcgccgctgggtacctgtctacctgctcctggaccgccagcagctgcctgccttcctggaactggcccagcagctgggggtgaacccctggaacacggagaacgtggatgtccgtgtcgtgcggggctgcagcttccagagccgctggcgacggcaggtgagcggcaccgtgcgggagaagtttgtgctgctggacggcgagagggtcatctcaggatcctacagcttcacgtggagtgacgcacgcctgcaccgaggcctggtgaccctgctgactggtgaaattgttgacgccttcagccttgagttccggacgctgtacgcggcctcctgcccgctcccacctgcgcccccccagaaaccctcggtcataggtggcctgcagcggggccgcagcccgcaccgcgtgtcccgccgccgctccgtggcccccgcgtcgcctccgccgcctgacggcccgctggcccaccgcctggccgcctgccgcgtctcccctgctaccccggggccggcactcagtgacattctaaggagtgtgcagcgcgcccggacccccagcggccccccggcccggcccagccgctccatgtgggacctaagccgcctgtcccagctgtctggctccagtgatggggacaacgagctcaagaaatcctggggctccaaggacactccagccaaggctctgatgaggcagcggggcactggaggaggcccctggggggaagtggactcccgacctccgtggggcggtgccctgcccctgccccccgcccaccgcctccgctatctgtccccagcccgaaggcggttcggtggggatgctacattcaaacttcaagagcccagaggcgtcaggccgtcagactgggccccccgggcaggacttggggggcaaccctgaacaggagcccaagccaaatctgctggcccacccaaggagcagtgccggacaactgtcggctcagagccctctgcctcaatgccctgccttggacaaggcttctggcctcggcgtctgtcaagcagaagggatgtttgtcacttgttctgcaacttgggccgggagtggtggctcatgcctgtaatccctgcactttgggaggctaaggtgggagggttgcttaaggccaggagttggagaccagcctgggcaacatagtgagaccccatctctacaattaaaaaaacaaattagttgggtgtggtggcgcacgcctgtggtcccagctacgcaggaggctgaggtgggaggatcccttgagctcaggaggtggaggcagcagtgagccaagatcatgcccttgcactccagcctgggcaacacagtgagaggccatctctttaaaaaaaaaaaaaaaagaaaaaagaaaaagaaaggctgatcgaggtggctcactcctgtaatcccag

SEQ ID NO: 1173 - protein, 478 aa, Homo sapiens
MAASQLAALEGVDSGPRVPGASPGFLYSEGQRLALEALLSKGAEAFQTCVQREELWPFLSADEVQGLAAAAEDWTVAKQEPSGMAEGATTTDVDAGSLSYWPGQSEQPAPVLRLGWPVDSAWKGITRAQLYTQPPGEGQPPLKELVRLEIQAAHKLVAVVMDVFTDPDLLLDLVDAATRRWVPVYLLLDRQQLPAFLELAQQLGVNPWNTENVDVRVVRGCSFQSRWRRQVSGTVREKFVLLDGERVISGSYSFTWSDARLHRGLVTLLTGEIVDAFSLEFRTLYAASCPLPPAPPQKPSVIGGLQRGRSPHRVSRRRSVAPASPPPPDGPLAHRLAACRVSPATPGPALSDILRSVQRARTPSGPPARPSRSMWDLSRLSQLSGSSDGDNELKKSWGSKDTPAKALMRQRGTGGGPWGEVDSRPPWGGALPLPPAHRLRYLSPARRRFGGDATFKLQEPRGVRPSDWAPRAGLGGQP

SEQ ID NO: 1174 - DNA, 648 bp, Homo sapiens
ctttccggacctggccgagcaggaggcgccatcatgggagtggacatccgccataacaaggaccgaaaggttcggcgcaaggagcccaagagccaggatatctacctgaggctgttggtcaagttatacaggtttctggccagaagaaccaactccacattcaaccaggttgtgttgaagaggttgtttatgagtcgcaccaaccggccgcctctgtccctttcccggatgatccggaagatgaagcttcctggccgggaaaacaagacggccgtggttgtggggaccataactgatgatgtgcgggttcaggaggtacccaaactgaaggtatgtgcactgcgcgtgaccagccgggcccgcagccgcatcctcagggcagggggcaagatcctcactttcgaccagctggccctggactcccctaagggctgtggcactgtcctgctctccggtcctcgcaagggccgagaggtgtaccggcatttcggcaaggccccaggaaccccgcacagccacaccaaaccctacgtccgctccaagggccggaagttcgagcgtgccagaggccgacgggccagccgaggctacaaaaactaaccctggatcctactctcttattaaaaagatttttgctgacaaaaaaaa

SEQ ID NO: 1175 - protein, 188 aa, Homo sapiens [sequence omitted]

SEQ ID NO: 1176 - DNA, 3012 bp, Homo sapiens
cgactgactagccgggcgataacggcagagagcatagagcgcaggaacaagcgcaacgtccaagagggaagggccagcacgtcgggggcctctctggccctacccaggccgtgttctcgatagctttccggaagaaagggatctgggagcgagatgcgtgtagctagcacgatgcgtcgcgcggtgacgctctggcccgacgccgacggcctctcagtggctcccggaggacccggcgggcccagtgttggagagctgaaggtcaggccaggacagtgagacctgactccttgctcctaccagcctactatggcttaagacccagggccagggtcccgttgatgtaacagagcagaggaccagcagatgaatggacaccttgaagcagaggagcagcaggaccagaggccagaccaggagctgaccgggagctggggccacgggcctaggagcaccctggtcagggctaaggccatggccccgcccccaccgccactggctgccagcaccccgctcctccatggcgagtttggctcctacccagcccgaggcccacgctttgccctcacccttacatcgcaggccctgcacatacagcggctgcgccccaaacctgaagccaggccccggggtggcctggtcccgttggccgaggtctcaggctgctgcaccctgcgaagccgcagcccctcagactcagcggcctacttctgcatctacacctaccctcggggccggcgcggggcccggcgcagagccactcgcaccttccgggcagatggggccgccacctacgaagagaaccgtgccgaggcccagcgctgggccactgccctcacctgtctgctccgaggactgccactgcccggggatggggagatcacccctgacctgctacctcggccgccccggttgcttctattggtcaatccctttgggggtcggggcctggcctggcagtggtgtaagaaccacgtgcttcccatgatctctgaagctgggctgtccttcaacctcatccagacagaacgacagaaccacgcccgggagctggtccaggggctgagcctgagtgagtgggatggcatcgtcacggtctcgggagacgggctgctccatgaggtgctgaacgggctcctagatcgccctgactgggaggaagctgtgaagatgcctgtgggcatcctcccctgcggctcgggcaacgcgctggccggagcagtgaaccagcacgggggatttgagccagccctgggcctcgacctgttgctcaactgctcactgttgctgtgccggggtggtggccacccactggacctgctctccgtgacgctggcctcgggctcccgctgtttctccttcctgtctgtggcctggggcttcgtgtcagatgtggatatccagagcgagcgcttcagggccttgggcagtgcccgcttcacactgggcacggtgctgggcctcgccacactgcacacctaccgcggacgcctctcctacctccccgccactgtggaacctgcctcgcccacccctgcccatagcctgcctcgtgccaagtcggagctgaccctaaccccagacccagccccgcccatggcccactcacccctgcatcgttctgtgtctgacctgcctcttcccctgccccagcctgccctggcctctcctggctcgccagaacccctgcccatcctgtccctcaacggtgggggcccagagctggctggggactggggtggggctggggatgctccgctgtccccggacccactgctgtcttcacctcctggctctcccaaggcagctctacactcacccgtctccgaaggggcccccgtaattcccccatcctctgggctcccacttcccacccctgatgcccgggtaggggcctccacctgcggcccgcccgaccacctgctgcctccgctgggcaccccgctgcccccagactgggtgacgctggagggggactttgtgctcatgttggccatctcgcccagccacctaggcgctgacctggtggcagctccgcatgcgcgcttcgacgacggcctggtgcacctgtgctgggtgcgtagcggcatctcgcgggctgcgctgctgcgccttttcttggccatggagcgtggtagccacttcagcctgggctgtccgcagctgggctacgccgcggcccgtgccttccgcctagagccgctcacaccacgcggcgtgctcacagtggacggggagcaggtggagtatgggccgctacaggcacagatgcaccctggcatcggtacactgctcactgggcctcctggctgcccggggcgggagccctgaaactaaacaagcttggtacccgccgggggcggggcctacattccaatggggcggagcctgagctagggggtgtggcctggctgctagagttgtggtggcaggggccctggccccgtctcaggattgcgctcgctttcatgggaccagacgtgatgctggaaggtgggcgtcgtcacggttaaagagaaatgggctcgtcccgagggtagtgcctgatcaatgagggcggggcctggcgtctgatctggggccgcccttacggggcagggctcagtcctgacgcttgccacctgctcctacccggccaggatggctgagggcggagtctattttacgcgtcgcccaatgacaggacctggaatgtactggctggggtaggcctcagtgagtcggccggtcagggcccgcagcctcgccccatccactccggtgcctccatttagctggccaatcagcccaggaggggcaggttccccggggccggcgctaggatttgcactaatgttcctctccccgcgggtgggggcggggaaattcatatcccctgttcgtctcatgcgcgtcctccgtccccaatctaaaaagcaattgaaaaggtctatgcaataaaggcagtcgcttcattcctctcaaaaaaaaaaaaaaaaaaaaaaaaaaaaaaaaaaaaaaaaaaaaaaaaaa

SEQ ID NO: 1177 - protein, 654 aa, Homo sapiens
MNGHLEAEEQQDQRPDQELTGSWGHGPRSTLVRAKAMAPPPPPLAASTPLLHGEFGSYPARGPRFALTLTSQALHIQRLRPKPEARPRGGLVPLAEVSGCCTLRSRSPSDSAAYFCIYTYPRGRRGARRRATRTFRADGAATYEENRAEAQRWATALTCLLRGLPLPGDGEITPDLLPRPPRLLLLVNPFGGRGLAWQWCKNHVLPMISEAGLSFNLIQTERQNHARELVQGLSLSEWDGIVTVSGDGLLHEVLNGLLDRPDWEEAVKMPVGILPCGSGNALAGAVNQHGGFEPALGLDLLLNCSLLLCRGGGHPLDLLSVTLASGSRCFSFLSVAWGFVSDVDIQSERFRALGSARFTLGTVLGLATLHTYRGRLSYLPATVEPASPTPAHSLPRAKSELTLTPDPAPPMAHSPLHRSVSDLPLPLPQPALASPGSPEPLPILSLNGGGPELAGDWGGAGDAPLSPDPLLSSPPGSPKAALHSPVSEGAPVIPPSSGLPLPTPDARVGASTCGPPDHLLPPLGTPLPPDWVTLEGDFVLMLAISPSHLGADLVAAPHARFDDGLVHLCWVRSGISRAALLRLFLAMERGSHFSLGCPQLGYAAARAFRLEPLTPRGVLTVDGEQVEYGPLQAQMHPGIGTLLTGPPGCPGREP

SEQ ID NO: 1178 - DNA, 1478 bp, Homo sapiens
cagattttgcaagagccaggctcgcccaccttgtagaaggagcgccttgagtcccctctcaccctcggttgcaaagagccgaccgcttgatctggacaccccctcgcccagattgcatgatctcccgggaccctcttgagttgcacgtttctgcaccgaggacctcaaatccccgtcgctcctaggatttgcagcgttctggatactggagggttgcaggctacactcgcccgcccctgggcagacactcgtccaaaccactggagtgtgctggtgactggcaggccagcccttcgcctctccatgaacccgtgagcctgggggcaggtgccaggcgatggcgcggcctgtgagcgacaggaccccggcccctctgctgctgggcggcccggccgggacaccccctggcgggggagcgctgcttgggttgcggagccttctgcaggggaccagcaagcccaaagagccggccagctgtctcctgaaggaaaaggagcgcaaggcggccctgcctgcagccacaacccctgggccaggcctggagactgcgggcccggcggatgccccggctggggcagtggtgggcggagggtccccgcgggggcgcccggggccggtgcccgccccgggtctgttggcgccactgctgtgggagcgcacgctgccgttcggcgatgtggagtacgtagacctggacgccttcctgctggagcacgggctcccgcccagcccgccgccccccggtggcccgtcgccggagccgtcgcccgcgcggacgcccgcaccctccccagggccgggttcgtgcggctcggcttccccccgctcctctcctgggcacgcccccgcccgggctgccctcgggaccgccagcggccaccgcgcaggcctgacctctcgggacacacccagccctgtggacccagacaccgtggaggtgttgatgacctttgaacccgacccagctgatcttgccctatcaagcattcctggccacgagacctttgaccctcgaagacatcgcttctcagaagaggaacttaagccccagccaatcatgaagaaggcaagaaaaatccaggtgccggaggagcagaaggatgagaaatactggagccggcggtacaagaacaacgaggcagccaagcggtcccgtgacgcccggcggctcaaggagaaccagatatcggtgcgggcggccttcctggagaaggagaacgccctgctgcggcaggaagttgtggccgtgcgccaggagctgtcccactaccgcgccgtgctgtcccgataccaggcccagcacggggccctgtgaggctgccccacatccccacctggcggagctctcctccgccttgctgagacttacgccctgttcccttcctgccctgtggcccacgggccggccagctgggtgccccagggacgtgataatgcagataaatacatttatatttttaagaaaaaaaaaaaaaaaa

SEQ ID NO: 1179 - protein, 325 aa, Homo sapiens
MARPVSDRTPAPLLLGGPAGTPPGGGALLGLRSLLQGTSKPKEPASCLLKEKERKAALPAATTPGPGLETAGPADAPAGAVVGGGSPRGRPGPVPAPGLLAPLLWERTLPFGDVEYVDLDAFLLEHGLPPSPPPPGGPSPEPSPARTPAPSPGPGSCGSASPRSSPGHAPARAALGTASGHRAGLTSRDTPSPVDPDTVEVLMTFEPDPADLALSSIPGHETFDPRRHRFSEEELKPQPIMKKARKIQVPEEQKDEKYWSRRYKNNEAAKRSRDARRLKENQISVRAAFLEKENALLRQEVVAVRQELSHYRAVLSRYQAQHGAL

SEQ ID NO: 1180 - DNA, 1686 bp, Homo sapiens
aagggacaagagagaagagagactgaaacagggagaagaggcaggagaggaggaggtggggagagcacgaagctggaggccgacactgagggagggcgggaggaggtgaagaaggagagaggggagaagaggcaggagctggaaaggagagagggaggaggaggaggagatgcgggatggagacctggagttaggtggcttgggagagcttaatgaaaagagaacggagaggaggtgtgggttaggaaccaagaggtagccctgggggcagcagaaggctgagaggagtaggaagatcaggagctagagggagactggagggttccgggaaaagagcagaggaaagaggaaagacacagagagacgggagagagaagaagagtgggtttgaagggcggatctcagtccctggctgctttggcatttggggaactgggactccctgtggggaggagaggaaagctggaagtcctggagggacagggtcccagaaggaggggacagaggagctgagagaggggggcagggcgttgggcaggggtccctcggaggcctcctggggatgggggctgcagctcgtctgagcgcccctcgagcgctggtactctgggctgcactgggggcagcagctcacatcggaccagcacctgaccccgaggactggtggagctacaaggataatctccagggaaacttcgtgccagggcctcctttctggggcctggtgaatgcagcgtggagtctgtgtgctgtggggaagcggcagagccccgtggatgtggagctgaagagggttctttatgacccctttctgcccccattaaggctcagcactggaggagagaagctccggggaaccttgtacaacaccggccgacatgtctccttcctgcctgcaccccgacctgtggtcaatgtgtctggaggtcccctcctttacagccaccgactcagtgaactgcggctgctgtttggagctcgcgacggagccggctcggaacatcagatcaaccaccagggcttctctgctgaggtgcagctcattcacttcaaccaggaactctacgggaatttcagcgctgcctcccgcggccccaatggcctggccattctcagcctctttgtcaacgttgccagtacctctaacccattcctcagtcgcctccttaaccgcgacaccatcactcgcatctcctacaagaatgatgcctactttcttcaagacctgagcctggagctcctgttccctgaatccttcggcttcatcacctatcagggctctctcagcaccccgccctgctccgagactgtcacctggatcctcattgaccgggccctcaatatcacctcccttcagatgcactccctgagactcctgagccagaatcctccatctcagatcttccagagcctcagcggtaacagccggcccctgcagcccttggcccacagggcactgaggggcaacagggacccccggcaccccgagaggcgctgccgaggccccaactaccgcctgcatgtggatggtgtcccccatggtcgctgagactccccttcgaggattgcacccgcccgtcctaagcctccccacaaggcgaggggagttacccctaaaacaaagctattaaagggacagaatacttcctgtttaaaaaaaaaaaaaaaaaaaaaaaaaaaaaaaaa

SEQ ID NO: 1181 - protein, 328 aa, Homo sapiens
MGAAARLSAPRALVLWAALGAAAHIGPAPDPEDWWSYKDNLQGNFVPGPPFWGLVNAAWSLCAVGKRQSPVDVELKRVLYDPFLPPLRLSTGGEKLRGTLYNTGRHVSFLPAPRPVVNVSGGPLLYSHRLSELRLLFGARDGAGSEHQINHQGFSAEVQLIHFNQELYGNFSAASRGPNGLAILSLFVNVASTSNPFLSRLLNRDTITRISYKNDAYFLQDLSLELLFPESFGFITYQGSLSTPPCSETVTWILIDRALNITSLQMHSLRLLSQNPPSQIFQSLSGNSRPLQPLAHRALRGNRDPRHPERRCRGPNYRLHVDGVPHGR

SEQ ID NO: 1182 - DNA, 1898 bp, Homo sapiens
gagagcccaccgcgccacagcttggaggaagagcctgcggggaactggctgcaggacgctctcttcttgagtgcaggtgctggctctgctgtgaccatgcccgtgacctttgccctcctgctcctcctgggccaggccactgcggacccatgctacgatccacagggccgcccccaattctgcctcccgccagtgacacagctggctgccgtggcggcctcctgccctcaggcctgtgccctgtccccaggaaaccaccttggcgccagggaaacctgcaatggcagcctgactttggccctgggtggccccttcctcctgacatctgtcagcttgcgcttctgtaccccaggacccccagccctcatcctgtctgctgcctgggcctcagggggtccctggaggctgctgtggcacaggcccgcctggcctggggccttagggggccctgaaagggtgaccttccactccacaccaggtcctaaggccactgtggcggccagccacctccgtgtggagtttgggggccaggccgggctagcggcagctgggctgagaggccgctgccagtgtcatggccacgctgcccgctgtgccgcccgtgcccggcccccccgctgccactgccgccaccataccactggcccggggtgcgagagctgccgcccgtcccatcgagactggccctggcggcctgccacgccccggcacccccacccttgcctaccctgctcctgcaaccagcacgcccgacgctgccggttcaactctgagctgttcagactgtcgggcggccggagtgggggtgtttgtgagcggtgccgccaccacacagctgggcggcactgccactactgccaacctgggttctggagggaccctagccagcctatcttcagccgcagggcctgcagagcctgccagtgccaccctattggggcaacaggaggaacctgcaaccagaccagtgggcagtgcacctgcaagttaggggtcacaggcctgacctgcaaccgctgtggccctggctaccagcagagccgctcccccaggatgccctgccagcgaattccagaggcaacaaccacccttgccactactcctggtgcttatagctctgaccctcagtgtcaaaactactgcaatatgtcggacaccagggtacacatgagccttcggaggtactgccagcaggaccatgttctccgcgcgcaggtgctagcgtccgaggcggcgggcccggcatggcagcggctggccgtgcgcgtgctggccgtttacaagcagcgggcgcagcccgtgcgacgcggcgaccaggacgcctgggtgccccgcgccgacctgacctgcggctgcctgcgcctgcagccaggcaccgactacctgctgctgggcagcgccgtgggcgaccccgaccccacgcgcctcatcctcgaccgccacggcctcgcgctgccatggaggccgcgctgggcccggcccctgaagcggctgcagcaggaggagcgcgccggaggctgccgcggcgtgcgggcacccacacccagccccaggccggagcactagacgtgagatggggctgcctcgagcaccaacaaagtaatttgggagcgactaggagctgagccttctacctcgacggtgcactgcagagagccaatcagacgtcgcagagccccgacgacactatgcttgcgcccacgccgagcaggcgtgcggaacttttagcaaaaggcggcaagcgggacttctggtcccagcatttcctcctttggcctgtggcttattccccgccagtgatctgtttcccccaataaagtctcaaatctttgggaaaaaaaaaaaaaaaaaaaaaaaaaaaaaaaaaaaaaaaaaaaaaaaaaaaaaaaaaaaaaaaa

SEQ ID NO: 1183 - protein, 489 aa, Homo sapiens
MPVTFALLLLLGQATADPCYDPQGRPQFCLPPVTQLAAVAASCPQACALSPGNHLGARETCNGSLTLALGGPFLLTSVSLRFCTPGPPALILSAAWASGGPWRLLWHRPAWPGALGGPERVTFHSTPGPKATVAASHLRVEFGGQAGLAAAGLRGRCQCHGHAARCAARARPPRCHCRHHTTGPGCESCRPSHRDWPWRPATPRHPHPCLPCSCNQHARRCRFNSELFRLSGGRSGGVCERCRHHTAGRHCHYCQPGFWRDPSQPIFSRRACRACQCHPIGATGGTCNQTSGQCTCKLGVTGLTCNRCGPGYQQSRSPRMPCQRIPEATTTLATTPGAYSSDPQCQNYCNMSDTRVHMSLRRYCQQDHVLRAQVLASEAAGPAWQRLAVRVLAVYKQRAQPVRRGDQDAWVPRADLTCGCLRLQPGTDYLLLGSAVGDPDPTRLILDRHGLALPWRPRWARPLKRLQQEERAGGCRGVRAPTPSPRPEH

SEQ ID NO: 1184 - DNA, 1396 bp, Homo sapiens
ttttttttttttgtaaagatagggtctcactttttttgctcaagctggtcttgaacttgggctcaagtgatcctcccatctcagcctcccaaagtgccaggattacaggcacaagccgctgtgctcagcgaggtgcagtaacttgactgaagtcacaaggtgctggtgaggctgggacttccagcaggaactcagcctcaggtggaaagaccccagggtctgtgctctgaggcctctcccatgcactgtggtgctcaggacagaggcttggatggattgagtgagtgaatgaatgactttggcagggggtgggtgaagagactcctgtccccccagccctgcctcctgaccatgtcctctctcctccccacagccgtcaagggattctgggccacccgcccttccttctccaccttctacttcgtctttgccatttttgtggtgtccaccatctttcactgccaccagcacctggctctggtgcctgcgccctgggcatactcagcccgtgtggtcctggcccccagacacctgccccgggaggacctgttcactatcaactccaagggccgcctggggaaccagatgggcgagtacgccacgctgtacgccctggccaagatgaacgggcggcccgccttcatcccggcccagatgcacagcaccctggcccccatcttcagaatcaccctgccggtgctgcacagcgccacggccagcaggatcccctggcagaactaccacctgaacgactggatggaggaggagtaccgccacatcccggggcgctgtgtccgcctcacgggctacccctgctcctggaccttctaccaccacctccgccaggagatcctccaggagttcaccctgcacgaccacgtgcgcgaggaggcccagaagttcctgcggggcctgcaggccaagtgggcagggcaggcgaccttcgtgggggtccacgtgcgccggggggactatgtccgtgtcatgccgcgcgtatggaagggggtgctggccgaccggctacctgcagcgggccctggactggttccgggcctgctgccgcctcccggtctttgtggtcaccagcgatgacatggcctggtgccgggagagcatcaacagctcccttggggacgtggtgttcgctggcaatggcctccagggctcacctgccaaggacttcgcactgctcacacagtgcaaccacaccatcatcaccgtgggcaccttcggggtctgggccgcgtacctcgcgggcggggacactgtctacctggccaacttcaccctgcccaactcccctttcaacgtggtctttaggccgtaagcggccttcctgccagagtgggtgggccttgcggctgaccttggacaggctggacagaacggcctctag

SEQ ID NO: 1185 - DNA, 3115 bp, Homo sapiens
agtcaccgatgctggaagggtttctttggccctgagtgaagagagacccagagggaacactgaggtgcctgcccaaccactctgtcccggtttccttcagcaggaccaggtgagagaagccatgctggtcgttcagatgcctttctcctttcccatggcccacttcatcctctttgtctttacggtttccactatatttcacgttcagcagcggctagcgaagattcaagccatgtgggagttaccggtgcagataccagtgctagcctcaacatcaaaggcactgggacccagccagctcagggggatgtggacgatcaatgcaataggccgcctggggaaccagatgggcgagtacgccacactgtacgccctggccaagatgaacgggcggcccgccttcatcccggcccagatgcacagcaccctggcccccatcttcagaatcaccctgccggtgctgcacagcgccacggccagcaggatcccctggcagaactaccacctgaacgactggatggaggaggaataccgccacatcccgggggagtacgtccgcttcaccggctacccctgctcctggaccttctaccaccacctccgccaggagatcctccaggagttcaccctgcacgaccacgtgcgggaggaggcccagaagttcctgcggggcctgcaggtgaacgggagccggccgggcacctttgtaggggtccatgttcgccgaggggactatgtccatgtcatgccaaaagtgtggaagggggtggtggccgaccggcgatacctacagcaggccctggactggttccgagctcgctacagctccctcatcttcgtggtcaccagtaatggcatggcctggtgtcgggagaacattgacacctcccacggtgatgtggtgtttgctggcgatggcattgagggctcacctgccaaagattttgctctactcacacagtgtaaccacaccatcatgaccattgggacgttcgggatctgggccgcatacctcacgggcggagacaccatctacctggccaattacaccctccccgactcccctttcctcaaaatctttaagccagaggcagccttcctgccggagtggacagggattgccgcagacctgtcccccttactcaagcactaatgctggcccattctttgagaccttttctccttctctgcctccctcaagatgagtgcccgggcatgagaagcacatggttccatgagcaggacccatctctcttctgtgaagatgcgttgggctgcaagtaacagaaatctcagtgaacagtggcctggcgtggtggctcatgcctgtaatgctcgcactttgtgaggccagggtgggtggatcacttgaggtcaggagttcaagactagcctggccaacatggtgaaaccccatctcgactaaaaatacaaaaattagccaggcgtggtggtgcacacctgtaatcccagctactcgggaggctgaggcaagagaatcacttgaacccaggaggcggaggttgcagtgagccaagatggtgccgctgcactccagtctgggtgacacagcaagactccatctcaaaaaaaaaaaaaaaaaaaagaaaagaaaaagaaatgaatgggttcaaagaccataatcatgcatatcacataagaccagaagtggcccaggtccagggtcagttaatttagcggctccacaaagtcatcagtcacctgagctccatccatcttcacatgctgtgctaccatttcttagctgtatcatcccatggtcccaaaagggctgctacacatccagccatcacatgcagataattcctttcaaaaacagcagaaagaggctcgttcttgtcttggtcccttttgaagaatgaatgaaaccttcctaagccttccagcaatttccccccaactccgatgggtaggaattgtcacatacccatgtgacccgataggaggcaaaagaaatgagacttctgggattagtttagcctcagattctgcagctgagaagttgatcagccacctctgaaggacatgcagcttgcagaaaattagggtggtgttaccaaggtgaaaaggggaaatggctttagagtagacaacagagatgccctgaggggttgtgtaggttgttcactgcaggaagtcccctggttaagaaggcaagtggggtttaaacagacccacagtctactcatcaaaccaggtgtccttggcattgtgtccacccagagagctcactgttttcttttctttttcttttctttttttttttttttttgagatggagtcttgctgcatcccccaggctggagtgcagtggcatgatcttggctcactgcagcctccgcctcccaggttcaagcgattctcctgcctcagcctcccgagtagctaggattacaggtgcgtgccaccacgcccagctaatttttatatgtttagtggaaatggagtttcaccatgttggtcaggctggtctcaaactcctgacctcatgatccgccttcctcggcctcccaaagtgctgggattacaggtgttagccactgcgcccggccctagagctcactgttttctagttagtccatctggaagtggagcctttttccagtttgcacaaatgtgccatattggcttgtagctggcatgcatccaagtccataggtcctgcctcttcaatcctggctttctagggcctgggatgatcattgctagaactgagagaccagcctggctcagtgaacttcagggcgttccgttcattctttcagtaaatgtttgcagcacatgtgttacatgtcaggcagtgaaaccccccacagcagccttccctctcagaggatacatttgtaaccattacacagtcatcaaaggaataattttttttaatcaccagtgtgcatacagtcatggagttgggtattcccagctaccagggaggctgaggtgggaggattgcttgatgccaggagttagggaatatagtgcaccgtgattggacttgcgaatagccactgcactgcggcctggacgacgtagtgataccctgactcttataaataaataaatgaataaacacaattatgactttgcggatggg

SEQ ID NO: 1186 - protein, 343 aa, Homo sapiens
MLVVQMPFSFPMAHFILFVFTVSTIFHVQQRLAKIQAMWELPVQIPVLASTSKALGPSQLRGMWTINAIGRLGNQMGEYATLYALAKMNGRPAFIPAQMHSTLAPIFRITLPVLHSATASRIPWQNYHLNDWMEEEYRHIPGEYVRFTGYPCSWTFYHHLRQEILQEFTLHDHVREEAQKFLRGLQVNGSRPGTFVGVHVRRGDYVHVMPKVWKGVVADRRYLQQALDWFRARYSSLIFVVTSNGMAWCRENIDTSHGDVVFAGDGIEGSPAKDFALLTQCNHTIMTIGTFGIWAAYLTGGDTIYLANYTLPDSPFLKIFKPEAAFLPEWTGIAADLSPLLKH

SEQ ID NO: 1187 - DNA, 1825 bp, Homo sapiens
gaatggcgctggcccgcggcgctgcgctggcagggagcaggcgggaggcccgaggaagggagcctgctgcccgcccacccgcctgcacaggctgtgtaagggggctgggcacgcatatcccgccaacaactgcagctcccaccagcctgccaggccaggctcctggacactcccttcccgccttcctcctcccacctccctcctccctccacagtcctccagcttcggatccacagacggaatcaggagcagaatccagttcaggcgcccatctcccagcaatcaagtcttgctccctggcctgccctccggcaccctggagccccgcttcccacacagccttgctcctcccggcctggcttgctgcctgcaggcctctcagggtccttcaccgtctctccagtctcggatccggacccgtggatctcagcctcagaccctcctctggccccggccttgccctcgggcacggcccctttcctcttcagccctggggtcctgctccccgagccagaatattgtcctccttggaggtccccaaagaaggagtctcccaagatctcccaacgttggagggagtccaagcccagggggaacttgacataccaccagtacatgcccccagagccgagacagggatccagggcagacccccaagccgaggggtccgccctgggtcctcctgggccatctctgtgggaagggacagactcgcagcagccacatcctaggatgaagccctctcccctcactccctgcccaccaggagtccctagcccctcgccacccccacacaagttggaacttcagacccttaaactggaggagctgacggtctcagagctccggcagcagctgcgcctgcggggcctcccagtgtcggggaccaagtctatgctcctggagcgcatgcgcggcggcgcgccgccccgcgagcggccgaagccgcggcgcgaggacagtcccgcgggtgctccctggccgcgcctcaagcccaaggccctggcagccgcccggcgtcagggctcggtcaagcccagcgcagcatctcacaggccacctcttccacgcgccgcggataccccggggacggctccggctccaactcccactccggctcctgctgcagctccagccctgaccccttcctcagggccgggctcagcggctctgactctggaggaggagctgcaggaagcgatccggagggcgcagttgcttcctaaccggggcatcgatgacatcctggaggatcaggtggagcctgatgaccccctgccccctattcccctggacttccctggctccttcgacgtgctgtccccctccccggactctgaaggcctctcatctgttttctcctcttcactcccgtctcccacgaactcctcctccccttctcccagggaccccacggactccctggactggctggaggccctgagcgggggtcctcctctgggttctggtcccccaccccccagcattttttccgctgacttatctgactccagcagcagccggctgtgggacctgctggaggatccatggtgatggattttaggatttacagagacagagaactgatgggggtggagagaagctccttgtgggaggagagggaactaccagcagagcccctcctaccgcagacacaggatcggagacaacctccaaccccacctgcctcctgaagtgctgctgacatgcaactgccttaactttgcctacctggcctccttatgatccccctccggcgtggtatggttggggggcttcttttgctgctggccacggcaaacaagctgcttgctgcttccttcag

SEQ ID NO: 1188 - protein, 312 aa, Homo sapiens
MPPEPRQGSRADPQAEGSALGPPGPSLWEGTDSQQPHPRMKPSPLTPCPPGVPSPSPPPHKLELQTLKLEELTVSELRQQLRLRGLPVSGTKSMLLERMRGGAPPRERPKPRREDSPAGAPWPRLKPKALAAARRQGSVKPSAASHRPPLPRAADTPGTAPAPTPTPAPAAAPALTPSSGPGSAALTLEEELQEAIRRAQLLPNRGIDDILEDQVEPDDPLPPIPLDFPGSFDVLSPSPDSEGLSSVFSSSLPSPTNSSSPSPRDPTDSLDWLEALSGGPPLGSGPPPPSIFSADLSDSSSSRLWDLLEDPW

SEQ ID NO: 1189 - DNA, 3311 bp, Homo sapiens
caaccctacccagatctcctcccccaggcctggtctcctcacaggacgccccctccccgctcttcctgccgggtttcctcttgccttttcctgtcccccacccagtgctgggagccgtggcagaggcaagagcagtggaactgacccaggccagtggagccagggcctccgggtgtgccggacccgaagcaggggccatgctgtctggtgaacggaaggagggcggaagcccccgcttcgggaagcttcatctccccgtgggcctgtggatcaattcccccaggaagcagctggcgaagctggggcggcgctggcccagcgcagcctctgtcaagtcttcttcgtcggacacggggagccgcagcagcgagccgctacctccgcccccgccgcacgtggagctgcggcgagtgggcgctgtcaaggcggccgggggagcctccggtagccgcgccaagcgcatctcccagctcttccggggctcggggaccgggaccacggggtccagcggcgcaggaggccctgggaccccggggggcgcgcagcgctgggccagcgagaagaagctgccggagctggcggcgggcgtggcccccgagcccccgctggctacccgcgccacggcgcctccgggggtcctcaagatcttcggcgccggactggcatcgggcgccaactacaagagcgtgctggccacggcgcgctccacggcgcgcgagctcgtggccgaggcgctagagcgctacggcctagcaggcagccccggcggtggccccggcgagagcagctgcgtggacgccttcgctttgtgcgacgctctgggccggcccgcggcggcgggcgtgggaagcggcgagtggcgggcggagcacctgcgcgtgctgggcgactccgagcgcccgctgctggtgcaggagctgtggcgggcgcggcccggctgggcgcggcgcttcgagttgcgcggccgcgaggaggcgcggcgcctggagcaggaggccttcggggccgcggacagcgaaggcaccggcgccccttcgtggcggccacagaagaaccgctcccgggcggcgtcgggtggggcagcgctggccagtcctggcccggggaccggatcaggggccccagctgggtctggaggcaaggagcgctcagaaaacttgtctttgcggcgcagcgtgtcggagcttagccttcaggggcggcggcggcggcagcaggagcggagacagcaggcacttagcatggccccaggggcagccgacgcccaaatcggaactgcagaccccggggacttcgatcagttgactcagtgcctcatccaggcccccagcaaccgcccctacttcctgctgctccagggctaccaggacgcccaggactttgtggtgtatgtgatgacgcgagagcagcacgtgtttgggcgaggtgggaactcgtctggccgcggggggtccccggctccctatgtggacaccttcctcaacgccccggacatcctgccgcgtcactgcacagtgcgcgcgggccctgagcacccggccatggtgcgcccgtcccggggcgccccagtcacgcacaacgggtgcctcctgctgcgggaggctgagctgcacccgggcgacctcctggggctgggcgagcacttcctgttcatgtacaaggacccccgcactgggggctcggggcctgcgaggccgccgtggctgcccgcgcgccccggggccacgccgccaggccctggctgggccttctcctgtcgcctgtgcggccgcggcctgcaggagcgcggcgaggcactggccgcctacctggacggccgtgagccagtcctgcgcttccggccgcgcgaggaggaggcgctgctgggcgagatcgtgcgcgccgcagccgccggctcgggagacctgccgcccctcgggcccgccacgctgctggcgctgtgcgtgcagcattccgcccgtgagctggagctgggccacctgccacgactgctgggccgcctggcccggctcatcaaggaggccgtctgggaaaagattaaggaaattggagaccgtcagccagaaaaccaccctgagggggtccccgaggtgcccctgactcctgaagctgtgtctgtggagctgcggccactcatgctgtggatggccaacaccacggagctgcttagctttgtgcaggagaaggtgctggaaatggagaaggaggctgaccaagaggacccacagctctgcaatgacttggaattatgtgatgaggccatggccctcctggatgaggtcatcatgtgtaccttccagcagtctgtctactacctcaccaagactctctattcaacgctgcctgctctcctggatagtaaccctttcacagctggtgcagagctgccggggcctggcgcggagctgggggccatgcctccaggattgagacctaccctgggcgtgttccaggcagccttggagctgaccagccagtgcgagctgcaccctgacctcgtgtctcagacttttggctacttgttcttcttctccaacgcatcccttctcaactcgctgatggaacgaggtcaaggccggcctttctatcaatggtcccgagctgttcaaatccgaaccaacctggacctcgtcttggactggctacagggagctgggctgggcgacattgccactgagttcttccggaaactctccatggctgtgaacctgctctgtgtgccccgcacttccctgctcaaggcttcatggagcagcctaagaaccgaccaccccaccttgacccccgcccagctgcaccatctgctcagccactatcagctgggccctggccgcgggccgccagccgcgtgggaccctccccctgcagagcgggaggctgtggacacaggggacatcttcgaaagcttctcctcgcacccgcccctcatcctccccctggggagctcgcgcctgcgcctcactggtccagtgacggacgatgccttgcaccgtgaactccgtaggctccgccgcctcctctgggatcttgagcagcaggagctgccagccaattatcgccatgggcctcccgtggccacgtctccttgagaaccaataccaaacgagcgcgcgaaccttgaaatgtcacgggcttctacggacaggagcccgcctgagcgcaaagctttctgggagttgtagttcttatcccgcgtggaatgttgggagattgagttttcgggaagtagcggatgggacggtgggagcatgggcttaggatgtgaatgccagggagcaataaaggtatccgtggtatcggcaaaaaaaaaa

SEQ ID NO: 1190 - protein, 963 aa, Homo sapiens
MLSGERKEGGSPRFGKLHLPVGLWINSPRKQLAKLGRRWPSAASVKSSSSDTGSRSSEPLPPPPPHVELRRVGAVKAAGGASGSRAKRISQLFRGSGTGTTGSSGAGGPGTPGGAQRWASEKKLPELAAGVAPEPPLATRATAPPGVLKIFGAGLASGANYKSVLATARSTARELVAEALERYGLAGSPGGGPGESSCVDAFALCDALGRPAAAGVGSGEWRAEHLRVLGDSERPLLVQELWRARPGWARRFELRGREEARRLEQEAFGAADSEGTGAPSWRPQKNRSRAASGGAALASPGPGTGSGAPAGSGGKERSENLSLRRSVSELSLQGRRRRQQERRQQALSMAPGAADAQIGTADPGDFDQLTQCLIQAPSNRPYFLLLQGYQDAQDFVVYVMTREQHVFGRGGNSSGRGGSPAPYVDTFLNAPDILPRHCTVRAGPEHPAMVRPSRGAPVTHNGCLLLREAELHPGDLLGLGEHFLFMYKDPRTGGSGPARPPWLPARPGATPPGPGWAFSCRLCGRGLQERGEALAAYLDGREPVLRFRPREEEALLGEIVRAAAAGSGDLPPLGPATLLALCVQHSARELELGHLPRLLGRLARLIKEAVWEKIKEIGDRQPENHPEGVPEVPLTPEAVSVELRPLMLWMANTTELLSFVQEKVLEMEKEADQEDPQLCNDLELCDEAMALLDEVIMCTFQQSVYYLTKTLYSTLPALLDSNPFTAGAELPGPGAELGAMPPGLRPTLGVFQAALELTSQCELHPDLVSQTFGYLFFFSNASLLNSLMERGQGRPFYQWSRAVQIRTNLDLVLDWLQGAGLGDIATEFFRKLSMAVNLLCVPRTSLLKASWSSLRTDHPTLTPAQLHHLLSHYQLGPGRGPPAAWDPPPAEREAVDTGDIFESFSSHPPLILPLGSSRLRLTGPVTDDALHRELRRLRRLLWDLEQQELPANYRHGPPVATSP

SEQ ID NO: 1191 - DNA, 1695 bp, Homo sapiens
ggaatatctataaaggaattcgggcccctacgtgagaagctcggagggggtggtttcaggagttccttgtggagaggggatcgtccgtgactcagaccccgtcgaaaagctctcgatttcacgcaaccaaccttaccctcgtccccaacacaatccttgattttacccctgggaaaattagcgtaggtggtcatgaccccggcttcctctttaaaagccctcagaacctggaccgggctcctcaatgaaccctagtgttagaggccacaaatcgggaatcaaggtcggggagcggctgtttagggtgcatcactgttcaggatgcatcggggctcctttttctaagcggaagtgtgcgccctgcaaattggaagcccgttagttttggggaagggtgaacaagggccccctaggtctagaggaccgcatggagtctcgcttaagtgttagtggggtcctcagttctagaaatctgcgttctcctgctctcggtttggggtgagagcacccttcctaacggtcttcgggaactgtgcgcgccggctgcaatggggccgcattttaccctcctgtgtgcggcgctggccggttgcttgcttcctgccgaggggtgtgttatatgtgacccgtctgtcgtgctggcgctaaagtccctggagaaagattacctgcctggccacctggatgcgaagcatcacaaagccatgatggaaagggtagagaatgccgtgaaggatttccaggaactgtcgcttaatgaggatgcctatatgggggtcgttgatgaggccacactgcaaaaggggtcctggagtttgctgaaggatctgaaacgcatcacagacagtgatgtaaaaggcgatctctttgtgaaggagctattttggatgttgcacttgcaaaaggaaacctttgccacctatgttgctcgattccaaaaagaggcttattgtcccaacaaatgtggtgtgatgttgcaaactctgatctggtgcaagaactgcaaaaaggaggttcacgcttgtcgaaagtcctacgattgcggggagcggaatgtggaagttcctcaaatggaagacatgatcctggactgtgagttaaactggcatcaggcttcggaaggcctcactgattacagcttttacagggtttgggggaacaatacggagaccttggtgtccaaggggaaagaggccaccctgaccaagcccatggtgggtccagaggatgcaggcagctaccgctgcgagctgggctctgtgaattccagcccagccacgatcatcaattttcacgtcacagtgttgcccaaaatgatcaaggaggaaaaaccttctccaaatatcgtaaccccgggggaggcgaccacggagtcgtccataagcctccagcctctgcagcccgagaaaatgctggcaagccgccttctggggctgctgatctgcggctccctagcactgataaccggccttacctttgcgatatttcgtcgaaggaaggtgatcgatttcatcaaatcctcactgtttggccttggcagtggagttgccgagcaaacccaggtcccaaaagaaaaggccacagattcgaggcaacaataaagatttatcttgttgtctaaaaaaaaaaaaaaaaaaaaaaaaaaaaaaaaaaaaaaaaaaaaaaaaaaaaaaaaaaaaaaaaaaaaaaaaaaaa

SEQ ID NO: 1192 - protein, 350 aa, Homo sapiens
MGPHFTLLCAALAGCLLPAEGCVICDPSVVLALKSLEKDYLPGHLDAKHHKAMMERVENAVKDFQELSLNEDAYMGVVDEATLQKGSWSLLKDLKRITDSDVKGDLFVKELFWMLHLQKETFATYVARFQKEAYCPNKCGVMLQTLIWCKNCKKEVHACRKSYDCGERNVEVPQMEDMILDCELNWHQASEGLTDYSFYRVWGNNTETLVSKGKEATLTKPMVGPEDAGSYRCELGSVNSSPATIINFHVTVLPKMIKEEKPSPNIVTPGEATTESSISLQPLQPEKMLASRLLGLLICGSLALITGLTFAIFRRRKVIDFIKSSLFGLGSGVAEQTQVPKEKATDSRQQ

SEQ ID NO: 1193 - DNA, 4244 bp, Homo sapiens
gaaagtccctgactggagttggcagccaagccaggccctggagtgggcacccagagggaagacaggttggctaatttcctggagcccctaagggtgcaagggggaagaacacccacccgcaaagccccgtagctggaccctacgttagcctgccctgctcggggttggcgatgctggaggtgggccttggaccagagaaaatgctttaattaggtgacaagcgggcagaggcctttgtctctggagccggcagccacggcccccgctgacggcgtgggaaacagaccctgttccactccggtctccagccttggaatggttgccttcgtgcagtgcaggaggacgcggcagagggcggacgatcgctccactcgccgggaccaggtgcgggggccctgcccagccgctggggcgtggccaggctcgaagcacccaggtgtcgggggccgactctaagccctggcaccggaagagagagggcggcggattggacctcccggctccagcattgcaactgggcgctccgtctcctggtccacgcaatgatggtgcggctgctcagaagccaggtagcctgccctgggtgaagccttcgcgcaggtcaatgacggggcggaggggcagggcgcggtcccctgcatccccgatctggggagcggtgggcccaggggccatcgccttagcccctggcgctggggctcggcgccaagtgacgggcggggctccaccttccagccatccgcccggcccgggagggcggacgctgcgagactcccggccgcgccctctccttcctctcctccccaagccctcgctgccagtccggacaggctgcgcggaggggagggctgccgggccggatagccggacgcctggcgttccaggggcggccggatgtggcctgcctttgcggagggtgcgctccggccacgaaaagcggactgtggatctgccacctgcaagcagctcggccatgtggctccggagccatcgtcagctctgcctggccttcctgctagtctgtgtcctctctgtaatcttcttcctccatatccatcaagacagctttccacatggcctaggcctgtcgatcctgtgtccagaccgccgcctggtgacacccccagtggccatcttctgcctgccgggtactgcgatgggccccaacgcctcctcttcctgtccccagcaccctgcttccctctccggcacctggactgtctaccccaatggccggtttggtaatcagatgggacagtatgccacgctgctggctctggcccagctcaacggccgccgggcctttatcctgcctgccatgcatgccgccctggccccggtattccgcatcaccctgcccgtgctggccccagaagtggacagccgcacgccgtggcgggagctgcagcttcacgactggatgtcggaggagtacgcggacttgagagatcctttcctgaagctctctggcttcccctgctcttggactttcttccaccatctccgggaacagatccgcagagagttcaccctgcacgaccaccttcgggaagaggcgcagagtgtgctgggtcagctccgcctgggccgcacaggggaccgcccgcgcacctttgtcggcgtccacgtgcgccgtggggactatctgcaggttatgcctcagcgctggaagggtgtggtgggcgacagcgcctacctccggcaggccatggactggttccgggcacggcacgaagcccccgttttcgtggtcaccagcaacggcatggagtggtgtaaagaaaacatcgacacctcccagggcgatgtgacgtttgctggcgatggacaggaggctacaccgtggaaagactttgccctgctcacacagtgcaaccacaccattatgaccattggcaccttcggcttctgggctgcctacctggctggcggagacactgtctacctggccaacttcaccctgccagactctgagttcctgaagatctttaagccggaggcggccttcctgcccgagtgggtgggcattaatgcagacttgtctccactctggacattggctaagccttgagagccagggagactttctgaagtagcctgatctttctagagccagcagtacgtggcttcagaggcctggcatcttctggagaagcttgtggtgttcctgaagcaaatgggtgcccgtatccagagtgattctagttgggagagttggagagaagggggacgtttctggaactgtctgaatattctagaactagcaaaacatcttttcctgatggctggcaggcagttctagaagccacagtgcccacctgctcttcccagcccatatctacagtacttccagatggctgcccccaggaatggggaactctccctctggtctactctagaagaggggttacttctcccctgggtcctccaaagactgaaggagcatatgattgctccagagcaagcattcaccaagtccccttctgtgtttctggagtgattctagagggagacttgttctagagaggaccaggtttgatgcctgtgaagaaccctgcagggcccttatggacaggatggggttctggaaatccagataactaaggtgaagaatctttttagttttttttttttttttttggagacagggtctcgctctgttgcccaggctggagtgcagtggcgtgatcttggctcactgcaacttccgcctcctgtgttcaagcgattctcctgtctcagcctcctgagtagatgggactacaggcacaggccattatgcctggctaatttttgtatttttagtagagacagggtttcaccatgttggccaggatggtctcgatctcctgaccttgtcatccacctgtcttggcctcccaaagtgctgggattactggcatgagccactgtgcccagcccggatattttttttttaattatttatttatttatttatttattgagacggagtcttgctctgtagcccaggccagagtgcagtggcgcgatctcagctcactgcaagctctgcctcccgggttcatgccattctgcctcagcctcctgagtagctgggactacaggcgcccgccaccacgcccggctaattttttttgtatttttagtagagacggggtttcatcgtgttaaccaggatggtctcgatctcctgacctcgtgatctgcccacctcggcctcccacagtgctgggattaccggcgtgagccaccatgcctggcccggataattttttttaatttttgtagagacgaggtcttgtgatattgcccaggctgttcttcaactcctgggctcaagcagtcctcccaccttggcctcccagaatgctgggtttatagatgtgagccagcacaccgggccaagtgaagaatctaatgaatgtgcaacctaattgtagcatctaatgaatgttccaccattgctggaaaaattgagatggaaaacaaaccatctctagttggccagcgtcttgctctgttcacagtctctggaaaagctggggtagttggtgagcagagcgggactctgtccaacaagccccacagcccctcaaagacttttttttgtttgttttgagcagacaggctaaaatgtgaacgtggggtgagggatcactgccaaaatggtacagcttctggagcagaactttccagggatccagggacacttttttttaaagctcataaactgccaagagctccatatattgggtgtgagttcaggttgcctctcacaatgaaggaagttggtctttgtctgcaggtgggctgctgagggtctgggatctgttttctggaagtgtgcaggtataaacacaccctctgtgcttgtgacaaactggcaggtaccgtgctcattgctaaccactgtctgtccctgaactcccagaaccactacatctggctttgggcaggtctgagataaaacgatctaaaggtaggcagaccctggacccagcctcagatccaggcaggagcacgaggtctggccaaggtggacggggttgtcgagatctcaggagccccttgctgttttttggagggtgaaagaagaaaccttaaacatagtcagctctgatcacatcccctgtctactcatccagaccccatgcctgtaggcttatcagggagttacagttacaattgttacagtactgttcccaactcagctgccacgggtgagagagcaggaggtatgaattaaaagtctacagcactaa

SEQ ID NO: 1194 - protein, 365 aa, Homo sapiens
MWLRSHRQLCLAFLLVCVLSVIFFLHIHQDSFPHGLGLSILCPDRRLVTPPVAIFCLPGTAMGPNASSSCPQHPASLSGTWTVYPNGRFGNQMGQYATLLALAQLNGRRAFILPAMHAALAPVFRITLPVLAPEVDSRTPWRELQLHDWMSEEYADLRDPFLKLSGFPCSWTFFHHLREQIRREFTLHDHLREEAQSVLGQLRLGRTGDRPRTFVGVHVRRGDYLQVMPQRWKGVVGDSAYLRQAMDWFRARHEAPVFVVTSNGMEWCKENIDTSQGDVTFAGDGQEATPWKDFALLTQCNHTIMTIGTFGFWAAYLAGGDTVYLANFTLPDSEFLKIFKPEAAFLPEWVGINADLSPLWTLAKP

SEQ ID NO: 1195 - DNA, 940 bp, Homo sapiens
ctgtcagctgaggatccagccgaaagaggagccaggcactcaggccacctgagtctactcacctggacaactggaatctggcaccaattctaaaccactcagcttctccgagctcacaccccggagatcacctgaggacccgagccattgatggactcggacgagaccgggttcgagcactcaggactgtgggtttctgtgctggctggtcttctgctgggagcctgccaggcacaccccatccctgactccagtcctctcctgcaattcgggggccaagtccggcagcggtacctctacacagatgatgcccagcagacagaagcccacctggagatcagggaggatgggacggtggggggcgctgctgaccagagccccgaaagtctcctgcagctgaaagccttgaagccgggagttattcaaatcttgggagtcaagacatccaggttcctgtgccagcggccagatggggccctgtatggatcgctccactttgaccctgaggcctgcagcttccgggagctgcttcttgaggacggatacaatgtttaccagtccgaagcccacggcctcccgctgcacctgccagggaacaagtccccacaccgggaccctgcaccccgaggaccagctcgcttcctgccactaccaggcctgccccccgcactcccggagccacccggaatcctggccccccagccccccgatgtgggctcctcggaccctctgagcatggtgggaccttcccagggccgaagccccagctacgcttcctgaagccagaggctgtttactatgacatctcctctttatttattaggttatttatcttatttatttttttatttttcttacttgagataataaagagttccagaggagaaaaaaaaaaaaaaaaaaaaaaaaaaaaaaaaaaaaaaaaaaaaaaaaaaaaaaa

SEQ ID NO: 1196 - protein, 209 aa, Homo sapiens
MDSDETGFEHSGLWVSVLAGLLLGACQAHPIPDSSPLLQFGGQVRQRYLYTDDAQQTEAHLEIREDGTVGGAADQSPESLLQLKALKPGVIQILGVKTSRFLCQRPDGALYGSLHFDPEACSFRELLLEDGYNVYQSEAHGLPLHLPGNKSPHRDPAPRGPARFLPLPGLPPALPEPPGILAPQPPDVGSSDPLSMVGPSQGRSPSYAS

SEQ ID NO: 1197 - DNA, 2722 bp, Homo sapiens
cacagcagcccccgcgcccgccgtgccgccgccgggacgtggggcccttgggccgtcgggccgcctggggagcgccagcccggatccggctgcccagatgcgggcgccactctgcctgctcctgctcgtcgcccacgccgtggacatgctcgccctgaaccgaaggaagaagcaagtgggcactggcctggggggcaactgcacaggctgtatcatctgctcagaggagaacggctgttccacctgccagcagaggctcttcctgttcatccgccgggaaggcatccgccagtacggcaagtgcctgcacgactgtccccctgggtacttcggcatccgcggccaggaggtcaacaggtgcaaaaaatgtggggccacttgtgagagctgcttcagccaggacttctgcatccggtgcaagaggcagttttacttgtacaaggggaagtgtctgcccacctgcccgccgggcactttggcccaccagaacacacgggagtgccagggggagtgtgaactgggtccctggggcggctggagcccctgcacacacaatggaaagacctgcggctcggcttggggcctggagagccgggtacgagaggctggccgggctgggcatgaggaggcagccacctgccaggtgctttctgagtcaaggaaatgtcccatccagaggccctgcccaggagagaggagccccggccagaagaagggcaggaaggaccggcgcccacgcaaggacaggaagctggaccgcaggctggacgtgaggccgcgccagcccggcctgcagccctgaccgccggctctcccgactctctggtcctagtcctcggcccctgcacacctcctcctgctccttctcctcctctcctcttactctttctcctctgtcttctccatttgtcctctctttctttccacccttctatcatttttctgtcagtctaccttccctttctttttcttttttatttcctttatttcttccacctccattctcctctcctttctccctccctccttcccttccttcctcttctttctcacttatcttttatctttccttttctttcttcctgtgtttcttcctgtccttcaccgcatccttctctctctccctcctcttgtctccctctcacacacactttaagagggaccatgagcctgtgccctcccctgcagctttctctatctacaacttaaagaaagcaaacatcttttcccaggcctttccctgaccccatctttgcagagaaagggtttccagagggcaaagctgggacacagcacaggtgaatcctgaaggccctgcttctgctctgggggaggctccaggaccctgagctgtgagcacctggttctctggacagtccccagaggccatttccacagccttcagccaccagccaccccgaggagctggctggacaaggctccagggcttccagaggcctggcttggacacctcccccagctggccgtggagggtcacaacctggcctctgggtgggcagccagccctggagggcatcctctgcaagctgcctgccaccctcatcggcactcccccacaggcctccctctcatgggttccatgcccctttttcccaagccggatcaggtgagctgtcactgctgggggatccacctgcccagcccagaagaggccactgaaacggaaaggaaagctgagattatccagcagctctgttccccacctcagcgcttcctgcccatgtggggaaacaggtctgagaaggaaggggcttgcccagggtcacacaggaagccttcaggctctgcttctgcctgatggctctgctcagcacattcacggtggagaggagaatttgggggtcacttgaggggggaaatgtagggaattgtgggtggggagcaagggaagatccgtgcactcgtccacacccaccaccacactcgctgacacccacccccacacgctgacacccacccccacacttgcccacacccatcaccgcactcgcccacacccaccaccacactgccccacacccaccaccacactcccccacacccaccaccacactcgcccacacccaccaccagtgacttgagcatctgtgcttcgctgtgacgcccctcgccctaggcaggaacgacgctgggaggagtctccaggtcagacccagcttggaagcaagtctgtcctcactgcctatccttctgccatcataacacccccttcctgctctgctccccggaatcctcagaaacgggatttgtatttgccgtgactggttggcctgaacacgtagggctccgtgactgggacaggaatgggcaggagaagcaagagtcggagctccaaggggcccaggggtggcctggggaaggaagatggtcagcaggctgggggagaggctctaggtgatgaaatattacattcccgaccccaagagagcacccaccctcagacctgccctccacctggcagctggggagccctggcctgaacccccccctcccagcaggcccaccctctctctgacttccctgctctcacctccccgagaacagctagagccccctcctccgcctggccaggccaccagcttctcttctgcaaacgtttgtgcctctgaaatgctccgttgttattgtttcaagaccctaacttttttttaaaactttcttaataaagggaaaagaaacttgtaaaaaaaaaaaaaaaaaa

SEQ ID NO: 1198 - protein, 234 aa, Homo sapiens
MRAPLCLLLLVAHAVDMLALNRRKKQVGTGLGGNCTGCIICSEENGCSTCQQRLFLFIRREGIRQYGKCLHDCPPGYFGIRGQEVNRCKKCGATCESCFSQDFCIRCKRQFYLYKGKCLPTCPPGTLAHQNTRECQGECELGPWGGWSPCTHNGKTCGSAWGLESRVREAGRAGHEEAATCQVLSESRKCPIQRPCPGERSPGQKKGRKDRRPRKDRKLDRRLDVRPRQPGLQP

SEQ ID NO: 1199 - DNA, 2536 bp, Homo sapiens
cacagcagcccccgcgcccgccgtgccgccgccgggacgtggggcccttgggccgtcgggccgcctggggagcgccagcccggatccggctgcccagatgcgggcgccactctgcctgctcctgctcgtcgcccacgccgtggacatgctcgccctgaaccgaaggaagaagcaagtgggcactggcctggggggcaactgcacaggctgtatcatctgctcagaggagaacggctgttccacctgccagcagaggctcttcctgttcatccgccgggaaggcatccgccagtacggcaagtgcctgcacgactgtccccctgggtacttcggcatccgcggccaggaggtcaacaggtgcaaaaaatgtggggccacttgtgagagctgcttcagccaggacttctgcatccggtgcaagaggcagttttacttgtacaaggggaagtgtctgcccacctgcccgccgggcactttggcccaccagaacacacgggagtgccaggagaggagccccggccagaagaagggcaggaaggaccggcgcccacgcaaggacaggaagctggaccgcaggctggacgtgaggccgcgccagcccggcctgcagccctgaccgccggctctcccgactctctggtcctagtcctcggcccctgcacacctcctcctgctccttctcctcctctcctcttactctttctcctctgtcttctccatttgtcctctctttctttccacccttctatcatttttctgtcagtctaccttccctttctttttcttttttatttcctttatttcttccacctccattctcctctcctttctccctccctccttcccttccttcctcttctttctcacttatcttttatctttccttttctttcttcctgtgtttcttcctgtccttcaccgcatccttctctctctccctcctcttgtctccctctcacacacactttaagagggaccatgagcctgtgccctcccctgcagctttctctatctacaacttaaagaaagcaaacatcttttcccaggcctttccctgaccccatctttgcagagaaagggtttccagagggcaaagctgggacacagcacaggtgaatcctgaaggccctgcttctgctctgggggaggctccaggaccctgagctgtgagcacctggttctctggacagtccccagaggccatttccacagccttcagccaccagccaccccgaggagctggctggacaaggctccagggcttccagaggcctggcttggacacctcccccagctggccgtggagggtcacaacctggcctctgggtgggcagccagccctggagggcatcctctgcaagctgcctgccaccctcatcggcactcccccacaggcctccctctcatgggttccatgcccctttttcccaagccggatcaggtgagctgtcactgctgggggatccacctgcccagcccagaagaggccactgaaacggaaaggaaagctgagattatccagcagctctgttccccacctcagcgcttcctgcccatgtggggaaacaggtctgagaaggaaggggcttgcccagggtcacacaggaagccttcaggctctgcttctgcctgatggctctgctcagcacattcacggtggagaggagaatttgggggtcacttgaggggggaaatgtagggaattgtgggtggggagcaagggaagatccgtgcactcgtccacacccaccaccacactcgctgacacccacccccacacgctgacacccacccccacacttgcccacacccatcaccgcactcgcccacacccaccaccacactgccccacacccaccaccacactcccccacacccaccaccacactcgcccacacccaccaccagtgacttgagcatctgtgcttcgctgtgacgcccctcgccctaggcaggaacgacgctgggaggagtctccaggtcagacccagcttggaagcaagtctgtcctcactgcctatccttctgccatcataacacccccttcctgctctgctccccggaatcctcagaaacgggatttgtatttgccgtgactggttggcctgaacacgtagggctccgtgactgggacaggaatgggcaggagaagcaagagtcggagctccaaggggcccaggggtggcctggggaaggaagatggtcagcaggctgggggagaggctctaggtgatgaaatattacattcccgaccccaagagagcacccaccctcagacctgccctccacctggcagctggggagccctggcctgaacccccccctcccagcaggcccaccctctctctgacttccctgctctcacctccccgagaacagctagagccccctcctccgcctggccaggccaccagcttctcttctgcaaacgtttgtgcctctgaaatgctccgttgttattgtttcaagaccctaacttttttttaaaactttcttaataaagggaaaagaaacttgtaaaaaaaaaaaaaaaaaa

SEQ ID NO: 1200 - protein, 172 aa, Homo sapiens
MRAPLCLLLLVAHAVDMLALNRRKKQVGTGLGGNCTGCIICSEENGCSTCQQRLFLFIRREGIRQYGKCLHDCPPGYFGIRGQEVNRCKKCGATCESCFSQDFCIRCKRQFYLYKGKCLPTCPPGTLAHQNTRECQERSPGQKKGRKDRRPRKDRKLDRRLDVRPRQPGLQP

SEQ ID NO: 1201 - DNA, 1108 bp, Homo sapiens
attgaatgcagcaagggtctggaggctgaggaccaggcagacaaacattcagagttgctggaatgcgacagagacagggagtcagactggtcatgcaaggtcctgggcctgcccttgggtcctggggagccacggaaggttgtgggtgccagagggttgtggtcagagccacagtcaggggccttctgagacctgtgccccctccccaccctccctccccacctccctaggccagctctggggtctcggcaggtggtccgcgacatgacctccgagttcttctctgcccagctccgggcccagatctctgacgacaccactcacccgatctcctactacaagcccgagttctacatgccggatgacgggggcactgctcacctgtctgtggtcgcagaggacggcagtgctgtgtccgccaccagcaccatcaacctctactttggctccaaggtgcgctccccagtcagcgggatcctgctcaataatgaaatggatgacttcagctctaccagcatcaccaacgagtttggggtacccccctcacctgccaatttcatccagccagggaagcagccgctctcgtccatgtgcccgacgatcatggtgggccaggacggccaggtccggatggtggtgggagctgccgggggcacgcagatcaccatggccactgcactggccatcatctacaacctctggttcggctatgacgtgaagtgggccgtggaggagccccggctgcacaaccagcttctgcccaacgtcacgacagtggagagaaacattgaccaggaagtgactgcagccctggagacccggcaccatcacacccagatcacgtccaccttcattgctgtggtgcaagccatcgtccgcatggctggtggctgggcagctgcctcggactccaggaaaggtggggaacctgctggctactgattgctccaggcggacaaggctgacaagcaatccaggaacaaaatactcaccaggacgaggaagaggactttgggggacaggcttctcctgtgagcagcagagcagcacaataaatgaggccactgtgccaggctccaggtggcctccctggcctgtctccccactc

SEQ ID NO: 1202 - protein, 225 aa, Homo sapiens
MTSEFFSAQLRAQISDDTTHPISYYKPEFYMPDDGGTAHLSVVAEDGSAVSATSTINLYFGSKVRSPVSGILLNNEMDDFSSTSITNEFGVPPSPANFIQPGKQPLSSMCPTIMVGQDGQVRMVVGAAGGTQITMATALAIIYNLWFGYDVKWAVEEPRLHNQLLPNVTTVERNIDQEVTAALETRHHHTQITSTFIAVVQAIVRMAGGWAAASDSRKGGEPAGY

SEQ ID NO: 1203 - DNA, 1049 bp, Homo sapiens
ctcgagagctgggctctgcgtcctcgtccagccgccaactcggccaaaggcgaagccagcagtttcttctgctgccgggcaacgcgccttttaaacctgagggagtgggcgcgtgagcacttaatggcgccggtgacagagtgagcttaacggattaataagcgcagccaggccagctctggggtctcggcaggtggtccgcgacatgacctccgagttcttctctgcccagctccgggcccagatctctgacgacaccactcacccgatctcctactacaagcccgagttctacatgccggatgacgggggcactgctcacctgtctgtggtcgcagaggacggcagtgctgtgtccgccaccagcaccatcaacctctactttggctccaaggtgcgctccccagtcagcgggatcctgctcaataatgaaatggatgacttcagctctaccagcatcaccaacgagtttggggtacccccctcacctgccaatttcatccagccagggaagcagccgctctcgtccatgtgcccgacgatcatggtgggccaggacggccaggtccggatggtggtgggagctgccgggggcacgcagatcaccatggccactgcactggccatcatctacaacctctggttcggctatgacgtgaagtgggccgtggaggagccccggctgcacaaccagcttctgcccaacgtcacgacagtggagagaaacattgaccaggaagtgactgcagccctggagacccggcaccatcacacccagatcacgtccaccttcattgctgtggtgcaagccatcgtccgcatggctggtggctgggcagctgcctcggactccaggaaaggtggggaacctgctggctactgattgctccaggcggacaaggctgacaagcaatccaggaacaaaatactcaccaggacgaggaagaggactttgggggacaggcttctcctgtgagcagcagagcagcacaataaatgaggccactgtgccaggctccaggtggcctccctggcctgtctccccactc

SEQ ID NO: 1204 - protein, 225 aa, Homo sapiens; identical to SEQ ID NO: 1202

SEQ ID NO: 1205 - DNA, 977 bp, Homo sapiens
attgaatgcagcaagggtctggaggctgaggaccaggcagacaaacattcagagttgctggaatgcgacagagacagggagtcagactggtcatgcaaggccagctctggggtctcggcaggtggtccgcgacatgacctccgagttcttctctgcccagctccgggcccagatctctgacgacaccactcacccgatctcctactacaagcccgagttctacatgccggatgacgggggcactgctcacctgtctgtggtcgcagaggacggcagtgctgtgtccgccaccagcaccatcaacctctactttggctccaaggtgcgctccccagtcagcgggatcctgctcaataatgaaatggatgacttcagctctaccagcatcaccaacgagtttggggtacccccctcacctgccaatttcatccagccagggaagcagccgctctcgtccatgtgcccgacgatcatggtgggccaggacggccaggtccggatggtggtgggagctgccgggggcacgcagatcaccatggccactgcactggccatcatctacaacctctggttcggctatgacgtgaagtgggccgtggaggagccccggctgcacaaccagcttctgcccaacgtcacgacagtggagagaaacattgaccaggaagtgactgcagccctggagacccggcaccatcacacccagatcacgtccaccttcattgctgtggtgcaagccatcgtccgcatggctggtggctgggcagctgcctcggactccaggaaaggtggggaacctgctggctactgattgctccaggcggacaaggctgacaagcaatccaggaacaaaatactcaccaggacgaggaagaggactttgggggacaggcttctcctgtgagcagcagagcagcacaataaatgaggccactgtgccaggctccaggtggcctccctggcctgtctccccactc

SEQ ID NO: 1206 - protein, 225 aa, Homo sapiens; identical to SEQ ID NO: 1202

SEQ ID NO: 1207 - DNA, 2437 bp, Homo sapiens
agacactggccgcgggccaccatctggacgcgatcccccgctagggcctccctggtctgggccaaagttggtggccaccttcgcgcgggctgcgccctccttctcttccctgccctcctcccccggggcccgcgcccgctgcctccagcacgcgcgtcggcaggctcggcaagcgaagaggagcggctcgccccagggcgcccctcgcccagcctgccggccaggcgagcgcgacgagagtctccccgcaccccttcctctcccgggggccgagagggttgggctccgccccggcgccgcagctcccgactccccgccgctcgggctgccgccgctgccccgcgcccggcgctcggggcagccgggggcgcaggcggagagcgcagggcggggagaggcgtggggagcagagcggcgctgaggggagggcagaggaggagagagcctggcagcggaggagcagaggcgggcgccgcaccgccccgcacgctcgctcgctcgggagagtcgcgggcggccgcttgggcgcacttgccgggtcaccttgtcccggaggagaaatggcttccctgaggcaagtgtaacctacattcccagcccaccagcctgacgcccagccagggagagagtaccatggatggcatcattgaacagaagagcatgctggtgcacagtaaaatcagtgatgctggcaagaggaatggtttaattaacaccagaaacttgatggccgagagcagagatggtctggtgtctgtttacccagcgccccagtaccagagccaccgggtgggggccagcacagtgccggccagcctggacagcagcaggagtgagccgatgcagcagctgctggaccccaacaccctgcagcagtcagtggagtcccgctaccggcccaacatcatcctctattcagagggcgtgctgcgctcctggggggacggtgtggccgccgactgctgcgagaccaccttcatcgaggaccggtcgcccaccaaagacagcctcgagtacccggatgggaagttcattgacctctcagctgatgacataaaaatccacaccctgtcctacgatgtggaggaggaggaggagttccaggagctggagagcgactactcaagcgacacagagagtgaggacaatttcctcatgatgcccccgcgggaccacctgggcctcagtgtcttctccatgctctgctgcttctggcctctgggcatcgcagccttctacttgtcccatgagaccaacaaagccgtggccaagggggacttgcaccaggccagcaccagctcccggcgggccctattcctggcagtgctgtccatcaccattgggactggcgtctatgtgggcgtggccgtggccctcatcgcctacctctccaagaacaaccacctgtgagcttcctgcgaatggagggggagcacccggggccaggtctgtgtggacgtggaggaagcaggcataccgcatgatgctgtacagtacaaatgattgccaaatgatgccacgaagccctgggatttcctacccatggatttattttgtttttatcctttaatttcatgttcacagcactgtgtagagcaccagacagacgggcactgctaatccttccaaaggaaagctccaaagatcccagcccgcaaggctgtctctggatggattctggtggatgaatggcaacgcggctctctgcagcctgccagtgcccagagtgccaccgcattagcaatatacaaacagtccaaaaaagtgtttattttttatggaatacggtgcaataggcagaggacaagggacacatcactcttctgtctgtggccctgctggagtcctttgtgccccccggagtccacacgccttccctgcaagacgagaatggggctgggaagaaagaggcaacaccacggctggcaggagccccgctgcactgctctgcagacccattggcctgaccctgagaagcagagccagcaaagcccgggacctgcccctctttctttcccttcacaccaccccagcctcaggatgtcaagccacctccggaacgtgtctacactccacagctaccccgcagcaatacgcactcttgggacctcgctgatctaggatggggaggcaggccaccgcccctcccaagactcctcaagaaagagccccgcggttgctccggaaactcgaggcactgcagctatgggcactgcctcagcctaaagacacaggggcgcctcccaatcaccgcgctggcggatgctcaccccgtcataagcagaaactagtgatcctggaaatgagatgggccttactctgtcgactaaatgaatagctattttcttgtcattttttaaagtgcaactcttgcttcatgctgcttaagttaccagatgaatgctgagaaataagtaatcacagacattttaatacc

SEQ ID NO: 1208 - protein, 258 aa, Homo sapiens
MDGIIEQKSMLVHSKISDAGKRNGLINTRNLMAESRDGLVSVYPAPQYQSHRVGASTVPASLDSSRSEPMQQLLDPNTLQQSVESRYRPNIILYSEGVLRSWGDGVAADCCETTFIEDRSPTKDSLEYPDGKFIDLSADDIKIHTLSYDVEEEEEFQELESDYSSDTESEDNFLMMPPRDHLGLSVFSMLCCFWPLGIAAFYLSHETNKAVAKGDLHQASTSSRRALFLAVLSITIGTGVYVGVAVALIAYLSKNNHL

SEQ ID NO: 1209 - DNA, 8197 bp, Homo sapiens
cgttcgggcagcggcctcttgttacccggggcccgcttgcctcagcttcttgctgccgccagcacgctaagctccagtcggcgccgaaggagagcttcccgaccctcgtgtccagtagccgcaatcccaggctgggagggtgaggcgccgcgctctgccgcccccccgcccctcgctccctgtgtcctggcggatttgcacgtaatctatccgaaagcccagtcccacccgccacccgactctggagctcccattcttcaggaccctgctgaagtatcgcttctcagccgccttctccaggcgcagctgcattcgcttctcggtttttgcactcgctgtgcaccgagttactttcccggcccctcgttgacaccgttcacaggtggctgttggtctttagtaagggtgctgtcttccctgtctgatccttagcaaaagtaggaaggtagagttgttggcagaaatcctgggataagagaatagtttcctggaagatctgtgcctccaaccagcagagagggattgagcttcattgaactcaacagagccaacatttcatagcaccatgttcaagaggaggttgaagtggcatggcaatggttagagaccctgctgggcgtgaacaccctctggctacctagggacctgtgggcctaccacctggtgccctcatggagacaagaagccctgggttgaacaacatgaagccccagtcactgcagctggtactggaagagcaggtgctggcactacagcagcagatggcagagaatcaggcagcctcctggcggaagctgaagaactcccaggaggcccagcagagacaagcaacccttgtgaggaagctgcaggccaaggtgctgcagtaccgaagctggtgccaagagctggagaagcggctagaagccactggaggaccaatcccccagaggtgggaaaatgtggaggagccaaacctggatgagctgctggtccgattggaggaggagcaacagaggtgtgagagtctagcagaggtgaacacccagcttcgactgcacatggaaaaagctgacgtggtgaataaagcccttagggaagatgtggaaaaactgacagtggactggagccgggcccgggatgagctaatgaggaaggagagccagtggcagatggagcaggagttcttcaagggctacctgaaaggggagcacggtcgccttctcagtctatggcgggaggttgtgacattccgacgccacttcctggaaatgaagtcagctactgacagagatctgatggagctaaaagctgagcatgtgaggctttcagggtctctgttgacctgttgtctgcgcttgactgtgggagcacagtctcgggaacccaacggatctggaagaatggatgggcgggagccggcccagctgctgctgctactagccaagacccaggagctggagaaggaagcccatgaaaggagccaggagttaatacagctgaagagtcaaggggatctggagaaggctgaacttcaggaccgggtgaccgagctctctgctctgttgacccagtctcagaagcaaaatgaagattatgaaaagatgataaaggctctgagagagacagtggagatcctggagacaaatcacacagaattaatggaacatgaagcatctcttagtaggaatgcgcaagaggagaagttgtctttacagcaggtgatcaaggatataacccaggtcatggtggaagaaggggacaatatagcccaaggctctggtcatgagaactctttggaattggactctagtatcttctcccagtttgattaccaggatgcagacaaggctcttactctggtgcgttcagtgctgactcggagacgccaggctgtgcaggacctaaggcagcagcttgcaggctgtcaagaggctgtgaacttgttgcaacagcagcatgatcagtgggaggaagagggcaaagccttgagacagcggctgcagaagctcactggggagcgggacactctggcagggcagactgtggacctccagggagaggtggactctctcagcaaggagcgagagctgctgcagaaggccagggaagagctgcggcagcagctggaggtgctagagcaggaggcatggcgcctgcgaagggtaaatgtggagcttcagctgcagggggactctgcccagggccagaaggaggaacagcaggaggagctgcacctggctgtccgggagagggagcgtcttcaggagatgctgatgggcctggaagccaaacagtcagaatcactcagtgaactgatcactcttcgggaagccctggagtcaagtcacctggaaggggagttactgaggcaagagcaaacggaagtgaccgcagcgctggctagggcagagcagtcaattgcagagctgtcgagttctgaaaacaccctgaagacagaagtagctgatcttcgggctgcagctgtcaagctcagtgccttaaatgaggctttggcgttagataaagttgggctgaaccagcagcttctccagttagaggaggagaaccagtctgtgtgcagcagaatggaggccgcagagcaggcgagaaatgctttgcaggtcgacctggcggaggcagagaagaggagggaagccctgtgggaaaagaacactcacctggaggctcagctgcagaaagctgaggaggctggggctgagctgcaggcagatctcagggacatccaagaagagaaggaagaaattcaaaagaaactaagtgagtcacgtcaccagcaggaggcagccacgactcagctggagcagctacatcaggaggcaaagcgacaggaagaagtgcttgccagggcagtccaggagaaggaggccctagtacgagagaaagcggctctagaggtgcggctgcaggccgtggagcgtgaccggcaggacctcgctgaacaactacaggggctcagctcagccaaggagctactggagagcagtctgtttgaagcccaacaacaaaattctgtgatagaggtcaccaaggggcagctggaggtccagattcaaactgtcactcaagccaaggaagtaatccaaggggaagtgaggtgcctgaagctggaactggacactgaacggagtcaggcagagcaggagcgggatgctgcagccagacagctggcccaggctgagcaagaagggaagactgccttggagcagcagaaggcagcccatgagaaagaggtgaaccagctccgggagaaatggatgcagctggaaacagagaaggagagagtatccctcctggagacactgctgcagacgcagaaggagctagcagatgccagccaacaactggaacgactgaggcaggacatgaaagtccagaaattaaaggagcaggagaccactgggatactacagacccagctccaggaggctcaacgggagctgaaggaggcagcccggcagcacagagatgaccttgctgccctccaagaagagagcagctccctgctgcaggataagatggacctgcagaagcaggtggaggacttgaagtctcagctggtggcccaggatgactcccagaggctggtggagcaggaggttcaggagaagctgagagagacccaggagtataaccgaattcagaaggagctggagagagagaaagccagcctgactctgtcactgatggaaaaggaacagagactccttgttttacaagaagctgactctattcgacaacaagagctgagtgccctgcgccaggacatgcaggaggcccagggagaacagaaagagctcagtgctcagatggaattactaaggcaagaggtgaaggaaaaggaggctgactttctggcccaggaagcacagctgctggaggagctggaggcgtctcatatcacggagcagcagctgcgagcctccttgtgggcccaggaagccaaggcagcccaactacagctgcgactgcgcagcacagagagccagctagaagcgctggccgcagagcagcagcccgggaaccaggcccaggcccaggcccagctggccagcctctactctgccctgcagcaggccctggggtctgtttgtgagagcaggcctgagctgagtggtgggggagactctgctccttccgtctggggccttgagccagaccagaatggagctaggagcctctttaagagagggcccctgctgactgctctctccgctgaggcagtagcatctgccctccacaagcttcatcaagacctgtggaagactcaacagacccgggatgttctgagggatcaggtccagaaactggaagagcgtctaactgatactgaggctgagaagagccaggtccacacagagttgcaggatctgcagagacagctctcccagaatcaggaagagaaatccaagtgggaaggaaagcagaactccctagaatctgagctgatggaactacatgaaactatggcatccttacagagtcgcctgcggagagcagagctacagcgaatggaagcccagggtgagcgagagttacttcaggcagccaaggagaacctgacagcccaggtggaacacctgcaagcagctgtcgtagaagccagggctcaggcaagtgctgctggcatcctggaagaagacctgagaacggctcgctcagcactgaagctgaaaaatgaggaagtagagagtgagcgtgagagagcccaggctctgcaagagcagggcgaactgaaggtggcccaagggaaggctctgcaagagaatttggccctcctgacccagaccctagctgaaagagaagaggaggtggagactctgcggggacaaatccaggaactggagaagcaacgggaaatgcagaaggctgctttggaattgctgtctctggacctgaagaagaggaaccaagaggtagatctgcagcaagaacagattcaggagctagagaagtgtaggtctgttttagagcatctgcccatggccgtccaggagcgagagcagaagctgactgtgcagagggagcagatcagagagctcgagaaggatcgggagactcagaggaacgtcttggagcatcagcttctagaacttgagaagaaagaccaaatgattgagtcccagagaggacaggttcaggacctgaaaaagcagttggttactctggaatgcctggccctggaactggaggaaaaccatcacaagatggagtgccagcaaaaactgatcaaggagctggagggccagagggaaacccagagagtggctttgacccaccttacgctggacctagaagaaaggagccaggagctgcaggcacaaagcagccagatccatgacctggagagccacagcaccgttctggcaagagagctgcaggagagggaccaggaggtgaagtctcagcgagaacagatcgaggagctgcagaggcagaaagagcatctgactcaggatctcgagaggagagaccaggagctgatgctgcagaaggagaggattcaggttctcgaggatcagaggacccggcagaccaagatcctggaggaggacctggaacagatcaagctgtccttgagagagcgaggccgggagctgaccactcagaggcagctgatgcaggaacgggcagaggaagggaagggcccaagtaaagcacagcgcgggagcctagagcacatgaagctgatcctgcgtgataaggagaaggaggtggaatgtcagcaggagcatatccatgaactccaggagctcaaagaccagctggagcagcagctccagggcctgcacaggaaggtaggtgagaccagcctcctcctgtcccagcgagagcaggaaatagtggtcctgcagcagcaactgcaggaagccagggaacaaggggagctgaaggagcagtcacttcagagtcaactggatgaggcccagagagccctagcccagagggaccaggaactggaggctctgcagcaagaacagcagcaggcccagggacaggaggagagggtgaaggaaaaggcagacgccctccagggagctctggagcaagcccatatgacactgaaggagcgtcatggagagcttcaggaccacaaggaacaggcacgaaggctggaggaagagctggcagtggagggacggcgggtccaggccctggaggaggtgctgggagacctaagggctgagtctcgggaacaggagaaagctctgttggccctccagcagcagtgtgctgagcaggcacaggagcatgaggtggagaccagggccctgcaggacagctggctgcaggcccaggcagtgctcaaggaacgggaccaggagctggaagctctgcgggcagaaagtcagtcctcccggcatcaggaggaggctgcccgggcccgggctgaggctctgcaggaggcccttggcaaggctcatgctgccctgcaggggaaagagcagcatctcctcgagcaggcagaattgagccgcagtctggaggccagcactgcaaccctgcaagcctccctggatgcctgccaggcacacagtcggcagctggaggaggctctgaggatacaagaaggtgagatccaggaccaggatctccgataccaggaggatgtgcagcagctgcagcaggcacttgcccagagggatgaagagctgagacatcagcaggaacgggagcagctgctggagaagtctctggcccagagggtccaagagaatatgatccaagagaagcagaatctggggcaagagagagaagaggaggagataaggggccttcatcagagtgtaagggagctacagctgactctagcccaaaaggaacaggagattctggagctgagggagacccagcaaaggaacaacctggaagccttaccccacagccacaaaacctccccaatggaggaacaatctctaaaacttgattctttagagcccaggctgcagcgggagctggagcggctacaggcagccctgagacagacagaagccagggagattgagtggagggagaaggcccaggacttggcactctccctagcgcagaccaaggccagtgtcagcagtctgcaggaggtagccatgttcctacaagcctctgtcctggagcgggactcagaacagcaaaggctgcaggatgaactggagctcaccagacgggctctggagaaggagcggctacacagcccaggtgcaaccagcacagcagaactggggtccagaggggagcagggtgtgcagctgggagaggtctcaggagtggaggctgagcctagtcctgatggaatggagaagcagtcatggagacaaaggcttgaacacctgcagcaagcagtggcccggctggagattgacaggagcaggctgcagcgccacaatgtccagctgcggagtaccttggagcaggtggagcgagaacggaggaagctgaagagggaggccatgcgtgcggcccaggcagggtccctagagatcagcaaggccacggcttcttcacccacacagcaggatgggagaggacagaagaactcagatgccaagtgtgtggctgaactgcagaaagaggtggtcctgctgcaagctcagctgactttggagcggaagcagaagcaggactacatcacccgctcagcacagaccagccgtgagctagcaggcctgcaccacagcctctcacactcacttcttgccgtggcccaggcccctgaggccactgtcctggaggcagagacccgcaggctggatgagtccctgactcaaagtctgacatccccagggccagtcctgctacaccccagccccagcactacccaagccgcctccaggtagcagccacagccaggagcacacagacagaagactgtgtcatgggtcatggcccctccgcacacctacaggtttgccaaaggaaaagcctggctctgttaggcacccaggagccccaggtcggcgggtgttcccaggaagaggaagtaaatctgcaaccctggggaggaccccaactcacctgggaatgaggcaaattgcatttgcttgctccctatggaatcacccagaggggtgccttgccctggctgagggacatgtactgcctctcatctagaatttattttcctagcacttcaccacctccttcatcttctccttcaacaataaaccctgagatctttgcattcaaaaaaaaaaaaaaaaaa

SEQ ID NO: 1210 - protein, 2386 aa, Homo sapiens
METRSPGLNNMKPQSLQLVLEEQVLALQQQMAENQAASWRKLKNSQEAQQRQATLVRKLQAKVLQYRSWCQELEKRLEATGGPIPQRWENVEEPNLDELLVRLEEEQQRCESLAEVNTQLRLHMEKADVVNKALREDVEKLTVDWSRARDELMRKESQWQMEQEFFKGYLKGEHGRLLSLWREVVTFRRHFLEMKSATDRDLMELKAEHVRLSGSLLTCCLRLTVGAQSREPNGSGRMDGREPAQLLLLLAKTQELEKEAHERSQELIQLKSQGDLEKAELQDRVTELSALLTQSQKQNEDYEKMIKALRETVEILETNHTELMEHEASLSRNAQEEKLSLQQVIKDITQVMVEEGDNIAQGSGHENSLELDSSIFSQFDYQDADKALTLVRSVLTRRRQAVQDLRQQLAGCQEAVNLLQQQHDQWEEEGKALRQRLQKLTGERDTLAGQTVDLQGEVDSLSKERELLQKAREELRQQLEVLEQEAWRLRRVNVELQLQGDSAQGQKEEQQEELHLAVRERERLQEMLMGLEAKQSESLSELITLREALESSHLEGELLRQEQTEVTAALARAEQSIAELSSSENTLKTEVADLRAAAVKLSALNEALALDKVGLNQQLLQLEEENQSVCSRMEAAEQARNALQVDLAEAEKRREALWEKNTHLEAQLQKAEEAGAELQADLRDIQEEKEEIQKKLSESRHQQEAATTQLEQLHQEAKRQEEVLARAVQEKEALVREKAALEVRLQAVERDRQDLAEQLQGLSSAKELLESSLFEAQQQNSVIEVTKGQLEVQIQTVTQAKEVIQGEVRCLKLELDTERSQAEQERDAAARQLAQAEQEGKTALEQQKAAHEKEVNQLREKWMQLETEKERVSLLETLLQTQKELADASQQLERLRQDMKVQKLKEQETTGILQTQLQEAQRELKEAARQHRDDLAALQEESSSLLQDKMDLQKQVEDLKSQLVAQDDSQRLVEQEVQEKLRETQEYNRIQKELEREKASLTLSLMEKEQRLLVLQEADSIRQQELSALRQDMQEAQGEQKELSAQMELLRQEVKEKEADFLAQEAQLLEELEASHITEQQLRASLWAQEAKAAQLQLRLRSTESQLEALAAEQQPGNQAQAQAQLASLYSALQQALGSVCESRPELSGGGDSAPSVWGLEPDQNGARSLFKRGPLLTALSAEAVASALHKLHQDLWKTQQTRDVLRDQVQKLEERLTDTEAEKSQVHTELQDLQRQLSQNQEEKSKWEGKQNSLESELMELHETMASLQSRLRRAELQRMEAQGERELLQAAKENLTAQVEHLQAAVVEARAQASAAGILEEDLRTARSALKLKNEEVESERERAQALQEQGELKVAQGKALQENLALLTQTLAEREEEVETLRGQIQELEKQREMQKAALELLSLDLKKRNQEVDLQQEQIQELEKCRSVLEHLPMAVQEREQKLTVQREQIRELEKDRETQRNVLEHQLLELEKKDQMIESQRGQVQDLKKQLVTLECLALELEENHHKMECQQKLIKELEGQRETQRVALTHLTLDLEERSQELQAQSSQIHDLESHSTVLARELQERDQEVKSQREQIEELQRQKEHLTQDLERRDQELMLQKERIQVLEDQRTRQTKILEEDLEQIKLSLRERGRELTTQRQLMQERAEEGKGPSKAQRGSLEHMKLILRDKEKEVECQQEHIHELQELKDQLEQQLQGLHRKVGETSLLLSQREQEIVVLQQQLQEAREQGELKEQSLQSQLDEAQRALAQRDQELEALQQEQQQAQGQEERVKEKADALQGALEQAHMTLKERHGELQDHKEQARRLEEELAVEGRRVQALEEVLGDLRAESREQEKALLALQQQCAEQAQEHEVETRALQDSWLQAQAVLKERDQELEALRAESQSSRHQEEAARARAEALQEALGKAHAALQGKEQHLLEQAELSRSLEASTATLQASLDACQAHSRQLEEALRIQEGEIQDQDLRYQEDVQQLQQALAQRDEELRHQQEREQLLEKSLAQRVQENMIQEKQNLGQEREEEEIRGLHQSVRELQLTLAQKEQEILELRETQQRNNLEALPHSHKTSPMEEQSLKLDSLEPRLQRELERLQAALRQTEAREIEWREKAQDLALSLAQTKASVSSLQEVAMFLQASVLERDSEQQRLQDELELTRRALEKERLHSPGATSTAELGSRGEQGVQLGEVSGVEAEPSPDGMEKQSWRQRLEHLQQAVARLEIDRSRLQRHNVQLRSTLEQVERERRKLKREAMRAAQAGSLEISKATASSPTQQDGRGQKNSDAKCVAELQKEVVLLQAQLTLERKQKQDYITRSAQTSRELAGLHHSLSHSLLAVAQAPEATVLEAETRRLDESLTQSLTSPGPVLLHPSPSTTQAASR

SEQ ID NO: 1211 - DNA, 8365 bp, Homo sapiens
cgttcgggcagcggcctcttgttacccggggcccgcttgcctcagcttcttgctgccgccagcacgctaagctccagtcggcgccgaaggagagcttcccgaccctcgtgtccagtagccgcaatcccaggctgggagggtgaggcgccgcgctctgccgcccccccgcccctcgctccctgtgtcctggcggatttgcacgtaatctatccgaaagcccagtcccacccgccacccgactctggagctcccattcttcaggaccctgctgaagtatcgcttctcagccgccttctccaggcgcagctgcattcgcttctcggtttttgcactcgctgtgcaccgagttactttcccggcccctcgttgacaccgttcacaggtggctgttggtctttagtaagggtgctgtcttccctgtctgatccttagcaaaagtaggaaggtagagttgttggcagaaatcctgggataagagaatagtttcctggaagatctgtgcctccaaccagcagagagggattgagcttcattgaactcaacagagccaacatttcatagcaccatgttcaagaggaggttgaagtggcatggcaatggttagagaccctgctgggcgtgaacaccctctggctacctagggacctgtgggcctaccacctggtgccctcatggagacaagaagccctgggttgaacaacatgaagccccagtcactgcagctggtactggaagagcaggtgctggcactacagcagcagatggcagagaatcaggcagcctcctggcggaagctgaagaactcccaggaggcccagcagagacaagcaacccttgtgaggaagctgcaggccaaggtgctgcagtaccgaagctggtgccaagagctggagaagcggctagaagccactggaggaccaatcccccagaggtgggaaaatgtggaggagccaaacctggatgagctgctggtccgattggaggaggagcaacagaggtgtgagagtctagcagaggtgaacacccagcttcgactgcacatggaaaaagctgacgtggtgaataaagcccttagggaagatgtggaaaaactgacagtggactggagccgggcccgggatgagctaatgaggaaggagagccagtggcagatggagcaggagttcttcaagggctacctgaaaggggagcacggtcgccttctcagtctatggcgggaggttgtgacattccgacgccacttcctggaaatgaagtcagctactgacagagatctgatggagctaaaagctgagcatgtgaggctttcagggtctctgttgacctgttgtctgcgcttgactgtgggagcacagtctcgggaacccaacggatctggaagaatggatgggcgggagccggcccagctgctgctgctactagccaagacccaggagctggagaaggaagcccatgaaaggagccaggagttaatacagctgaagagtcaaggggatctggagaaggctgaacttcaggaccgggtgaccgagctctctgctctgttgacccagtctcagaagcaaaatgaagattatgaaaagatgataaaggctctgagagagacagtggagatcctggagacaaatcacacagaattaatggaacatgaagcatctcttagtaggaatgcgcaagaggagaagttgtctttacagcaggtgatcaaggatataacccaggtcatggtggaagaaggggacaatatagcccaaggctctggtcatgagaactctttggaattggactctagtatcttctcccagtttgattaccaggatgcagacaaggctcttactctggtgcgttcagtgctgactcggagacgccaggctgtgcaggacctaaggcagcagcttgcaggctgtcaagaggctgtgaacttgttgcaacagcagcatgatcagtgggaggaagagggcaaagccttgagacagcggctgcagaagctcactggggagcgggacactctggcagggcagactgtggacctccagggagaggtggactctctcagcaaggagcgagagctgctgcagaaggccagggaagagctgcggcagcagctggaggtgctagagcaggaggcatggcgcctgcgaagggtaaatgtggagcttcagctgcagggggactctgcccagggccagaaggaggaacagcaggaggagctgcacctggctgtccgggagagggagcgtcttcaggagatgctgatgggcctggaagccaaacagtcagaatcactcagtgaactgatcactcttcgggaagccctggagtcaagtcacctggaaggggagttactgaggcaagagcaaacggaagtgaccgcagcgctggctagggcagagcagtcaattgcagagctgtcgagttctgaaaacaccctgaagacagaagtagctgatcttcgggctgcagctgtcaagctcagtgccttaaatgaggctttggcgttagataaagttgggctgaaccagcagcttctccagttagaggaggagaaccagtctgtgtgcagcagaatggaggccgcagagcaggcgagaaatgctttgcaggtcgacctggcggaggcagagaagaggagggaagccctgtgggaaaagaacactcacctggaggctcagctgcagaaagctgaggaggctggggctgagctgcaggcagatctcagggacatccaagaagagaaggaagaaattcaaaagaaactaagtgagtcacgtcaccagcaggaggcagccacgactcagctggagcagctacatcaggaggcaaagcgacaggaagaagtgcttgccagggcagtccaggagaaggaggccctagtacgagagaaagcggctctagaggtgcggctgcaggccgtggagcgtgaccggcaggacctcgctgaacaactacaggggctcagctcagccaaggagctactggagagcagtctgtttgaagcccaacaacaaaattctgtgatagaggtcaccaaggggcagctggaggtccagattcaaactgtcactcaagccaaggaagtaatccaaggggaagtgaggtgcctgaagctggaactggacactgaacggagtcaggcagagcaggagcgggatgctgcagccagacagctggcccaggctgagcaagaagggaagactgccttggagcagcagaaggcagcccatgagaaagaggtgaaccagctccgggagaaatgggagaaggagcgctcctggcaccagcaggagctggcaaaggctctggagagcttagaaagggaaaaaatggagctggaaatgaggctaaaggagcagcagacagaaatggaggccatccaggcccagagggaagaagaacggacccaggcagagagtgccctatgccagatgcagctggaaacagagaaggagagagtatccctcctggagacactgctgcagacgcagaaggagctagcagatgccagccaacaactggaacgactgaggcaggacatgaaagtccagaaattaaaggagcaggagaccactgggatactacagacccagctccaggaggctcaacgggagctgaaggaggcagcccggcagcacagagatgaccttgctgccctccaagaagagagcagctccctgctgcaggataagatggacctgcagaagcaggtggaggacttgaagtctcagctggtggcccaggatgactcccagaggctggtggagcaggaggttcaggagaagctgagagagacccaggagtataaccgaattcagaaggagctggagagagagaaagccagcctgactctgtcactgatggaaaaggaacagagactccttgttttacaagaagctgactctattcgacaacaagagctgagtgccctgcgccaggacatgcaggaggcccagggagaacagaaagagctcagtgctcagatggaattactaaggcaagaggtgaaggaaaaggaggctgactttctggcccaggaagcacagctgctggaggagctggaggcgtctcatatcacggagcagcagctgcgagcctccttgtgggcccaggaagccaaggcagcccaactacagctgcgactgcgcagcacagagagccagctagaagcgctggccgcagagcagcagcccgggaaccaggcccaggcccaggcccagctggccagcctctactctgccctgcagcaggccctggggtctgtttgtgagagcaggcctgagctgagtggtgggggagactctgctccttccgtctggggccttgagccagaccagaatggagctaggagcctctttaagagagggcccctgctgactgctctctccgctgaggcagtagcatctgccctccacaagcttcatcaagacctgtggaagactcaacagacccgggatgttctgagggatcaggtccagaaactggaagagcgtctaactgatactgaggctgagaagagccaggtccacacagagttgcaggatctgcagagacagctctcccagaatcaggaagagaaatccaagtgggaaggaaagcagaactccctagaatctgagctgatggaactacatgaaactatggcatccttacagagtcgcctgcggagagcagagctacagcgaatggaagcccagggtgagcgagagttacttcaggcagccaaggagaacctgacagcccaggtggaacacctgcaagcagctgtcgtagaagccagggctcaggcaagtgctgctggcatcctggaagaagacctgagaacggctcgctcagcactgaagctgaaaaatgaggaagtagagagtgagcgtgagagagcccaggctctgcaagagcagggcgaactgaaggtggcccaagggaaggctctgcaagagaatttggccctcctgacccagaccctagctgaaagagaagaggaggtggagactctgcggggacaaatccaggaactggagaagcaacgggaaatgcagaaggctgctttggaattgctgtctctggacctgaagaagaggaaccaagaggtagatctgcagcaagaacagattcaggagctagagaagtgtaggtctgttttagagcatctgcccatggccgtccaggagcgagagcagaagctgactgtgcagagggagcagatcagagagctcgagaaggatcgggagactcagaggaacgtcttggagcatcagcttctagaacttgagaagaaagaccaaatgattgagtcccagagaggacaggttcaggacctgaaaaagcagttggttactctggaatgcctggccctggaactggaggaaaaccatcacaagatggagtgccagcaaaaactgatcaaggagctggagggccagagggaaacccagagagtggctttgacccaccttacgctggacctagaagaaaggagccaggagctgcaggcacaaagcagccagatccatgacctggagagccacagcaccgttctggcaagagagctgcaggagagggaccaggaggtgaagtctcagcgagaacagatcgaggagctgcagaggcagaaagagcatctgactcaggatctcgagaggagagaccaggagctgatgctgcagaaggagaggattcaggttctcgaggatcagaggacccggcagaccaagatcctggaggaggacctggaacagatcaagctgtccttgagagagcgaggccgggagctgaccactcagaggcagctgatgcaggaacgggcagaggaagggaagggcccaagtaaagcacagcgcgggagcctagagcacatgaagctgatcctgcgtgataaggagaaggaggtggaatgtcagcaggagcatatccatgaactccaggagctcaaagaccagctggagcagcagctccagggcctgcacaggaaggtaggtgagaccagcctcctcctgtcccagcgagagcaggaaatagtggtcctgcagcagcaactgcaggaagccagggaacaaggggagctgaaggagcagtcacttcagagtcaactggatgaggcccagagagccctagcccagagggaccaggaactggaggctctgcagcaagaacagcagcaggcccagggacaggaggagagggtgaaggaaaaggcagacgccctccagggagctctggagcaagcccatatgacactgaaggagcgtcatggagagcttcaggaccacaaggaacaggcacgaaggctggaggaagagctggcagtggagggacggcgggtccaggccctggaggaggtgctgggagacctaagggctgagtctcgggaacaggagaaagctctgttggccctccagcagcagtgtgctgagcaggcacaggagcatgaggtggagaccagggccctgcaggacagctggctgcaggcccaggcagtgctcaaggaacgggaccaggagctggaagctctgcgggcagaaagtcagtcctcccggcatcaggaggaggctgcccgggcccgggctgaggctctgcaggaggcccttggcaaggctcatgctgccctgcaggggaaagagcagcatctcctcgagcaggcagaattgagccgcagtctggaggccagcactgcaaccctgcaagcctccctggatgcctgccaggcacacagtcggcagctggaggaggctctgaggatacaagaaggtgagatccaggaccaggatctccgataccaggaggatgtgcagcagctgcagcaggcacttgcccagagggatgaagagctgagacatcagcaggaacgggagcagctgctggagaagtctctggcccagagggtccaagagaatatgatccaagagaagcagaatctggggcaagagagagaagaggaggagataaggggccttcatcagagtgtaagggagctacagctgactctagcccaaaaggaacaggagattctggagctgagggagacccagcaaaggaacaacctggaagccttaccccacagccacaaaacctccccaatggaggaacaatctctaaaacttgattctttagagcccaggctgcagcgggagctggagcggctacaggcagccctgagacagacagaagccagggagattgagtggagggagaaggcccaggacttggcactctccctagcgcagaccaaggccagtgtcagcagtctgcaggaggtagccatgttcctacaagcctctgtcctggagcgggactcagaacagcaaaggctgcaggatgaactggagctcaccagacgggctctggagaaggagcggctacacagcccaggtgcaaccagcacagcagaactggggtccagaggggagcagggtgtgcagctgggagaggtctcaggagtggaggctgagcctagtcctgatggaatggagaagcagtcatggagacaaaggcttgaacacctgcagcaagcagtggcccggctggagattgacaggagcaggctgcagcgccacaatgtccagctgcggagtaccttggagcaggtggagcgagaacggaggaagctgaagagggaggccatgcgtgcggcccaggcagggtccctagagatcagcaaggccacggcttcttcacccacacagcaggatgggagaggacagaagaactcagatgccaagtgtgtggctgaactgcagaaagaggtggtcctgctgcaagctcagctgactttggagcggaagcagaagcaggactacatcacccgctcagcacagaccagccgtgagctagcaggcctgcaccacagcctctcacactcacttcttgccgtggcccaggcccctgaggccactgtcctggaggcagagacccgcaggctggatgagtccctgactcaaagtctgacatccccagggccagtcctgctacaccccagccccagcactacccaagccgcctccaggtagcagccacagccaggagcacacagacagaagactgtgtcatgggtcatggcccctccgcacacctacaggtttgccaaaggaaaagcctggctctgttaggcacccaggagccccaggtcggcgggtgttcccaggaagaggaagtaaatctgcaaccctggggaggaccccaactcacctgggaatgaggcaaattgcatttgcttgctccctatggaatcacccagaggggtgccttgccctggctgagggacatgtactgcctctcatctagaatttattttcctagcacttcaccacctccttcatcttctccttcaacaataaaccctgagatctttgcattcaaaaaaaaaaaaaaaaaa

SEQ ID NO: 1212 - protein, 2442 aa, Homo sapiens
METRSPGLNNMKPQSLQLVLEEQVLALQQQMAENQAASWRKLKNSQEAQQRQATLVRKLQAKVLQYRSWCQELEKRLEATGGPIPQRWENVEEPNLDELLVRLEEEQQRCESLAEVNTQLRLHMEKADVVNKALREDVEKLTVDWSRARDELMRKESQWQMEQEFFKGYLKGEHGRLLSLWREVVTFRRHFLEMKSATDRDLMELKAEHVRLSGSLLTCCLRLTVGAQSREPNGSGRMDGREPAQLLLLLAKTQELEKEAHERSQELIQLKSQGDLEKAELQDRVTELSALLTQSQKQNEDYEKMIKALRETVEILETNHTELMEHEASLSRNAQEEKLSLQQVIKDITQVMVEEGDNIAQGSGHENSLELDSSIFSQFDYQDADKALTLVRSVLTRRRQAVQDLRQQLAGCQEAVNLLQQQHDQWEEEGKALRQRLQKLTGERDTLAGQTVDLQGEVDSLSKERELLQKAREELRQQLEVLEQEAWRLRRVNVELQLQGDSAQGQKEEQQEELHLAVRERERLQEMLMGLEAKQSESLSELITLREALESSHLEGELLRQEQTEVTAALARAEQSIAELSSSENTLKTEVADLRAAAVKLSALNEALALDKVGLNQQLLQLEEENQSVCSRMEAAEQARNALQVDLAEAEKRREALWEKNTHLEAQLQKAEEAGAELQADLRDIQEEKEEIQKKLSESRHQQEAATTQLEQLHQEAKRQEEVLARAVQEKEALVREKAALEVRLQAVERDRQDLAEQLQGLSSAKELLESSLFEAQQQNSVIEVTKGQLEVQIQTVTQAKEVIQGEVRCLKLELDTERSQAEQERDAAARQLAQAEQEGKTALEQQKAAHEKEVNQLREKWEKERSWHQQELAKALESLEREKMELEMRLKEQQTEMEAIQAQREEERTQAESALCQMQLETEKERVSLLETLLQTQKELADASQQLERLRQDMKVQKLKEQETTGILQTQLQEAQRELKEAARQHRDDLAALQEESSSLLQDKMDLQKQVEDLKSQLVAQDDSQRLVEQEVQEKLRETQEYNRIQKELEREKASLTLSLMEKEQRLLVLQEADSIRQQELSALRQDMQEAQGEQKELSAQMELLRQEVKEKEADFLAQEAQLLEELEASHITEQQLRASLWAQEAKAAQLQLRLRSTESQLEALAAEQQPGNQAQAQAQLASLYSALQQALGSVCESRPELSGGGDSAPSVWGLEPDQNGARSLFKRGPLLTALSAEAVASALHKLHQDLWKTQQTRDVLRDQVQKLEERLTDTEAEKSQVHTELQDLQRQLSQNQEEKSKWEGKQNSLESELMELHETMASLQSRLRRAELQRMEAQGERELLQAAKENLTAQVEHLQAAVVEARAQASAAGILEEDLRTARSALKLKNEEVESERERAQALQEQGELKVAQGKALQENLALLTQTLAEREEEVETLRGQIQELEKQREMQKAALELLSLDLKKRNQEVDLQQEQIQELEKCRSVLEHLPMAVQEREQKLTVQREQIRELEKDRETQRNVLEHQLLELEKKDQMIESQRGQVQDLKKQLVTLECLALELEENHHKMECQQKLIKELEGQRETQRVALTHLTLDLEERSQELQAQSSQIHDLESHSTVLARELQERDQEVKSQREQIEELQRQKEHLTQDLERRDQELMLQKERIQVLEDQRTRQTKILEEDLEQIKLSLRERGRELTTQRQLMQERAEEGKGPSKAQRGSLEHMKLILRDKEKEVECQQEHIHELQELKDQLEQQLQGLHRKVGETSLLLSQREQEIVVLQQQLQEAREQGELKEQSLQSQLDEAQRALAQRDQELEALQQEQQQAQGQEERVKEKADALQGALEQAHMTLKERHGELQDHKEQARRLEEELAVEGRRVQALEEVLGDLRAESREQEKALLALQQQCAEQAQEHEVETRALQDSWLQAQAVLKERDQELEALRAESQSSRHQEEAARARAEALQEALGKAHAALQGKEQHLLEQAELSRSLEASTATLQASLDACQAHSRQLEEALRIQEGEIQDQDLRYQEDVQQLQQALAQRDEELRHQQEREQLLEKSLAQRVQENMIQEKQNLGQEREEEEIRGLHQSVRELQLTLAQKEQEILELRETQQRNNLEALPHSHKTSPMEEQSLKLDSLEPRLQRELERLQAALRQTEAREIEWREKAQDLALSLAQTKASVSSLQEVAMFLQASVLERDSEQQRLQDELELTRRALEKERLHSPGATSTAELGSRGEQGVQLGEVSGVEAEPSPDGMEKQSWRQRLEHLQQAVARLEIDRSRLQRHNVQLRSTLEQVERERRKLKREAMRAAQAGSLEISKATASSPTQQDGRGQKNSDAKCVAELQKEVVLLQAQLTLERKQKQDYITRSAQTSRELAGLHHSLSHSLLAVAQAPEATVLEAETRRLDESLTQSLTSPGPVLLHPSPSTTQAASR

SEQ ID NO: 1213 - DNA, 637 bp, Homo sapiens
atgcgcgttatgtaccctgggattgccagccctcaggaccccggtacccaactgctgctgcttccatttcagacggttcaggttcctggtggaaccgaagacagcaaagataaggtgctggtgatcagcctctacttcctcaggtatatccaggaaagttggctggagaaccatggtcagtatccgtccttggagtttgtggctctgttgtatgccttgcatacctgtgaccaggtatccttgtttggttttggggaagacaattgcaaaaggtggtcccattactgggatgacaaatattggtttgagaacaccatgcaaaatttcccagcagaataccagatcatcttgaaactgcagtgtgagaggaagattgctgtctacggctgagatgtttccagtggagtccccaggaggcttgacaggtagccaaggggaccttgtggtgtcagagagggactagggcttcaagcagaccctggatggagattactctgctactgaataaaaccctagcttatttctctctctggatttctggtggcattaaagggctacattctattactgattctgtcttatcaccatgtgactctcttatgctgtatcttaccaaaaaataaaattaaatgagaaa

SEQ ID NO: 1214 - protein, 129 aa, Homo sapiens
MRVMYPGIASPQDPGTQLLLLPFQTVQVPGGTEDSKDKVLVISLYFLRYIQESWLENHGQYPSLEFVALLYALHTCDQVSLFGFGEDNCKRWSHYWDDKYWFENTMQNFPAEYQIILKLQCERKIAVYG

SEQ ID NO: 1215 - DNA, 1368 bp, Homo sapiens
gtggctccaggccggaagagggagtctgtaggggcgggccggctggcgtcccctttccggccggtccccatggaggcgctggggaagctgaagcagttcgatgcctaccccaagactttggaggacttccgggtcaagacctgcgggggcgccaccgtgaccattgtcagtggccttctcatgctgctactgttcctgtccgagctgcagtattacctcaccacggaggtgcatcctgagctctacgtggacaagtcgcggggagataaactgaagatcaacatcgatgtactttttccgcacatgccttgtgcctatctgagtattgatgccatggatgtggccggagaacagcagctggatgtggaacacaacctgttcaagcaacgactagataaagatggcatccccgtgagctcagaggctgagcggcatgagcttgggaaagtcgaggtgacggtgtttgaccctgactccctggaccctgatcgctgtgagagctgctatggtgctgaggcagaagatatcaagtgctgtaacacctgtgaagatgtgcgggaggcatatcgccgtagaggctgggccttcaagaacccagatactattgagcagtgccggcgagagggcttcagccagaagatgcaggagcagaagaatgaaggctgccaggtgtatggcttcttggaagtcaataaggtggccggaaacttccactttgcccctgggaagagcttccagcagtcccatgtgcacgtccatgacttgcagagctttggccttgacaacatcaacatgacccactacatccagcacctgtcatttggggaggactatccaggcattgtgaaccccctggaccacaccaatgtcactgcgccccaagcctccatgatgttccagtactttgtgaaggtggtgcccactgtgtacatgaaggtggacggagaggtactgaggacaaatcagttctctgtgaccagacatgagaaggttgccaatgggctgttgggcgaccaaggccttcccggagtcttcgtcctctatgagctctcgcccatgatggtgaagctgacggagaagcacaggtccttcacccacttcctgacaggtgtgtgcgccatcattgggggcatgttcacagtggctggactcatcgattcgctcatctaccactcagcacgagccatccagaagaaaattgatctagggaagacaacgtagtcaccctcggtgcttcctctgtctcctctttctccctggcctgtggttgtcccccagcctctgccaccctccacctcctcggtcagccccagccccaggttgataaatctattgattgattgtgatagtaaaaaaaaaaaaaaaaaa

SEQ ID NO: 1216 - protein, 383 aa, Homo sapiens
MEALGKLKQFDAYPKTLEDFRVKTCGGATVTIVSGLLMLLLFLSELQYYLTTEVHPELYVDKSRGDKLKINIDVLFPHMPCAYLSIDAMDVAGEQQLDVEHNLFKQRLDKDGIPVSSEAERHELGKVEVTVFDPDSLDPDRCESCYGAEAEDIKCCNTCEDVREAYRRRGWAFKNPDTIEQCRREGFSQKMQEQKNEGCQVYGFLEVNKVAGNFHFAPGKSFQQSHVHVHDLQSFGLDNINMTHYIQHLSFGEDYPGIVNPLDHTNVTAPQASMMFQYFVKVVPTVYMKVDGEVLRTNQFSVTRHEKVANGLLGDQGLPGVFVLYELSPMMVKLTEKHRSFTHFLTGVCAIIGGMFTVAGLIDSLIYHSARAIQKKIDLGKTT

SEQ ID NO: 1217 - DNA, 1383 bp, Homo sapiens
gtggctccaggccggaagagggagtctgtaggggcgggccggctggcgtcccctttccggccggtccccatggaggcgctggggaagctgaagcagttcgatgcctaccccaagactttggaggacttccgggtcaagacctgcgggggcgccaccgtgaccattgtcagtggccttctcatgctgctactgttcctgtccgagctgcagtattacctcaccacggaggtgcatcctgagctctacgtggacaagtcgcggggagataaactgaagatcaacatcgatgtactttttccgcacatgccttgtgcctatctgagtattgatgccatggatgtggccggagaacagcagctggatgtggaacacaacctgttcaagcaacgactagataaagatggcatccccgtgagctcagaggctgagcggcatgagcttgggaaagtcgaggtgacggtgtttgaccctgactccctggaccctgatcgctgtgagagctgctatggtgctgaggcagaagatatcaagtgctgtaacacctgtgaagatgtgcgggaggcatatcgccgtagaggctgggccttcaagaacccagatactattgagcagtgccggcgagagggcttcagccagaagatgcaggagcagaagaatgaaggctgccaggtgtatggcttcttggaagtcaataaggtggccggaaacttccactttgcccctgggaagagcttccagcagtcccatgtgcacgtacatgctgtggagatccatgacttgcagagctttggccttgacaacatcaacatgacccactacatccagcacctgtcatttggggaggactatccaggcattgtgaaccccctggaccacaccaatgtcactgcgccccaagcctccatgatgttccagtactttgtgaaggtggtgcccactgtgtacatgaaggtggacggagaggtactgaggacaaatcagttctctgtgaccagacatgagaaggttgccaatgggctgttgggcgaccaaggccttcccggagtcttcgtcctctatgagctctcgcccatgatggtgaagctgacggagaagcacaggtccttcacccacttcctgacaggtgtgtgcgccatcattgggggcatgttcacagtggctggactcatcgattcgctcatctaccactcagcacgagccatccagaagaaaattgatctagggaagacaacgtagtcaccctcggtgcttcctctgtctcctctttctccctggcctgtggttgtcccccagcctctgccaccctccacctcctcggtcagccccagccccaggttgataaatctattgattgattgtgatagtaaaaaaaaaaaaaaaaaa

SEQ ID NO: 1218 - protein, 388 aa, Homo sapiens
MEALGKLKQFDAYPKTLEDFRVKTCGGATVTIVSGLLMLLLFLSELQYYLTTEVHPELYVDKSRGDKLKINIDVLFPHMPCAYLSIDAMDVAGEQQLDVEHNLFKQRLDKDGIPVSSEAERHELGKVEVTVFDPDSLDPDRCESCYGAEAEDIKCCNTCEDVREAYRRRGWAFKNPDTIEQCRREGFSQKMQEQKNEGCQVYGFLEVNKVAGNFHFAPGKSFQQSHVHVHAVEIHDLQSFGLDNINMTHYIQHLSFGEDYPGIVNPLDHTNVTAPQASMMFQYFVKVVPTVYMKVDGEVLRTNQFSVTRHEKVANGLLGDQGLPGVFVLYELSPMMVKLTEKHRSFTHFLTGVCAIIGGMFTVAGLIDSLIYHSARAIQKKIDLGKTT

SEQ ID NO: 1219 - DNA, 4024 bp, Homo sapiens
tgcccctctgtcactgcaagccatgcatgcatgtgtggagttgctgggaggaccacacctggcgcctgcagagcagcaactgcgtgcgcaaagtggccgagaggctggaccaggggctgcaggaggttgagagactgcagcgcaagccggggcctggcgcctgtgcacagctcaagcaggcactggaagtgctggtggctgggagcagacagttttgccacggtgccgagcgcaggacgatgacccggcccaatgccctggatcgatgccgagggaaactcctggtgcacagcctgaaccttttggctaagcaaggactgcgacttctacgcagcctgagacggcgcaatgtgcaaaagaaggtggcactggccaagaagctcctggcaaaactgcgctttctggctgaggagcacaactttgatgaagatgaaatggatgatcctggagattcagatggggtcaacctcatttctatggttggggagatccaagaccagggtgaggctgaagtcaaaggcactgtgtccccaaaaaaagcagttgccaccctgaagatctacaacaggtccctggaggaagaatttaaccactttgaagactggctgaatgtgtttcctctgtaccgagggcaagggggccaggatggaggtggagaagaggaaggatctggacaccttgtgggcaagttcaagggctccttcctcatttaccctgaatcagaggcagtgttgttctctgagccccagatctcccgggggatcccacagaaccggcccatcaagctcctggtcagagtgtatgttgtaaagctaagaaacctttgcaaaatccaaggtcatgaagacttttgcctgttttctgctgctaccaacctggctcctgcagaccccaatggcaaagcagacccttacgtggtggtgagcgctggccgggagcggcaggacaccaaggaacgctacatccccaagcagctcaaccccatctttggagagatcctggagctaagcatctctctcccagctgagacggagctgacggtcgccgtatttgatcatgacctcgtgggttctgacgacctcatcggggagacccacattgatctggaaaaccgattctatagccaccacagagcaaactgtggactggcctcccagtatgaagtgtgggtccagcagggcccacaggagccattctgagtttctggccaaacacattcaagctcacattcccttttgtgtctccagatcctatgatttcatggaaggggaccctcccacccaccgccactgccaaccaagacatagctcagtggtcaagacttgggcttgggagtcgggatcctgtaacgaatgtcacttgaccgctttctttttttatgaaacagtctcgctctgtctcccaggttggagtgcagtggcacgatctcggctgactgcaacctccacctcctgggttcaagcgattctcctgcctcagcctccccagtagctgggattacaggcgtgggcccccatgtccagctaatttttatattttcgctctgtctcccaggttggagtgcagtggcacgatctcggctgactgcaacctccacctcctgggttcaagcgattctcctgcctcagcctccccagtagctgggattacaggcgtgggcccccatgtccagctaatttttatatttttagtagagacagggtttcaccatgttgtccaggctggtcttgaacccctgacctcaagtgatccacccacctctgcctcccaaagtgctgggattacaggtgtgagccaccatgccaggcccacttaacctcttcaagtctgttttctcatctgcaaaacagaggtaataagatcagtatcttcttaatggaagcacctggactacatttttttcattcattgttatcataaatgaggactaacctgtctcccgttgggagttttgaacctagacctcatgtcttcatgacgtcatcactgccccaggcccagctgtgtccctacaccagccccagctgacgcatcttctttttctgcctgtagagatggttacaatgcctggcgtgatgcattctggccttcgcagatcctggcggggctgtgccaacgctgtggcctccctgcccctgaataccgagccggtgctgtcaaggtgggcagcaaagtcttcctgacaccaccggagaccctgcccccagggatctcttcacatgtggattgacatctttcctcaagatgtgcctgctccacccccagttgacatcaagcctcggcagccaatcagctatgagctcagagttgtcatctggaacacggaggatgtggttctggatgacgagaatccactcaccggagagatgtcgagtgccatctatgtgaagaggtaggctgctggccgggcggggcaacggcggtgcactagggggattgcaaatgggtgtgggccctcgggctgagtccagagccccgaccccaggccctccgtggtgctgagagcggggtgaggagtgggttctccatgtagctccagccctgacgctcacccaccccggccccagctgggtgaaggggttggagcatgacaagcaggagacagacgttcacttcaactccctgactggggaggggaacttcaattggcgctttgtgttccgctttgactacctgcccacggagcgggaggtgagcatccggcgcaggtctggaccctttgccctggaggaggcggagttccggcagcctgcagtgctggtcctgcaggtctgggactatgaccgcatctctgccaatgacttccttggtattacaatgcttagccttccccaccctcagcccctgcctccagccctcacctccgcccctgcctccagccctcacttccgtcccccagttccctactctgacccaaccttgaatcttgggattttggacccgaggtgtgaaacctttgctttctggcctaattactgagttaattaggcctagaccacagtaacctccattcccacccagagtctctgattcaactctgatttgaccctagcttgtcaccctgacaccgactccacagcctttggtccttggcactctgatcccgacccttggccctcttccactgggaagtagcaatgggtggaccgctgggctgtggtctgggtggtctatagctgtggcctgaccgcacactgcaacaactttcaatgccccaatttacaaccttggtgtgttgcctcctcacccctggcacaatgagactttgatcccatgcctaatctggtgtgctctggacttgcaggatccctggagttgcagctaccagacatggtgcgtggggcccggggccccgagctctgctctgtgcagctggcccgcaatggggccgggccgaggtgcaatctgtttcgctgccgccgcctgaggggctggtggccggtagtgaagctgaaggaggcagaggacgtggagcgggaggcgcaggaggctcaggctggcaagaagaagcgaaagcagaggaggaggaagggccggccagaagacctggagttcacagacatgggtggcaatgtgtacatcctcacgggcaaggtggaggcagagtttgagctgctgactgtggaggaggccgagaaacggccagtggggaaggggcggaagcagccagagcctctggagaaacccagccgccccaaaacttccttcaactggtttgtgaacccgctgaaggcctttgtcttcttcatctggcgccggtactggcgcaccctggtgctgctgctactggtgctgctcaccgtcttcctcctcctggtcttctacaccatccctggccagatcagccaggtcatcttccgtcccctccacaagtgactctcgctgaccttggacactcacccagggtgccaacccttcaatgcctgctcctggaagtctttcttacccatgtgagctaccccagagtctagtgcttcctctgaataaacctatcacagccactgaaaaaaaaaaaaaaaaaaaa

SEQ ID NO: 1220 - DNA, 1452 bp, Homo sapiens
cgacttcacgcagggtccgtggggtccccgcggcgcgcagcggctgaaggaggccccagggccttggcgaccgcagcggcggctttagcgtcagtgactaggcagcagggggtcaggatgcggcgaagctcccgcccgggctcggcctcgtcctcgcgcaagcacacgcccaactttttcagcgagaacagctcaatgagcatcacctcggaggacagcaaagggctccggtcagcggagcccgggcctggggagcccgagggcagaagagcccggggcccgagctgcggtgagcccgccttgagcgcgggagtgcccggaggaaccacatgggcaggaagctctcagcagaagccagcgcctcggagccacaactggcagacagcctgtggcgcggcaaccgtgaggggcggggcctcggaaccgactgggtctccagtagtctctgaggagccgctcgaccttctcccgaccctggatctgaggcaggagatgcctcccccgcgggtgttcaagagctttctgagcctgctcttccaggggctgagcgtgttgttatccctggcaggagacgtgctggtcagcatgtacagggaggtctgttccatccgcttcctgttcacggctgtgtcgctgctgagcctctttctgtcagcattctggctggggcttctgtacctggtctctcctttggagaatgaacctaaggagatgctgactctaagtgagtaccacgagcgcgtgcgctcccaggggcagcagctgcagcagctccaggccgagctggataaactccacaaggaggtgtccactgttcgggcagccaacagcgagagagtggccaagctcgtgttccagaggctgaatgaggattttgtgcggaagcccgactatgctttgagctctgtgggagcctccatcgacctgcagaagacatcccacgattacgcagacaggaacactgcctacttctggaatcgcttcagcttctggaactacgcacggccgcccacggttatcctggagccccacgtgttccctgggaattgctgggcttttgaaggcgaccaaggccaggtggtgatccaactgccgggccgagtgcagctgagcgacatcactctgcagcatccaccgcccagcgtggagcacaccggaggagccaacagcgccccccgcgatttcgcggtctttggcctccaggtttatgatgaaactgaagtttccttggggaaattcaccttcgatgttgagaaatcggagattcagactttccacctgcagaatgaccccccagctgcctttcccaaggtgaagatccagattctaagcaactggggccacccccgtttcacgtgcttgtatcgagtccgtgcccacggtgtgcgaacctcagagggggcagagggcagtgcacaggggccccattaaacatgctgatttttggagtag

SEQ ID NO: 1221 - protein, 437 aa, Homo sapiens
MRRSSRPGSASSSRKHTPNFFSENSSMSITSEDSKGLRSAEPGPGEPEGRRARGPSCGEPALSAGVPGGTTWAGSSQQKPAPRSHNWQTACGAATVRGGASEPTGSPVVSEEPLDLLPTLDLRQEMPPPRVFKSFLSLLFQGLSVLLSLAGDVLVSMYREVCSIRFLFTAVSLLSLFLSAFWLGLLYLVSPLENEPKEMLTLSEYHERVRSQGQQLQQLQAELDKLHKEVSTVRAANSERVAKLVFQRLNEDFVRKPDYALSSVGASIDLQKTSHDYADRNTAYFWNRFSFWNYARPPTVILEPHVFPGNCWAFEGDQGQVVIQLPGRVQLSDITLQHPPPSVEHTGGANSAPRDFAVFGLQVYDETEVSLGKFTFDVEKSEIQTFHLQNDPPAAFPKVKIQILSNWGHPRFTCLYRVRAHGVRTSEGAEGSAQGPH

SEQ ID NO: 1222 - DNA, 2211 bp, Homo sapiens
ggcgaaggctttgtagagttcagaaatgaggctgactataaggctgctctgtgtcgtcataaacagtacatgggcaatcgctttattcaagttcatccaattactaagaaaggtatgctagaaaagatagatatgattcgaaaaagactgcagaacttcagctatgaccagagggaaatgatactaaatccagagggggatgtcaactctgccaaagtctgtgcccacataacaaatattccattcagcattacaaagatggatgttcttcagttcctagaaggaatcccagtggatgaaaatgctgtacatgttcttgttgataacaatgggcaaggtctaggacaggcattggttcagtttaaaaatgaagatgatgcacatggcccactgcgtgaccttggttcagctgtccatttcctgtgaccatctcattgacaaggacatcggctccaagtctgacccactctgcgtccttttacaggatgtgggagggggcagctgggctgagcttggccggactgaacgggtgcggaactgctcaagccctgagttctccaagactctacagcttgagtaccgctttgagacagtccagaagctacgctttggaatctatgacatagacaacaagacgccagagctgagggatgatgacttcctagggggtgctgagtgttccctaggacagattgtgtccagccaggtactgactctccccttgatgctgaagcctggaaaacctgctgggcgggggaccatcacggtctcagctcaggaattaaaggacaatcgtgtagtaaccatggaggtagaggccagaaacctagataagaaggacttcctgggaaaatcagatccatttctggagttcttccgccagggtgatgggaaatggcacctggtgtacagatctgaggtcatcaagaacaacctgaaccctacatggaagcgtttctcagtccccgttcagcatttctgtggtgggaaccccagcacacccatccaggtgcaatgctccgattatgacagtgacgggtcacatgatctcatcggtaccttccacaccagcttggcccagctgcaggcagtcccggctgagtttgaatgcatccaccctgagaagcagcagaaaaagaaaagctacaagaactctggaactatccgtgtcaagatttgtcgggtagaaacagagtactcctttctggactatgtgatgggaggctgtcagatcaacttcactgtgggcgtggacttcactggctccaatggagacccctcctcacctgactccctacactacctgagtccaacaggggtcaatgagtacctgatggcactgtggagtgtgggcagcgtggttcaggactatgactcagacaagctgttccctgcatttggatttggggcccaggttccccctgactggcaggtctcgcatgaatttgccttgaatttcaaccccagtaacccctactgtgcaggcatccagggcattgtggatgcctaccgccaagccctgccccaagttcgcctctatggccctaccaactttgcacccatcatcaaccatgtggccaggtttgcagcccaggctgcacatcaggggactgcctcgcaatacttcatgctgttgctgctgactgatggtgctgtgacggatgtggaagccacacgtgaggctgtggtgcgtgcctcgaacctgcccatgtcagtgatcattgtgggtgtgggtggtgctgactttgaggccatggagcagctggacgctgatggtggacccctgcatacacgttctgggcaggctgctgcccgcgacattgtgcagtttgtaccctaccgccggttccagaatgcccctcgggaggcattggcacagaccgtgctcgcagaagtgcccacacaactggtctcatacttcagggcccagggttgggccccgctcaagccacttccaccctcagccaaggatcctgcacaggccccccaggcctaggttcccttggaggctgtggcaagtcctcaatcctgtgtcccagaggtccctctgggccacaacccaacccttctcactctcctcagtgctagcactttgtattttttgatacttttatacttgtttctgcttttgctgctcttgatcccacctttgctcctgacaaccctcattcaataaagaccagtgaagaccaaaaaaaaaaaaaaaaaaaa

SEQ ID NO: 1223 - protein, 537 aa, Homo sapiens
MAHCVTLVQLSISCDHLIDKDIGSKSDPLCVLLQDVGGGSWAELGRTERVRNCSSPEFSKTLQLEYRFETVQKLRFGIYDIDNKTPELRDDDFLGGAECSLGQIVSSQVLTLPLMLKPGKPAGRGTITVSAQELKDNRVVTMEVEARNLDKKDFLGKSDPFLEFFRQGDGKWHLVYRSEVIKNNLNPTWKRFSVPVQHFCGGNPSTPIQVQCSDYDSDGSHDLIGTFHTSLAQLQAVPAEFECIHPEKQQKKKSYKNSGTIRVKICRVETEYSFLDYVMGGCQINFTVGVDFTGSNGDPSSPDSLHYLSPTGVNEYLMALWSVGSVVQDYDSDKLFPAFGFGAQVPPDWQVSHEFALNFNPSNPYCAGIQGIVDAYRQALPQVRLYGPTNFAPIINHVARFAAQAAHQGTASQYFMLLLLTDGAVTDVEATREAVVRASNLPMSVIIVGVGGADFEAMEQLDADGGPLHTRSGQAAARDIVQFVPYRRFQNAPREALAQTVLAEVPTQLVSYFRAQGWAPLKPLPPSAKDPAQAPQA

SEQ ID NO: 1224 - DNA, 1996 bp, Homo sapiens
cggagccgctgagcgggccgacggccattttgtgaagcggcgaaggaggtggtggctgcgttgggctccgggaagccgttcgggctggggctgtcggccgcggggcggaggcactcgcgcggggggtaattcggggtctgggttctggtgccgcgcagctttccccgatggcccactgcgtgaccttggttcagctgtccatttcctgtgaccatctcattgacaaggacatcggctccaagtctgacccactctgcgtccttttacaggatgtgggagggggcagctgggctgagcttggccggactgaacgggtgcggaactgctcaagccctgagttctccaagactctacagcttgagtaccgctttgagacagtccagaagctacgctttggaatctatgacatagacaacaagacgccagagctgagggatgatgacttcctagggggtgctgagtgttccctaggacagattgtgtccagccaggtactgactctccccttgatgctgaagcctggaaaacctgctgggcgggggaccatcacggtctcagctcaggaattaaaggacaatcgtgtagtaaccatggaggtagaggccagaaacctagataagaaggacttcctgggaaaatcagatccatttctggagttcttccgccagggtgatgggaaatggcacctggtgtacagatctgaggtcatcaagaacaacctgaaccctacatggaagcgtttctcagtccccgttcagcatttctgtggtgggaaccccagcacacccatccaggtgcaatgctccgattatgacagtgacgggtcacatgatctcatcggtaccttccacaccagcttggcccagctgcaggcagtcccggctgagtttgaatgcatccaccctgagaagcagcagaaaaagaaaagctacaagaactctggaactatccgtgtcaagatttgtcgggtagaaacagagtactcctttctggactatgtgatgggaggctgtcagatcaacttcactgtgggcgtggacttcactggctccaatggagacccctcctcacctgactccctacactacctgagtccaacaggggtcaatgagtacctgatggcactgtggagtgtgggcagcgtggttcaggactatgactcagacaagctgttccctgcatttggatttggggcccaggttccccctgactggcaggtctcgcatgaatttgccttgaatttcaaccccagtaacccctactgtgcaggcatccagggcattgtggatgcctaccgccaagccctgccccaagttcgcctctatggccctaccaactttgcacccatcatcaaccatgtggccaggtttgcagcccaggctgcacatcaggggactgcctcgcaatacttcatgctgttgctgctgactgatggtgctgtgacggatgtggaagccacacgtgaggctgtggtgcgtgcctcgaacctgcccatgtcagtgatcattgtgggtgtgggtggtgctgactttgaggccatggagcagctggacgctgatggtggacccctgcatacacgttctgggcaggctgctgcccgcgacattgtgcagtttgtaccctaccgccggttccagaatgcccctcgggaggcattggcacagaccgtgctcgcagaagtgcccacacaactggtctcatacttcagggcccagggttgggccccgctcaagccacttccaccctcagccaaggatcctgcacaggccccccaggcctaggttcccttggaggctgtggcaagtcctcaatcctgtgtcccagaggtccctctgggccacaacccaacccttctcactctcctcagtgctagcactttgtattttttgatacttttatacttgtttctgcttttgctgctcttgatcccacctttgctcctgacaaccctcattcaataaagaccagtgaagaccaaaaaaaaaaaaaaaaaaaa

SEQ ID NO: 1225 - protein, 537 aa, Homo sapiens; identical to SEQ ID NO: 1223

SEQ ID NO: 1226 - DNA, 1954 bp, Homo sapiens
cggagccgctgagcgggccgacggccattttgtgaagcggcgaaggaggtggtggctgcgttgggctccgggaagccgttcgggctggggctgtcggccgcggggcggaggcactcgcgcgggggatggcccactgcgtgaccttggttcagctgtccatttcctgtgaccatctcattgacaaggacatcggctccaagtctgacccactctgcgtccttttacaggatgtgggagggggcagctgggctgagcttggccggactgaacgggtgcggaactgctcaagccctgagttctccaagactctacagcttgagtaccgctttgagacagtccagaagctacgctttggaatctatgacatagacaacaagacgccagagctgagggatgatgacttcctagggggtgctgagtgttccctaggacagattgtgtccagccaggtactgactctccccttgatgctgaagcctggaaaacctgctgggcgggggaccatcacggtctcagctcaggaattaaaggacaatcgtgtagtaaccatggaggtagaggccagaaacctagataagaaggacttcctgggaaaatcagatccatttctggagttcttccgccagggtgatgggaaatggcacctggtgtacagatctgaggtcatcaagaacaacctgaaccctacatggaagcgtttctcagtccccgttcagcatttctgtggtgggaaccccagcacacccatccaggtgcaatgctccgattatgacagtgacgggtcacatgatctcatcggtaccttccacaccagcttggcccagctgcaggcagtcccggctgagtttgaatgcatccaccctgagaagcagcagaaaaagaaaagctacaagaactctggaactatccgtgtcaagatttgtcgggtagaaacagagtactcctttctggactatgtgatgggaggctgtcagatcaacttcactgtgggcgtggacttcactggctccaatggagacccctcctcacctgactccctacactacctgagtccaacaggggtcaatgagtacctgatggcactgtggagtgtgggcagcgtggttcaggactatgactcagacaagctgttccctgcatttggatttggggcccaggttccccctgactggcaggtctcgcatgaatttgccttgaatttcaaccccagtaacccctactgtgcaggcatccagggcattgtggatgcctaccgccaagccctgccccaagttcgcctctatggccctaccaactttgcacccatcatcaaccatgtggccaggtttgcagcccaggctgcacatcaggggactgcctcgcaatacttcatgctgttgctgctgactgatggtgctgtgacggatgtggaagccacacgtgaggctgtggtgcgtgcctcgaacctgcccatgtcagtgatcattgtgggtgtgggtggtgctgactttgaggccatggagcagctggacgctgatggtggacccctgcatacacgttctgggcaggctgctgcccgcgacattgtgcagtttgtaccctaccgccggttccagaatgcccctcgggaggcattggcacagaccgtgctcgcagaagtgcccacacaactggtctcatacttcagggcccagggttgggccccgctcaagccacttccaccctcagccaaggatcctgcacaggccccccaggcctaggttcccttggaggctgtggcaagtcctcaatcctgtgtcccagaggtccctctgggccacaacccaacccttctcactctcctcagtgctagcactttgtattttttgatacttttatacttgtttctgcttttgctgctcttgatcccacctttgctcctgacaaccctcattcaataaagaccagtgaagaccaaaaaaaaaaaaaaaaaaaa

SEQ ID NO: 1227 - protein, 537 aa, Homo sapiens; identical to SEQ ID NO: 1223

SEQ ID NO: 1228 - DNA, 2081 bp, Homo sapiens
cggagccgctgagcgggccgacggccattttgtgaagcggcgaaggaggtggtggctgcgttgggctccgggaagccgttcgggctggggctgtcggccgcggggcggaggcactcgcgcggggggtaattcggggtctgggttctggtgccgcgcagctttccccgtctaaaagttggttttaattggttgcccacaggattgacttggcctctacttcttgttaaggaaattcatctcttgttttatcagatggcccactgcgtgaccttggttcagctgtccatttcctgtgaccatctcattgacaaggacatcggctccaagtctgacccactctgcgtccttttacaggatgtgggagggggcagctgggctgagcttggccggactgaacgggtgcggaactgctcaagccctgagttctccaagactctacagcttgagtaccgctttgagacagtccagaagctacgctttggaatctatgacatagacaacaagacgccagagctgagggatgatgacttcctagggggtgctgagtgttccctaggacagattgtgtccagccaggtactgactctccccttgatgctgaagcctggaaaacctgctgggcgggggaccatcacggtctcagctcaggaattaaaggacaatcgtgtagtaaccatggaggtagaggccagaaacctagataagaaggacttcctgggaaaatcagatccatttctggagttcttccgccagggtgatgggaaatggcacctggtgtacagatctgaggtcatcaagaacaacctgaaccctacatggaagcgtttctcagtccccgttcagcatttctgtggtgggaaccccagcacacccatccaggtgcaatgctccgattatgacagtgacgggtcacatgatctcatcggtaccttccacaccagcttggcccagctgcaggcagtcccggctgagtttgaatgcatccaccctgagaagcagcagaaaaagaaaagctacaagaactctggaactatccgtgtcaagatttgtcgggtagaaacagagtactcctttctggactatgtgatgggaggctgtcagatcaacttcactgtgggcgtggacttcactggctccaatggagacccctcctcacctgactccctacactacctgagtccaacaggggtcaatgagtacctgatggcactgtggagtgtgggcagcgtggttcaggactatgactcagacaagctgttccctgcatttggatttggggcccaggttccccctgactggcaggtctcgcatgaatttgccttgaatttcaaccccagtaacccctactgtgcaggcatccagggcattgtggatgcctaccgccaagccctgccccaagttcgcctctatggccctaccaactttgcacccatcatcaaccatgtggccaggtttgcagcccaggctgcacatcaggggactgcctcgcaatacttcatgctgttgctgctgactgatggtgctgtgacggatgtggaagccacacgtgaggctgtggtgcgtgcctcgaacctgcccatgtcagtgatcattgtgggtgtgggtggtgctgactttgaggccatggagcagctggacgctgatggtggacccctgcatacacgttctgggcaggctgctgcccgcgacattgtgcagtttgtaccctaccgccggttccagaatgcccctcgggaggcattggcacagaccgtgctcgcagaagtgcccacacaactggtctcatacttcagggcccagggttgggccccgctcaagccacttccaccctcagccaaggatcctgcacaggccccccaggcctaggttcccttggaggctgtggcaagtcctcaatcctgtgtcccagaggtccctctgggccacaacccaacccttctcactctcctcagtgctagcactttgtattttttgatacttttatacttgtttctgcttttgctgctcttgatcccacctttgctcctgacaaccctcattcaataaagaccagtgaagaccaaaaaaaaaaaaaaaaaaaa

SEQ ID NO: 1229 - protein, 537 aa, Homo sapiens; identical to SEQ ID NO: 1223

SEQ ID NO: 1230 - DNA, 2049 bp, Homo sapiens
cggagccgctgagcgggccgacggccattttgtgaagcggcgaaggaggtggtggctgcgttgggctccgggaagccgttcgggctggggctgtcggccgcggggcggaggcactcgcgcggggggtaattcggggtctgggttctggtgccgcgcagctttccccggattgacttggcctctacttcttgttaaggaaattcatctcttgttttatcagatggcccactgcgtgaccttggttcagctgtccatttcctgtgaccatctcattgacaaggacatcggctccaagtctgacccactctgcgtccttttacaggatgtgggagggggcagctgggctgagcttggccggactgaacgggtgcggaactgctcaagccctgagttctccaagactctacagcttgagtaccgctttgagacagtccagaagctacgctttggaatctatgacatagacaacaagacgccagagctgagggatgatgacttcctagggggtgctgagtgttccctaggacagattgtgtccagccaggtactgactctccccttgatgctgaagcctggaaaacctgctgggcgggggaccatcacggtctcagctcaggaattaaaggacaatcgtgtagtaaccatggaggtagaggccagaaacctagataagaaggacttcctgggaaaatcagatccatttctggagttcttccgccagggtgatgggaaatggcacctggtgtacagatctgaggtcatcaagaacaacctgaaccctacatggaagcgtttctcagtccccgttcagcatttctgtggtgggaaccccagcacacccatccaggtgcaatgctccgattatgacagtgacgggtcacatgatctcatcggtaccttccacaccagcttggcccagctgcaggcagtcccggctgagtttgaatgcatccaccctgagaagcagcagaaaaagaaaagctacaagaactctggaactatccgtgtcaagatttgtcgggtagaaacagagtactcctttctggactatgtgatgggaggctgtcagatcaacttcactgtgggcgtggacttcactggctccaatggagacccctcctcacctgactccctacactacctgagtccaacaggggtcaatgagtacctgatggcactgtggagtgtgggcagcgtggttcaggactatgactcagacaagctgttccctgcatttggatttggggcccaggttccccctgactggcaggtctcgcatgaatttgccttgaatttcaaccccagtaacccctactgtgcaggcatccagggcattgtggatgcctaccgccaagccctgccccaagttcgcctctatggccctaccaactttgcacccatcatcaaccatgtggccaggtttgcagcccaggctgcacatcaggggactgcctcgcaatacttcatgctgttgctgctgactgatggtgctgtgacggatgtggaagccacacgtgaggctgtggtgcgtgcctcgaacctgcccatgtcagtgatcattgtgggtgtgggtggtgctgactttgaggccatggagcagctggacgctgatggtggacccctgcatacacgttctgggcaggctgctgcccgcgacattgtgcagtttgtaccctaccgccggttccagaatgcccctcgggaggcattggcacagaccgtgctcgcagaagtgcccacacaactggtctcatacttcagggcccagggttgggccccgctcaagccacttccaccctcagccaaggatcctgcacaggccccccaggcctaggttcccttggaggctgtggcaagtcctcaatcctgtgtcccagaggtccctctgggccacaacccaacccttctcactctcctcagtgctagcactttgtattttttgatacttttatacttgtttctgcttttgctgctcttgatcccacctttgctcctgacaaccctcattcaataaagaccagtgaagaccaaaaaaaaaaaaaaaaaaaa

SEQ ID NO: 1231 - protein, 537 aa, Homo sapiens; identical to SEQ ID NO: 1223

SEQ ID NO: 1232 - DNA, 2097 bp, Homo sapiens
cggagccgctgagcgggccgacggccattttgtgaagcggcgaaggaggtggtggctgcgttgggctccgggaagccgttcgggctggggctgtcggccgcggggcggaggcactcgcgcggggggtgtgtgtggtttcagcgcagcatggctgtggtcatccgtttgcaaggtctcccaattgtggcggggaccatggacattcgccacttcttctctggattgaccattcctgatgggggcgtgcatattgtagggggtgaactggatggcccactgcgtgaccttggttcagctgtccatttcctgtgaccatctcattgacaaggacatcggctccaagtctgacccactctgcgtccttttacaggatgtgggagggggcagctgggctgagcttggccggactgaacgggtgcggaactgctcaagccctgagttctccaagactctacagcttgagtaccgctttgagacagtccagaagctacgctttggaatctatgacatagacaacaagacgccagagctgagggatgatgacttcctagggggtgctgagtgttccctaggacagattgtgtccagccaggtactgactctccccttgatgctgaagcctggaaaacctgctgggcgggggaccatcacggtctcagctcaggaattaaaggacaatcgtgtagtaaccatggaggtagaggccagaaacctagataagaaggacttcctgggaaaatcagatccatttctggagttcttccgccagggtgatgggaaatggcacctggtgtacagatctgaggtcatcaagaacaacctgaaccctacatggaagcgtttctcagtccccgttcagcatttctgtggtgggaaccccagcacacccatccaggtgcaatgctccgattatgacagtgacgggtcacatgatctcatcggtaccttccacaccagcttggcccagctgcaggcagtcccggctgagtttgaatgcatccaccctgagaagcagcagaaaaagaaaagctacaagaactctggaactatccgtgtcaagatttgtcgggtagaaacagagtactcctttctggactatgtgatgggaggctgtcagatcaacttcactgtgggcgtggacttcactggctccaatggagacccctcctcacctgactccctacactacctgagtccaacaggggtcaatgagtacctgatggcactgtggagtgtgggcagcgtggttcaggactatgactcagacaagctgttccctgcatttggatttggggcccaggttccccctgactggcaggtctcgcatgaatttgccttgaatttcaaccccagtaacccctactgtgcaggcatccagggcattgtggatgcctaccgccaagccctgccccaagttcgcctctatggccctaccaactttgcacccatcatcaaccatgtggccaggtttgcagcccaggctgcacatcaggggactgcctcgcaatacttcatgctgttgctgctgactgatggtgctgtgacggatgtggaagccacacgtgaggctgtggtgcgtgcctcgaacctgcccatgtcagtgatcattgtgggtgtgggtggtgctgactttgaggccatggagcagctggacgctgatggtggacccctgcatacacgttctgggcaggctgctgcccgcgacattgtgcagtttgtaccctaccgccggttccagaatgcccctcgggaggcattggcacagaccgtgctcgcagaagtgcccacacaactggtctcatacttcagggcccagggttgggccccgctcaagccacttccaccctcagccaaggatcctgcacaggccccccaggcctaggttcccttggaggctgtggcaagtcctcaatcctgtgtcccagaggtccctctgggccacaacccaacccttctcactctcctcagtgctagcactttgtattttttgatacttttatacttgtttctgcttttgctgctcttgatcccacctttgctcctgacaaccctcattcaataaagaccagtgaagaccaaaaaaaaaaaaaaaaaaaa

SEQ ID NO: 1233 - protein, 537 aa, Homo sapiens; identical to SEQ ID NO: 1223

SEQ ID NO: 1234 - DNA, 2224 bp, Homo sapiens
cggagccgctgagcgggccgacggccattttgtgaagcggcgaaggaggtggtggctgcgttgggctccgggaagccgttcgggctggggctgtcggccgcggggcggaggcactcgcgcggggggtaattcggggtctgggttctggtgccgcgcagctttccccgtctaaaagttggttttaattggttgcccacaggattgacttggcctctacttcttgttaaggaaattcatctcttgttttatcaggtgtgtgtggtttcagcgcagcatggctgtggtcatccgtttgcaaggtctcccaattgtggcggggaccatggacattcgccacttcttctctggattgaccattcctgatgggggcgtgcatattgtagggggtgaactggatggcccactgcgtgaccttggttcagctgtccatttcctgtgaccatctcattgacaaggacatcggctccaagtctgacccactctgcgtccttttacaggatgtgggagggggcagctgggctgagcttggccggactgaacgggtgcggaactgctcaagccctgagttctccaagactctacagcttgagtaccgctttgagacagtccagaagctacgctttggaatctatgacatagacaacaagacgccagagctgagggatgatgacttcctagggggtgctgagtgttccctaggacagattgtgtccagccaggtactgactctccccttgatgctgaagcctggaaaacctgctgggcgggggaccatcacggtctcagctcaggaattaaaggacaatcgtgtagtaaccatggaggtagaggccagaaacctagataagaaggacttcctgggaaaatcagatccatttctggagttcttccgccagggtgatgggaaatggcacctggtgtacagatctgaggtcatcaagaacaacctgaaccctacatggaagcgtttctcagtccccgttcagcatttctgtggtgggaaccccagcacacccatccaggtgcaatgctccgattatgacagtgacgggtcacatgatctcatcggtaccttccacaccagcttggcccagctgcaggcagtcccggctgagtttgaatgcatccaccctgagaagcagcagaaaaagaaaagctacaagaactctggaactatccgtgtcaagatttgtcgggtagaaacagagtactcctttctggactatgtgatgggaggctgtcagatcaacttcactgtgggcgtggacttcactggctccaatggagacccctcctcacctgactccctacactacctgagtccaacaggggtcaatgagtacctgatggcactgtggagtgtgggcagcgtggttcaggactatgactcagacaagctgttccctgcatttggatttggggcccaggttccccctgactggcaggtctcgcatgaatttgccttgaatttcaaccccagtaacccctactgtgcaggcatccagggcattgtggatgcctaccgccaagccctgccccaagttcgcctctatggccctaccaactttgcacccatcatcaaccatgtggccaggtttgcagcccaggctgcacatcaggggactgcctcgcaatacttcatgctgttgctgctgactgatggtgctgtgacggatgtggaagccacacgtgaggctgtggtgcgtgcctcgaacctgcccatgtcagtgatcattgtgggtgtgggtggtgctgactttgaggccatggagcagctggacgctgatggtggacccctgcatacacgttctgggcaggctgctgcccgcgacattgtgcagtttgtaccctaccgccggttccagaatgcccctcgggaggcattggcacagaccgtgctcgcagaagtgcccacacaactggtctcatacttcagggcccagggttgggccccgctcaagccacttccaccctcagccaaggatcctgcacaggccccccaggcctaggttcccttggaggctgtggcaagtcctcaatcctgtgtcccagaggtccctctgggccacaacccaacccttctcactctcctcagtgctagcactttgtattttttgatacttttatacttgtttctgcttttgctgctcttgatcccacctttgctcctgacaaccctcattcaataaagaccagtgaagaccaaaaaaaaaaaaaaaaaaaa

SEQ ID NO: 1235 - protein, 537 aa, Homo sapiens; identical to SEQ ID NO: 1223

SEQ ID NO: 1236 - DNA, 2192 bp, Homo sapiens
cggagccgctgagcgggccgacggccattttgtgaagcggcgaaggaggtggtggctgcgttgggctccgggaagccgttcgggctggggctgtcggccgcggggcggaggcactcgcgcggggggtaattcggggtctgggttctggtgccgcgcagctttccccggattgacttggcctctacttcttgttaaggaaattcatctcttgttttatcaggtgtgtgtggtttcagcgcagcatggctgtggtcatccgtttgcaaggtctcccaattgtggcggggaccatggacattcgccacttcttctctggattgaccattcctgatgggggcgtgcatattgtagggggtgaactggatggcccactgcgtgaccttggttcagctgtccatttcctgtgaccatctcattgacaaggacatcggctccaagtctgacccactctgcgtccttttacaggatgtgggagggggcagctgggctgagcttggccggactgaacgggtgcggaactgctcaagccctgagttctccaagactctacagcttgagtaccgctttgagacagtccagaagctacgctttggaatctatgacatagacaacaagacgccagagctgagggatgatgacttcctagggggtgctgagtgttccctaggacagattgtgtccagccaggtactgactctccccttgatgctgaagcctggaaaacctgctgggcgggggaccatcacggtctcagctcaggaattaaaggacaatcgtgtagtaaccatggaggtagaggccagaaacctagataagaaggacttcctgggaaaatcagatccatttctggagttcttccgccagggtgatgggaaatggcacctggtgtacagatctgaggtcatcaagaacaacctgaaccctacatggaagcgtttctcagtccccgttcagcatttctgtggtgggaaccccagcacacccatccaggtgcaatgctccgattatgacagtgacgggtcacatgatctcatcggtaccttccacaccagcttggcccagctgcaggcagtcccggctgagtttgaatgcatccaccctgagaagcagcagaaaaagaaaagctacaagaactctggaactatccgtgtcaagatttgtcgggtagaaacagagtactcctttctggactatgtgatgggaggctgtcagatcaacttcactgtgggcgtggacttcactggctccaatggagacccctcctcacctgactccctacactacctgagtccaacaggggtcaatgagtacctgatggcactgtggagtgtgggcagcgtggttcaggactatgactcagacaagctgttccctgcatttggatttggggcccaggttccccctgactggcaggtctcgcatgaatttgccttgaatttcaaccccagtaacccctactgtgcaggcatccagggcattgtggatgcctaccgccaagccctgccccaagttcgcctctatggccctaccaactttgcacccatcatcaaccatgtggccaggtttgcagcccaggctgcacatcaggggactgcctcgcaatacttcatgctgttgctgctgactgatggtgctgtgacggatgtggaagccacacgtgaggctgtggtgcgtgcctcgaacctgcccatgtcagtgatcattgtgggtgtgggtggtgctgactttgaggccatggagcagctggacgctgatggtggacccctgcatacacgttctgggcaggctgctgcccgcgacattgtgcagtttgtaccctaccgccggttccagaatgcccctcgggaggcattggcacagaccgtgctcgcagaagtgcccacacaactggtctcatacttcagggcccagggttgggccccgctcaagccacttccaccctcagccaaggatcctgcacaggccccccaggcctaggttcccttggaggctgtggcaagtcctcaatcctgtgtcccagaggtccctctgggccacaacccaacccttctcactctcctcagtgctagcactttgtattttttgatacttttatacttgtttctgcttttgctgctcttgatcccacctttgctcctgacaaccctcattcaataaagaccagtgaagaccaaaaaaaaaaaaaaaaaaaa

SEQ ID NO: 1237 - protein, 537 aa, Homo sapiens; identical to SEQ ID NO: 1223

SEQ ID NO: 1238 - DNA, 6640 bp, Homo sapiens
gagcgggccgacggccattttgtgaagcggcgaaggaggtggtggctgcgttgggctccgggaagccgttcgggctggggctgtcggccgcggggcggaggcactcgcgcggggggtaattcggggtctgggttctggtgccgcgcagctttccccgtctaaaagttggttttaattggttgcccacaggattgacttggcctctacttcttgttaaggaaattcatctcttgttttatcaggtgtgtgtggtttcagcgcagcatggctgtggtcatccgtttgcaaggtctcccaattgtggcggggaccatggacattcgccacttcttctctggattgaccattcctgatgggggcgtgcatattgtagggggtgaactgggtgaggctttcatcgtttttgccactgatgaagatgcaaggcttggtatgatgcgcacaggtggtacaattaaagggtcaaaagtaacactattgttgagtagtaagacggaaatgcagaatatgattgaactgagtcgtaggcgttttgaaactgccaacttagatataccaccagcaaatgccagtagatcaggaccaccacctagctcaggaatgagtagcagggtaaacttgcccacaacagtatccaactttaataatccatcacccagtgtagttactgccaccacttctgttcatgaaagcaacaaaaacatacagacattttccacagccagcgtaggaacagctcctccaaatatgggggcttcctttgggagcccaacgtttagctcaactgttccaagcacagcctctccaatgaacacagtcccgccgccaccaattcctccaattccagcgatgccatctctgccaccaatgccatccattcccccaattccagttcctcctccagtacctacattgcctcctgtgcctcctgtgcccccgattcccccagttccttctgtgccacccatgaccccactgccacccatgtcgggcatgccgcccttgaatccgccacctgtggcacctctacctgctggaatgaatggctctggagcacctatgaatttgaacaataatctgaatcctatgtttcttggtccgttgaatcctgttaaccctatccagatgaactctcagagcagtgtgaagccactccccatcaaccctgatgatctgtatgtcagtgtgcatggaatgcccttttctgcaatggaaaatgatgtcagagatttttttcatgggctccgtgttgatgcagtgcatttgttgaaagatcatgtaggtcgaaataatgggaatggattggttaagtttctctcccctcaagatacatttgaagctttgaaacgaaacagaatgctgatgattcaacgctatgtggaagttagccctgccacagaaagacagtgggtagctgctggaggccatatcacttttaagcaaaatatgggaccttctggacaaactcatccccctcctcagacacttcccaggtcaaaatcgcccagtgggcagaaaagatcaaggtcaagatcaccacatgaggctggtttttgtgtttacttgaaagggctaccatttgaagcagaaaacaaacatgtcattgatttttttaaaaagctggatattgtggaagatagtatttatatagcttatggacccaatgggaaagcaactggcgaaggctttgtagagttcagaaatgaggctgactataaggctgctctgtgtcgtcataaacagtacatgggcaatcgctttattcaagttcatccaattactaagaaaggtatgctagaaaagatagatatgattcgaaaaagactgcagaacttcagctatgaccagagggaaatgatactaaatccagagggggatgtcaactctgccaaagtctgtgcccacataacaaatattccattcagcattacaaagatggatgttcttcagttcctagaaggaatcccagtggatgaaaatgctgtacatgttcttgttgataacaatgggcaaggtctaggacaggcattggttcagtttaaaaatgaagatgatgcacgtaagtctgaacgcttacaccgtaaaaaacttaatgggagagaagcttttgttcatgtagttaccctagaagatatgagagagattgagaaaaatccccctgcccaaggaaaaaagggattaaagatgcctgtgccaggtaatcctgcagttccaggaatgcccaatgcgggactgcccggtgtgggactgcccagtgcaggacttcccggtgcaggcctgcccagcacaggactgcctggttcagcaataaccagtgcaggactgcctggtgcgggaatgcccagtgcaggaatacctagtgcaggaggtgaagagcatgccttcctgactgtaggatcaaaggaagccaataatgggcctccatttaactttcctggtaattttggtggatcaaatgcctttgggccaccaatccctcctccaggattaggaggcggggcctttggtgatgctaggcctggtatgccttcagttggaaacagtggtttgcctggtctaggactggatgttccgggttttggaggtggaccaaacaatttaagtgggccatcgggatttggagggggccctcagaattttggaaatggccctggtagcttaggcggtcccccggggtttggaagtggccctcctggtcttggaagtgcccctgggcatttgggtgggccaccagcttttgggcctggccccggccccggccccggccctggcccaatccatattggtggtccccctggctttgcatctagttctggaaaaccaggaccgacagtaattaaagtgcaaaacatgccctttactgtgtctattgatgagattttagatttcttttatggctatcaagtaatcccaggctcagtgtgtttaaaatacaatgaaaaaggtatgcccacaggtgaagccatggtggcctttgagtctcgggatgaagccacagctgctgtcattgacttaaatgacaggcctataggttcaagaaaagtaaaacttgtattagggtagccattcacatcattttttatagggtagatcttcatattgctgtgattaatgcatccagattgttttcctagtatttccaggttagaacctgtggattgtttcaattgcatatagcttggtttccataacatagagcattggttgactgtttacagaagactcactcaccaggataaacattgctgtatgttacagtaaagctatctggagagaacacataaatgattttggcataccattagagaaaccatttgtaaaactcaaatgaccacataaagcttatcaaggagtctagattggttttgttttataccatatgggatgaagaaaatagaaatgtcagtagaactcattgagggtgctcttgccagctgctgaaaatagaagttggctactctcagaatttggtttaaagctggacagatttgctttgttatagggtaaagctttgtctaaagtcctcattttcttttaaaattgaataaaatttctgtatacagattcattgtatgtacctttattgcttcttaagggtccttgctgtatagacagtcctgcttcagaagttgctgctttgtttgtctaattgactcatttgtaaatgagcagaactgttttgttggtttttttccctaaatataaaagtccacacttcgtttgtgctataacctcaaactttgatttctaatgtcacacttaaaactgtgtggaataagacttttgccataaaaataaactatggagtcctttatctaccagagcctttttggtttgaccgccacgatttaggttagtcagtttaaaaattgttcatgttgtttggatggtatcgaaaaccagaaaccacttttaataatgtgtttaagatacttgatttgaagtccttttcatatggactaattgtagtatcaatttcctcctgtcccgattatgtgaaattttggcctttaaacaaagaggggcccattcataagaaagtgttatatctaggtttttaaaactgaagttgaaattatctttgttagcagtagtagtatagaataaaagatccgtatgctggttcgtagattgatacgtgttagtcctgttatttggaggctttttggcatagttgttcgatcaggagcctgtttactaaaagtcttcatacagagtacaagtgcagccgccagaggagaaaattgagattcttgaccctttcatactcttttctttggtattcaggacactaaggcaggaggaccacatgagttctggttggtaagtgtccttgtcatgaaaacacttgccttacaaggctctaattatgatttccctagtcagtgctctgaagatgtgtcacattatattataaacaatacggaaggggagataggtgagatgatatgaaaaacaaattttctcactgtcataaaaggctctaattatggttactttccttgtgatgaaaaacttggccttacagggctctagttatggttactttccctagtcaatgctctgaaaatgtgtcacattataaacaatacagaaggagagatagatgagagatcatgaaaaccaaattttatcttttacatggcccctttgtcttcgtttgaaacatccccaacatttcctacaaatcagcgtagttacaaaggggtcagtcttttaaaataagtatttcctattaaactatatatatatacagtgcctttttggtgttgtgagtcagtggaacactgaaatacagcggttgtgtaatttaagagtggcaacagtttcatttgataagatttgaaaaggctttttatcactacaatcttagaggattgacagtacaggatttttgtttaagagaaggattgtttagactcaagaggtgactatgttgtgggtcttttgataattcatgaatacagatttgctttgaccgatcactagatactgcctcctcaatttcaaaagcaatataacgtttgtatatgctgtttaatttaagttaatgttaagtaatcatttctcattccaaagacaatgcaaaaaacttcagcactgcttgagagttgtatttcagccacagatattttctccattggaaagctattttcattttagaaaaatgggttgtttgaagatgaaagtcttttatcttttttcacaatttattttggttatatgttcgtacattcttattaaatatttcatacactttattgcaactactttgttatttctacatcttagataaatgctgaaaaggaaaacgatttcattgttcatctaattaaataaattaaaagagcggtttgtgtagaaattggagagaactatgttttatatgaatcacaacagtgctcgttgtggactgtaattaaatgctttgccctctggaacttgatttttgtgtatctgagatttattaacagtgctaactgctaaggatactgtttatcttgttctgggcattggagtttcagtttttaaaaaattcttgaaaatgtattctgtgaaactactcatacctctcttcctgcgaattttctcctaagaactaggtttggggtagaaatgaattgacattattttctcatttgctttgtatggtatgaaggatttgtaaagctttgctcaaagttgtgtgcatttgtaaacactatcatgatattttcaattttatgtgtaaattttattgtctgtttttggtgactctgacattaatggaagagaatattttccattagatttaattttttttcctctcccttctgattttttttttattggtgttcatttttcttttgatttaaaggattagagaaatctacaaatgtatgtcataaataagcaaatttgtaaacttttctgaactttagtgaaacatttagttcacaagcataatttggaggtgtgttctgtgtttacacagtagtttggatgtacaattattattagtggctttttaaaaaatgaaacagtgttaagtgaaatgtagttcctagctttgtactccaagttgtcaaagcatcaacaatgaaaattcgattaggaaactttatttaaaatttcaggtagtaatattcagtgtagttaaggccagtcttaacccactggatgaaaatctaggactgtatggaagtaagcaaacattacatttttaggtggaaatagtcagccttgcataaaaacaaggatgcgtgaaagccttaaattccagctcccttttactggagtctgtggttgtgtacaggtatgggccaagtgtaaaatctcatcaattttaagaacactcgggaaatgagtaaagaaaatgtaaaattgctgctagtcaaatcttttggaaagaatttctggaagtggtcactttaaaaattattttccacccttgcaaaattgccacatttaaattgttttactggcagttctatagtagtccagactttagaaaccaaacacaacaaaatggcttgttgccaatatggccacaacattgccagcaaatactgccttggcatcactcagcagaggtttttgtttataaagatgaagtcttgaatactgttcaataaacttgtcaaaaaataaaaaaaaaaaa

SEQ ID NO: 1239 - protein, 932 aa, Homo sapiens
MAVVIRLQGLPIVAGTMDIRHFFSGLTIPDGGVHIVGGELGEAFIVFATDEDARLGMMRTGGTIKGSKVTLLLSSKTEMQNMIELSRRRFETANLDIPPANASRSGPPPSSGMSSRVNLPTTVSNFNNPSPSVVTATTSVHESNKNIQTFSTASVGTAPPNMGASFGSPTFSSTVPSTASPMNTVPPPPIPPIPAMPSLPPMPSIPPIPVPPPVPTLPPVPPVPPIPPVPSVPPMTPLPPMSGMPPLNPPPVAPLPAGMNGSGAPMNLNNNLNPMFLGPLNPVNPIQMNSQSSVKPLPINPDDLYVSVHGMPFSAMENDVRDFFHGLRVDAVHLLKDHVGRNNGNGLVKFLSPQDTFEALKRNRMLMIQRYVEVSPATERQWVAAGGHITFKQNMGPSGQTHPPPQTLPRSKSPSGQKRSRSRSPHEAGFCVYLKGLPFEAENKHVIDFFKKLDIVEDSIYIAYGPNGKATGEGFVEFRNEADYKAALCRHKQYMGNRFIQVHPITKKGMLEKIDMIRKRLQNFSYDQREMILNPEGDVNSAKVCAHITNIPFSITKMDVLQFLEGIPVDENAVHVLVDNNGQGLGQALVQFKNEDDARKSERLHRKKLNGREAFVHVVTLEDMREIEKNPPAQGKKGLKMPVPGNPAVPGMPNAGLPGVGLPSAGLPGAGLPSTGLPGSAITSAGLPGAGMPSAGIPSAGGEEHAFLTVGSKEANNGPPFNFPGNFGGSNAFGPPIPPPGLGGGAFGDARPGMPSVGNSGLPGLGLDVPGFGGGPNNLSGPSGFGGGPQNFGNGPGSLGGPPGFGSGPPGLGSAPGHLGGPPAFGPGPGPGPGPGPIHIGGPPGFASSSGKPGPTVIKVQNMPFTVSIDEILDFFYGYQVIPGSVCLKYNEKGMPTGEAMVAFESRDEATAAVIDLNDRPIGSRKVKLVLG

SEQ ID NO: 1240 - DNA, 6608 bp, Homo sapiens
gagcgggccgacggccattttgtgaagcggcgaaggaggtggtggctgcgttgggctccgggaagccgttcgggctggggctgtcggccgcggggcggaggcactcgcgcggggggtaattcggggtctgggttctggtgccgcgcagctttccccggattgacttggcctctacttcttgttaaggaaattcatctcttgttttatcaggtgtgtgtggtttcagcgcagcatggctgtggtcatccgtttgcaaggtctcccaattgtggcggggaccatggacattcgccacttcttctctggattgaccattcctgatgggggcgtgcatattgtagggggtgaactgggtgaggctttcatcgtttttgccactgatgaagatgcaaggcttggtatgatgcgcacaggtggtacaattaaagggtcaaaagtaacactattgttgagtagtaagacggaaatgcagaatatgattgaactgagtcgtaggcgttttgaaactgccaacttagatataccaccagcaaatgccagtagatcaggaccaccacctagctcaggaatgagtagcagggtaaacttgcccacaacagtatccaactttaataatccatcacccagtgtagttactgccaccacttctgttcatgaaagcaacaaaaacatacagacattttccacagccagcgtaggaacagctcctccaaatatgggggcttcctttgggagcccaacgtttagctcaactgttccaagcacagcctctccaatgaacacagtcccgccgccaccaattcctccaattccagcgatgccatctctgccaccaatgccatccattcccccaattccagttcctcctccagtacctacattgcctcctgtgcctcctgtgcccccgattcccccagttccttctgtgccacccatgaccccactgccacccatgtcgggcatgccgcccttgaatccgccacctgtggcacctctacctgctggaatgaatggctctggagcacctatgaatttgaacaataatctgaatcctatgtttcttggtccgttgaatcctgttaaccctatccagatgaactctcagagcagtgtgaagccactccccatcaaccctgatgatctgtatgtcagtgtgcatggaatgcccttttctgcaatggaaaatgatgtcagagatttttttcatgggctccgtgttgatgcagtgcatttgttgaaagatcatgtaggtcgaaataatgggaatggattggttaagtttctctcccctcaagatacatttgaagctttgaaacgaaacagaatgctgatgattcaacgctatgtggaagttagccctgccacagaaagacagtgggtagctgctggaggccatatcacttttaagcaaaatatgggaccttctggacaaactcatccccctcctcagacacttcccaggtcaaaatcgcccagtgggcagaaaagatcaaggtcaagatcaccacatgaggctggtttttgtgtttacttgaaagggctaccatttgaagcagaaaacaaacatgtcattgatttttttaaaaagctggatattgtggaagatagtatttatatagcttatggacccaatgggaaagcaactggcgaaggctttgtagagttcagaaatgaggctgactataaggctgctctgtgtcgtcataaacagtacatgggcaatcgctttattcaagttcatccaattactaagaaaggtatgctagaaaagatagatatgattcgaaaaagactgcagaacttcagctatgaccagagggaaatgatactaaatccagagggggatgtcaactctgccaaagtctgtgcccacataacaaatattccattcagcattacaaagatggatgttcttcagttcctagaaggaatcccagtggatgaaaatgctgtacatgttcttgttgataacaatgggcaaggtctaggacaggcattggttcagtttaaaaatgaagatgatgcacgtaagtctgaacgcttacaccgtaaaaaacttaatgggagagaagcttttgttcatgtagttaccctagaagatatgagagagattgagaaaaatccccctgcccaaggaaaaaagggattaaagatgcctgtgccaggtaatcctgcagttccaggaatgcccaatgcgggactgcccggtgtgggactgcccagtgcaggacttcccggtgcaggcctgcccagcacaggactgcctggttcagcaataaccagtgcaggactgcctggtgcgggaatgcccagtgcaggaatacctagtgcaggaggtgaagagcatgccttcctgactgtaggatcaaaggaagccaataatgggcctccatttaactttcctggtaattttggtggatcaaatgcctttgggccaccaatccctcctccaggattaggaggcggggcctttggtgatgctaggcctggtatgccttcagttggaaacagtggtttgcctggtctaggactggatgttccgggttttggaggtggaccaaacaatttaagtgggccatcgggatttggagggggccctcagaattttggaaatggccctggtagcttaggcggtcccccggggtttggaagtggccctcctggtcttggaagtgcccctgggcatttgggtgggccaccagcttttgggcctggccccggccccggccccggccctggcccaatccatattggtggtccccctggctttgcatctagttctggaaaaccaggaccgacagtaattaaagtgcaaaacatgccctttactgtgtctattgatgagattttagatttcttttatggctatcaagtaatcccaggctcagtgtgtttaaaatacaatgaaaaaggtatgcccacaggtgaagccatggtggcctttgagtctcgggatgaagccacagctgctgtcattgacttaaatgacaggcctataggttcaagaaaagtaaaacttgtattagggtagccattcacatcattttttatagggtagatcttcatattgctgtgattaatgcatccagattgttttcctagtatttccaggttagaacctgtggattgtttcaattgcatatagcttggtttccataacatagagcattggttgactgtttacagaagactcactcaccaggataaacattgctgtatgttacagtaaagctatctggagagaacacataaatgattttggcataccattagagaaaccatttgtaaaactcaaatgaccacataaagcttatcaaggagtctagattggttttgttttataccatatgggatgaagaaaatagaaatgtcagtagaactcattgagggtgctcttgccagctgctgaaaatagaagttggctactctcagaatttggtttaaagctggacagatttgctttgttatagggtaaagctttgtctaaagtcctcattttcttttaaaattgaataaaatttctgtatacagattcattgtatgtacctttattgcttcttaagggtccttgctgtatagacagtcctgcttcagaagttgctgctttgtttgtctaattgactcatttgtaaatgagcagaactgttttgttggtttttttccctaaatataaaagtccacacttcgtttgtgctataacctcaaactttgatttctaatgtcacacttaaaactgtgtggaataagacttttgccataaaaataaactatggagtcctttatctaccagagcctttttggtttgaccgccacgatttaggttagtcagtttaaaaattgttcatgttgtttggatggtatcgaaaaccagaaaccacttttaataatgtgtttaagatacttgatttgaagtccttttcatatggactaattgtagtatcaatttcctcctgtcccgattatgtgaaattttggcctttaaacaaagaggggcccattcataagaaagtgttatatctaggtttttaaaactgaagttgaaattatctttgttagcagtagtagtatagaataaaagatccgtatgctggttcgtagattgatacgtgttagtcctgttatttggaggctttttggcatagttgttcgatcaggagcctgtttactaaaagtcttcatacagagtacaagtgcagccgccagaggagaaaattgagattcttgaccctttcatactcttttctttggtattcaggacactaaggcaggaggaccacatgagttctggttggtaagtgtccttgtcatgaaaacacttgccttacaaggctctaattatgatttccctagtcagtgctctgaagatgtgtcacattatattataaacaatacggaaggggagataggtgagatgatatgaaaaacaaattttctcactgtcataaaaggctctaattatggttactttccttgtgatgaaaaacttggccttacagggctctagttatggttactttccctagtcaatgctctgaaaatgtgtcacattataaacaatacagaaggagagatagatgagagatcatgaaaaccaaattttatcttttacatggcccctttgtcttcgtttgaaacatccccaacatttcctacaaatcagcgtagttacaaaggggtcagtcttttaaaataagtatttcctattaaactatatatatatacagtgcctttttggtgttgtgagtcagtggaacactgaaatacagcggttgtgtaatttaagagtggcaacagtttcatttgataagatttgaaaaggctttttatcactacaatcttagaggattgacagtacaggatttttgtttaagagaaggattgtttagactcaagaggtgactatgttgtgggtcttttgataattcatgaatacagatttgctttgaccgatcactagatactgcctcctcaatttcaaaagcaatataacgtttgtatatgctgtttaatttaagttaatgttaagtaatcatttctcattccaaagacaatgcaaaaaacttcagcactgcttgagagttgtatttcagccacagatattttctccattggaaagctattttcattttagaaaaatgggttgtttgaagatgaaagtcttttatcttttttcacaatttattttggttatatgttcgtacattcttattaaatatttcatacactttattgcaactactttgttatttctacatcttagataaatgctgaaaaggaaaacgatttcattgttcatctaattaaataaattaaaagagcggtttgtgtagaaattggagagaactatgttttatatgaatcacaacagtgctcgttgtggactgtaattaaatgctttgccctctggaacttgatttttgtgtatctgagatttattaacagtgctaactgctaaggatactgtttatcttgttctgggcattggagtttcagtttttaaaaaattcttgaaaatgtattctgtgaaactactcatacctctcttcctgcgaattttctcctaagaactaggtttggggtagaaatgaattgacattattttctcatttgctttgtatggtatgaaggatttgtaaagctttgctcaaagttgtgtgcatttgtaaacactatcatgatattttcaattttatgtgtaaattttattgtctgtttttggtgactctgacattaatggaagagaatattttccattagatttaattttttttcctctcccttctgattttttttttattggtgttcatttttcttttgatttaaaggattagagaaatctacaaatgtatgtcataaataagcaaatttgtaaacttttctgaactttagtgaaacatttagttcacaagcataatttggaggtgtgttctgtgtttacacagtagtttggatgtacaattattattagtggctttttaaaaaatgaaacagtgttaagtgaaatgtagttcctagctttgtactccaagttgtcaaagcatcaacaatgaaaattcgattaggaaactttatttaaaatttcaggtagtaatattcagtgtagttaaggccagtcttaacccactggatgaaaatctaggactgtatggaagtaagcaaacattacatttttaggtggaaatagtcagccttgcataaaaacaaggatgcgtgaaagccttaaattccagctcccttttactggagtctgtggttgtgtacaggtatgggccaagtgtaaaatctcatcaattttaagaacactcgggaaatgagtaaagaaaatgtaaaattgctgctagtcaaatcttttggaaagaatttctggaagtggtcactttaaaaattattttccacccttgcaaaattgccacatttaaattgttttactggcagttctatagtagtccagactttagaaaccaaacacaacaaaatggcttgttgccaatatggccacaacattgccagcaaatactgccttggcatcactcagcagaggtttttgtttataaagatgaagtcttgaatactgttcaataaacttgtcaaaaaataaaaaaaaaaaa

SEQ ID NO: 1241 - protein, 932 aa, Homo sapiens; identical to SEQ ID NO: 1239

SEQ ID NO: 1242 - DNA, 2371 bp, Homo sapiens
acttccgggagcctggggcccaggactgcagcggcttcggaaggtgggctctgccagcgggaccatgctgctccgagccgcttggaggcgggcggcagtggcggtgacagcggctccagggccgaagcccgcggcgcccactcgggggctgcgcctgcgcgttggagaccgtgctcctcagtctgcggttcccgcagatacagccgctgccccggaggtggggccagtgctgcgacctctctatatggatgtgcaagctacaactcctctggacccccgggtgcttgatgccatgctcccttacctaatcaactactatgggaacccacactcccggacacatgcttatggctgggagagtgaggcagccatggaacgtgctcgtcagcaagtagcatctctgattggagctgatcctcgtgagatcatttttactagtggtgctactgaatccaacaacatagcaattaagggggtggcccgattctacaggtcacggaaaaagcacttgatcaccacccagacagaacacaaatgtgtcttggactcctgccgttcactggaagctgagggctttcaggtcacctacctcccagtgcagaagagtgggatcattgacctaaaggaactagaggctgctatccagccagatactagcctggtgtcagtcatgactgtgaacaatgagattggagtgaagcagcctattgcagaaatagggcggatttgcagttccagaaaggtatatttccatactgatgcagcccaggctgttggaaaaatcccacttgatgtcaatgacatgaaaattgatctcatgagcattagtggtcacaaaatctacggtcccaaaggggttggtgccatctacatccgtcgccggccccgtgtgcgtgtggaggccctgcagagtggaggggggcaggagcggggtatgcggtctgggacagtgcccacacccttagtggtggggctgggggctgcgtgtgaggtggcacagcaagagatggagtatgaccacaagcgaatctcaaagttgtcagagcggctgatacagaatataatgaagagccttccagatgtggtgatgaatggggaccctaagcaccattatcccggctgtatcaacctctcctttgcatatgtggaaggggaaagtctgctgatggcactgaaggacgttgccttatcctcagggagtgcctgcacctctgcatccctggagccctcttatgtgcttagagcaattggcactgatgaggatttagcgcactcttctatcaggtttggaattggccgcttcactacagaggaggaagtggactacacagtggagaaatgcattcagcatgtgaagcgtcttcgagaaatgagccctctctgggagatggttcaggatggcattgacctcaagagcatcaagtggacccaacactagaagaatagggccctgactttgtgctggtctggcccctcctgcctcaccaacccgtgcacaaccagacaccttgttacacctagtggatgctctagattggtatagaccagttgacttcagcatcagtccacctctatgacagaaacacaagaaaactgtctttccctagcttcagttccttgggtgtggagcactccccatttcttctcgggtcttaaagtgtgtggacattttcatcccgaagccatagagacatttgctgtcatattgctgctgggcacatctgtgctcttggtgaggagagcaagaggaaccagaagaagtctctttggtcagggaccatgatgctctacatggacatttgagtcttcgtcttctgctgctgctcggctggaccagcttctttaacagcaagcataatccacttcaatgtaatattttctgtagctccaaaggctatctcttcatattgactgcagacagactgaatggacagtttcttagagggcttgtctcctttctacccttgtcctctttcctttcctttgacctaatggagctagaaatatgtctgtgactccaccagttattctaataatttgttttcttgaaaattgttaatttcaagactggagaaataaactcaccttctatttactctgtgactttatgagaggttgagggaaaagtggaagctgtacttgggaattgtggagaagaccgccactccatctgatttgcataaatgactcagtgggcttttgtatctcttcatttaagaattatttgaatgcctgccaggagccagatttgttctgggtattaggaatacactggttaacaggaccaaaaaagaccctgccctcactgagttttaaattttagtggagagatggaaaataattaaacaaataaacaatgttatagattgtg

SEQ ID NO: 1243 - protein, 457 aa, Homo sapiens
MLLRAAWRRAAVAVTAAPGPKPAAPTRGLRLRVGDRAPQSAVPADTAAAPEVGPVLRPLYMDVQATTPLDPRVLDAMLPYLINYYGNPHSRTHAYGWESEAAMERARQQVASLIGADPREIIFTSGATESNNIAIKGVARFYRSRKKHLITTQTEHKCVLDSCRSLEAEGFQVTYLPVQKSGIIDLKELEAAIQPDTSLVSVMTVNNEIGVKQPIAEIGRICSSRKVYFHTDAAQAVGKIPLDVNDMKIDLMSISGHKIYGPKGVGAIYIRRRPRVRVEALQSGGGQERGMRSGTVPTPLVVGLGAACEVAQQEMEYDHKRISKLSERLIQNIMKSLPDVVMNGDPKHHYPGCINLSFAYVEGESLLMALKDVALSSGSACTSASLEPSYVLRAIGTDEDLAHSSIRFGIGRFTTEEEVDYTVEKCIQHVKRLREMSPLWEMVQDGIDLKSIKWTQH

SEQ ID NO: 1244 - DNA, 477 bp, Homo sapiens
cttccgaagccgctgcagtcctgggccccaggctcccggaagtgctgcccggcgctccggaagcgattcatcgggccgcgagcgccctccccgtcgttttccgtgagagacgtagagctgagcgacccagcccgcgagcgaggtgagatgccggtggccgtgggtccctacggacagtcccagccaagctgcttcgaccgtgtcaaaatgggcttcgtgatgggttgcgccgtgggcatggcggccggggcgctcttcggcaccttttcctgtctcaggatcggaatgcggggtcgagagctgatgggcggcattgggaaaaccatgatgcagagtggcggcacctttggcacattcatggccattgggatgggcatccgatgctaaccatggttgccaactacatctgtcccttcccatcaatcccagcccatgtactaataaaagaaagtctttgagtaaaaaaaaaaaaaaaaa

SEQ ID NO: 1245 - protein, 79 aa, Homo sapiens
MPVAVGPYGQSQPSCFDRVKMGFVMGCAVGMAAGALFGTFSCLRIGMRGRELMGGIGKTMMQSGGTFGTFMAIGMGIRC

SEQ ID NO: 1246 - DNA, 2791 bp, Homo sapiens
tgtgtgtgtgtatgtgtgctggtgaatgtgagtacagggaagcagcggccgccatttcagggagcttgtcgacgctgtcgcaggggtggatcctgagctgccgaagccgccgtcctgctctcccgcgtgggcttctctaattccattgttttttttagattctctcgggcctagccgtccttggaacccgatattcgggctgggcggttccgcggcctgggcctaggggcttaacagtagcaacagaagcggcggcggcggcagcagcagcagcagcagcagcaatctcttcccgaacacgagcaccacaggcgcccgaaggccggaacaggcgtttagagaaaatggcagacgatattgatattgaagcaatgcttgaggctccttacaagaaggatgagaacaagttgagcagtgccaacggccatgaagaacgtagcaaaaagaggaaaaaaagcaagagcagaagtcgtagtcatgaacgaaagagaagcaaaagtaaggaacggaagcgaagtagagacagagaaaggaaaaagagcaaaagccgtgaaagaaagcgaagtagaagcaaagagaggcgacggagccgctcaagaagtcgagatcgaagatttagaggccgctacagaagtccttactccggaccaaaatttaacagtgccatccgaggaaagattgggttgcctcatagcatcaaattaagcagacgacgttcccgaagcaaaagtccattcagaaaagacaagagccctgtgagagaacctattgataatttaactcctgaggaaagagatgcaaggacagtcttctgtatgcagctggcggcaagaattcgaccaagggatttggaagagtttttctctacagtaggaaaggttcgagatgtgaggatgatttctgacagaaattcaagacgttccaaaggaattgcttatgtggagttcgtcgatgttagctcagtgcctctagcaataggattaactggccaacgagttttaggcgtgccaatcatagtacaggcatcacaggcagaaaaaaacagagctgcagcaatggcaaacaatttacaaaagggaagtgctggacctatgaggctttatgtgggctcattacacttcaacataactgaagatatgcttcgtgggatctttgagccttttggaagaattgaaagtatccagctgatgatggacagtgaaactggtcgatccaagggatatggatttattacattttctgactcagaatgtgccaaaaaggctttggaacaacttaatggatttgaactagcaggaagaccaatgaaagttggtcatgttactgaacgtactgatgcttcgagtgctagttcatttttggacagtgatgaactggaaaggactggaattgatttgggaacaactggtcgtcttcagttaatggcaagacttgcagagggtacaggtttgcagattccgccagcagcacagcaagctctacagatgagtggctctttggcatttggtgctgtggcagatttgcaaacaagactttcccagcagactgaagcttcagctttagctgcagctgcctctgttcagccacttgcaacacaatgtttccaactctctaacatgtttaaccctcaaacagaagaagaagttggatgggataccgagattaaggatgatgtgattgaagaatgtaataaacatggaggagttattcatatttatgttgacaaaaattcagctcagggcaatgtgtatgtgaagtgcccatcaattgctgcagctattgctgctgtcaatgcattgcatggcaggtggtttgctggtaaaatgataacagcagcatatgtacctcttccaacttaccacaacctgtttcctgattctatgacagcaacacagctactggttccaagtagacgatgaaggaagatatagtcccttatgtatatagctttttttctttcttgagaattcatcttgagttatcttttatttagataaaaataaagaggcaaggatctactgtcatttgtatgcaatttcctgttaccttgaaaaaataaaaatgttaacaggaatgcagtgtgctcattctccctaaatagtaaatcccactgtatacaaaactgttctcttgttctgccttttaaaatgttcatgtagaaaattaatgaactataggaatagctctaggagaacaaatgtgctttctgtaaaaaggcagaccagggatgtaatgtttttaatgtttcagaagcctaactttttacacagtggttacatttcacatttcactaatgttgatatttggctgatggttgagcagtttctgaaatacacatttagtgtatggaaatacaagacagctaaagggctgtttggttagcatctcatcttgcattctgatcaattggcaagaaagggagatttcaaaattatatttcttgatggtatcttttcaattaatgtatctgtaaaagtttctttgtaaatactatgtgttctggtgtgtcttaaaattccaaacaaaatgatccctgcatttcctgaagatgtttaaacgtgagagtctggtaggcaaagcagtctgagaaagaaataggaaatgcagaaataggttttgtctggttgcatataatctttgctctttttaagctctgtgagctctgaaatatatttttgggttacttcagtgtgtttgacaagacagcttgatatttctatcaaacaaatgactttcatattgcaacaatctttgtaagaaccactcaaataaaagtctcttaaaaaggcca

SEQ ID NO: 1247 - protein, 524 aa, Homo sapiens
MADDIDIEAMLEAPYKKDENKLSSANGHEERSKKRKKSKSRSRSHERKRSKSKERKRSRDRERKKSKSRERKRSRSKERRRSRSRSRDRRFRGRYRSPYSGPKFNSAIRGKIGLPHSIKLSRRRSRSKSPFRKDKSPVREPIDNLTPEERDARTVFCMQLAARIRPRDLEEFFSTVGKVRDVRMISDRNSRRSKGIAYVEFVDVSSVPLAIGLTGQRVLGVPIIVQASQAEKNRAAAMANNLQKGSAGPMRLYVGSLHFNITEDMLRGIFEPFGRIESIQLMMDSETGRSKGYGFITFSDSECAKKALEQLNGFELAGRPMKVGHVTERTDASSASSFLDSDELERTGIDLGTTGRLQLMARLAEGTGLQIPPAAQQALQMSGSLAFGAVADLQTRLSQQTEASALAAAASVQPLATQCFQLSNMFNPQTEEEVGWDTEIKDDVIEECNKHGGVIHIYVDKNSAQGNVYVKCPSIAAAIAAVNALHGRWFAGKMITAAYVPLPTYHNLFPDSMTATQLLVPSRR

SEQ ID NO: 1248 - DNA, 2809 bp, Homo sapiens
tgtgtgtgtgtatgtgtgctggtgaatgtgagtacagggaagcagcggccgccatttcagggagcttgtcgacgctgtcgcaggggtggatcctgagctgccgaagccgccgtcctgctctcccgcgtgggcttctctaattccattgttttttttagattctctcgggcctagccgtccttggaacccgatattcgggctgggcggttccgcggcctgggcctaggggcttaacagtagcaacagaagcggcggcggcggcagcagcagcagcagcagcagcaatctcttcccgaacacgagcaccacaggcgcccgaaggccggaacaggcgtttagagaaaatggcagacgatattgatattgaagcaatgcttgaggctccttacaagaaggatgagaacaagttgagcagtgccaacggccatgaagaacgtagcaaaaagaggaaaaaaagcaagagcagaagtcgtagtcatgaacgaaagagaagcaaaagtaaggaacggaagcgaagtagagacagagaaaggaaaaagagcaaaagccgtgaaagaaagcgaagtagaagcaaagagaggcgacggagccgctcaagaagtcgagatcgaagatttagaggccgctacagaagtccttactccggaccaaaatttaacagtgccatccgaggaaagattgggttgcctcatagcatcaaattaagcagacgacgttcccgaagcaaaagtccattcagaaaagacaagagccctgtgagagaacctattgataatttaactcctgaggaaagagatgcaaggacagtcttctgtatgcagctggcggcaagaattcgaccaagggatttggaagagtttttctctacagtaggaaaggttcgagatgtgaggatgatttctgacagaaattcaagacgttccaaaggaattgcttatgtggagttcgtcgatgttagctcagtgcctctagcaataggattaactggccaacgagttttaggcgtgccaatcatagtacaggcatcacaggcagaaaaaaacagagctgcagcaatggcaaacaatttacaaaagggaagtgctggacctatgaggctttatgtgggctcattacacttcaacataactgaagatatgcttcgtgggatctttgagccttttggaagaattgaaagtatccagctgatgatggacagtgaaactggtcgatccaagggatatggatttattacattttctgactcagaatgtgccaaaaaggctttggaacaacttaatggatttgaactagcaggaagaccaatgaaagttggtcatgttactgaacgtactgatgcttcgagtgctagttcatttttggacagtgatgaactggaaaggactggaattgatttgggaacaactggtcgtcttcagttaatggcaagacttgcagagggtacaggtttgcagattccgccagcagcacagcaagctctacagatgagtggctctttggcatttggtgctgtggcagaattctcttttgttatagatttgcaaacaagactttcccagcagactgaagcttcagctttagctgcagctgcctctgttcagccacttgcaacacaatgtttccaactctctaacatgtttaaccctcaaacagaagaagaagttggatgggataccgagattaaggatgatgtgattgaagaatgtaataaacatggaggagttattcatatttatgttgacaaaaattcagctcagggcaatgtgtatgtgaagtgcccatcaattgctgcagctattgctgctgtcaatgcattgcatggcaggtggtttgctggtaaaatgataacagcagcatatgtacctcttccaacttaccacaacctgtttcctgattctatgacagcaacacagctactggttccaagtagacgatgaaggaagatatagtcccttatgtatatagctttttttctttcttgagaattcatcttgagttatcttttatttagataaaaataaagaggcaaggatctactgtcatttgtatgcaatttcctgttaccttgaaaaaataaaaatgttaacaggaatgcagtgtgctcattctccctaaatagtaaatcccactgtatacaaaactgttctcttgttctgccttttaaaatgttcatgtagaaaattaatgaactataggaatagctctaggagaacaaatgtgctttctgtaaaaaggcagaccagggatgtaatgtttttaatgtttcagaagcctaactttttacacagtggttacatttcacatttcactaatgttgatatttggctgatggttgagcagtttctgaaatacacatttagtgtatggaaatacaagacagctaaagggctgtttggttagcatctcatcttgcattctgatcaattggcaagaaagggagatttcaaaattatatttcttgatggtatcttttcaattaatgtatctgtaaaagtttctttgtaaatactatgtgttctggtgtgtcttaaaattccaaacaaaatgatccctgcatttcctgaagatgtttaaacgtgagagtctggtaggcaaagcagtctgagaaagaaataggaaatgcagaaataggttttgtctggttgcatataatctttgctctttttaagctctgtgagctctgaaatatatttttgggttacttcagtgtgtttgacaagacagcttgatatttctatcaaacaaatgactttcatattgcaacaatctttgtaagaaccactcaaataaaagtctcttaaaaaggcca

SEQ ID NO: 1249 - protein, 530 aa, Homo sapiens
MADDIDIEAMLEAPYKKDENKLSSANGHEERSKKRKKSKSRSRSHERKRSKSKERKRSRDRERKKSKSRERKRSRSKERRRSRSRSRDRRFRGRYRSPYSGPKFNSAIRGKIGLPHSIKLSRRRSRSKSPFRKDKSPVREPIDNLTPEERDARTVFCMQLAARIRPRDLEEFFSTVGKVRDVRMISDRNSRRSKGIAYVEFVDVSSVPLAIGLTGQRVLGVPIIVQASQAEKNRAAAMANNLQKGSAGPMRLYVGSLHFNITEDMLRGIFEPFGRIESIQLMMDSETGRSKGYGFITFSDSECAKKALEQLNGFELAGRPMKVGHVTERTDASSASSFLDSDELERTGIDLGTTGRLQLMARLAEGTGLQIPPAAQQALQMSGSLAFGAVAEFSFVIDLQTRLSQQTEASALAAAASVQPLATQCFQLSNMFNPQTEEEVGWDTEIKDDVIEECNKHGGVIHIYVDKNSAQGNVYVKCPSIAAAIAAVNALHGRWFAGKMITAAYVPLPTYHNLFPDSMTATQLLVPSRR

SEQ ID NO: 1250 - DNA, 986 bp, Homo sapiens
atggataaaccattgcaaattaggaggcagaagttccaggtagtggtagcgatagatgctctggatcgagttgtaaagcccaaaatgaaaagagtcaagagattccttgagaagagagaaccaaaactcaatgaaaatattaaaaatgcaatgctgattaaagggggaaatgcaaacgcaacagtgacacaagtacttaaagatgtgtgtgcactgaaaaaaccatacggtgtactgtataaaaagaaaaatgttacaagaccttttgaggatcagacatcactggaattactttcaaagaagtcagattgttctttattcatgtttggctcctataataagaagcggccaaataatctagtaataggtcatatgtatgactaccatgtgctggatatgattgaattaggtattgagaattttgtctctctaaaagacattaagaacagtaaatgtcctgagggaacaaaacccatgctaatatttgctggtgatgatttcaatgtaacagaagattacagaagactaaaaagtcttcttactgatttcttcagaggccccacagtatcaaatatctgcctggctggattagaatatgttctgcacttcactgcactgaatgggaagatttactttcgaagatataagttgctgttgaagaaatctggttgcagaacaccacggattgaattggaagagataggaccctcattgaatctggttctgaggaggacacacctggcatccgatgacctttatacattatctatgaaaatgccaaaagctctcaagccaaagaagaagaaaaatatctccaatgatacttttggtacaacttatggaaggattcatatgtagaacgaagataagcaaactacaaaccaggaaaatgaaggggttgaagaagtgacctgcagaaaggataacagaagaccaggagaaaaagtcaaaaagaatttaaaagaaattatggaaaaaaaaaaaaa

SEQ ID NO: 1251 - protein, 285 aa, Homo sapiens
MDKPLQIRRQKFQVVVAIDALDRVVKPKMKRVKRFLEKREPKLNENIKNAMLIKGGNANATVTQVLKDVCALKKPYGVLYKKKNVTRPFEDQTSLELLSKKSDCSLFMFGSYNKKRPNNLVIGHMYDYHVLDMIELGIENFVSLKDIKNSKCPEGTKPMLIFAGDDFNVTEDYRRLKSLLTDFFRGPTVSNICLAGLEYVLHFTALNGKIYFRRYKLLLKKSGCRTPRIELEEIGPSLNLVLRRTHLASDDLYTLSMKMPKALKPKKKKNISNDTFGTTYGRIHM

SEQ ID NO: 1252 - DNA, 5899 bp, Homo sapiens
gggggtcacgtggtgcagagcacgcagagtccttctgtcggttggtcctggagcggcgcagccggagtggggccgtgaggagaataaaggcagccccgttgatgactgaaaatgacaaagcatccacctaacagacgaggaatcagctttgaagtgggagcccagttggaagcccgggaccgtttaaaaaactggtatccagctcacatagaagacattgactacgaggaaggaaaagtactcatccatttcaagcgttggaaccatcgttatgatgagtggttctgctgggacagtccttatttacgccctttagagaaaatacagctgaggaaagagggcttgcatgaagaggatggatcttctgaatttcaaataaatgagcaggtccttgcttgctggtctgattgtcgtttttacccggccaaagtcactgctgttaacaaggatggtacttacactgtgaaattttatgatggagtagttcagactgtcaaacatattcatgtcaaagctttttccaaagatcagaatattgtgggtaatgctaggcctaaagaaacagatcacaaaagtctttcatcatctcctgataaacgagagaagtttaaagaacagagaaaagcaacagtgaatgtgaagaaagacaaagaagataaacccttaaagacagaaaagcgacccaagcagcctgataaagaaggaaagttaatctgttctgaaaaggggaaagtgtcagagaaaagtcttcccaagaacgagaaggaagacaaggaaaacatttccgaaaatgacagagagtattctggagatgcccaagtggataagaaacctgaaaatgacattgtgaagagtccacaagaaaacttgagggaacccaaaagaaaacgaggcagacccccttccatagctcctactgctgtggattcaaactctcaaactttgcaaccaataacattggaactgagaagaaggaaaatatcaaaaggatgtgaagtcccattaaaacgtcctcggcttgacaaaaattcatcccaggaaaagtcaaaaaactactcggaaaacactgacaaagacttatcgaggagacgttcctccaggctgtccactaatgggacccatgagatcctagatcctgacttggttgtatcagatttggttgatacggatcctttgcaagacacgttgtctagtaccaaggaatctgaagaaggtcagttgaagtctgctttggaagctggccaggtctcatctgcactgacttgccactcctttggggatggatccggggctgcaggcttggagttgaactgcccatcaatgggagaaaacacgatgaaaacagaaccgacttctccccttgtggaattacaagagatttcgactgtggaagtaacaaatacttttaagaaaacagatgattttgggtcatctaatgcaccagctgtcgacctagaccataagtttagatgcaaagttgtggactgtttaaaatttttccgcaaagccaaactgttgcactatcacatgaagtatttccatggaatggagaagtcactggagccagaagagagcccgggaaagaggcatgtccaaaccaggggcccttcagcttcagacaagcccagccaggagaccctgaccaggaagcgggtctctgccagttccccaactacaaaagacaaggaaaagaataaagagaagaaattcaaggagtttgtgagagtgaagccaaagaagaaaaagaaaaagaaaaagaaaaccaaacctgaatgcccctgcagtgaggagatcagtgacacctcccaggaaccttctccacccaaggcatttgctgttaccaggtgtgggtcctcacacaagccaggggtccatatgagcccgcagcttcatggcccagaatctggacaccacaaagggaaagtgaaagcattggaggaggataatttgagtgagtcctcttctgagagctttctctggagtgatgatgagtatggccaagatgtggatgtgaccaccaacccagatgaggaacttgatggggatgaccgctatgacttcgaggtggtccgctgcatctgtgaggtccaggaggaaaatgacttcatgattcagtgtgaagagtgccagtgctggcagcatggggtctgcatgggattactggaagaaaatgtgcccgagaaatacacctgttatgtttgccaagaccctccaggtcagaggcctggcttcaagtactggtatgacaaggagtggctgagcaggggacatatgcatggcctggcatttctagaagagaactactcccatcagaatgccaagaagatcgtggccacccaccagcttcttggtgatgtgcagagagtgattgaggttctgcatggcctgcagctcaagatgagcatcttgcaaagccgggagcatcctgatctgccgctgtggtgccagccttggaaacagcactcaggggaggggagatctcatttcagaaacatccctgtcactgacaccaggagcaaggaggaagctccaagctatagaactttgaacggggcagtggagaagcccaggcccctggccctgcccctgccgcgttctgtggaggaatcctatatcaccagtgagcattgctaccagaagccccgcgcctattaccctgccgtggagcagaagctggtggtggagacgaggggctctgccctcgacgatgcggtcaaccccctccatgagaacggcgatgattccctttccccgcgcctgggctggcctctagaccaagacaggagcaagggggacagtgaccccaaacccggctccccaaaggtgaaggaatatgtctccaaaaaggccctaccagaagaagcccctgctcggaagctgctggacagaggtggagaggggctgctgagctcccagcaccagtggcagtttaacctgctgacccatgtggaatctcttcaggatgaagttacgcacaggatggactccattgagaaggagttggatgtgttggagagctggctggactacactggggaactggagccccctgagccgctggccaggcttccgcagctcaagcattgtatcaagcagctgctgatggacctgggcaaggtgcagcagatcgccctctgctgctcaacatgaaactgggcacccaaaactcatgggggcacaatcctggggcacctgcaggaggagcttcgcatatttaaataaataaacctagcatgctgaatgcacgtgacaccgactgacttcagggatctgggccaggagtgtggtggacattggacaaagaggccattttggctgcgggaggacactctgatctcgaagcctgccataaaggtagcaaatagactcttgggattcccctcttctgtgcacatcgttgaatgaagagagtctttttgcacaaacttcacttgaaattgtgccactgatgataaacggaatgagagccaaaaaagtttagttggagacagttgtaaattcaatttggagtttatttaattgacttttctatcacgttggggcacatgccaactccctggtttcttcctggcatggtgtttgggcagcaggcatcattttccttttctagcttcataggaatattgtgagctcaccatgctgtggaggttgggaaagagcagagtcttggctgccctgctttctccttaggactcttcacttttctcaccacatctcttgcatgacttcatggtactggggacaagtttgtatgccttcaccccagagctggctgggttatggcttttgtagcagagcccatacagcctatggaagaactagaatctcactcacagtaataagaatctaggaggaattccaaaccgaagcaggcagggtctggaacccaaaggacagcattttctacccacttcttaatattgacagcttccccgttctatttaatgtccaaaaatgtttcccaaaatttcaaactctttcactgtaaagatttgttacaaagaatgtggtttggggaattaccttattttatattgttgtaaacaaacttcaaattctacatgtgcgacttttctccttcctgaagggtgtttagtagtcagcgttttcagaattgttttgttactatactttaacattttacatttcctgtttgtattattttgtgagagcaaggtgatcatgctgcttaaggtccaggtacaacctatttgtaccttttgagacaatatttgtgttacttttgcaggttacggttccacatgtaattgctatattttgttttgtttttccttactaggcaaagttaaaatgttccatgctttgaggagtgacccatttcactactttgttttcttatcactaaaggcaaaaatcaaagcacagttgtccattaacacttataagttaattatgggtttatgagtctgtaatgttatatgctgcaaacatttactatgtaaacgtgaagtagccaataatatctcaatagtagtaacagtatctttagcgacctttggaatagttaagcacaggtcattgtggacatgaattcaggcctctgtactaaaatctatttcagggaatgttctgtctagtgatttgctcaccatttgatatataatgaattataggacaagtataagctgatctgctatagctgtccatcagagagaatacacgtggctataacatctataacaaaacgacgattcctctacaagaggctgtttctcactgctaacgttggtgtttctggcgtgggaagaaatgcacaggcgtgcatggcatgcacgttcagacagctgcattgtaagagttctgtcatgcagtctgaaaagggaagaaacaggatggctttctgtagccacacctgtgaggcgtgatgattgttgtattattagattactgatttttcttttctgaaaatacatttgagttttaatcacatctgtggaagctgtaacttttaaggtagtcaatttcatgtcttgttcaacgatgtaagcagaaactgaattgccctaattttgccaactggccattattgggattattgtttaaatttttggtaaaggaagtaatctcctttcattcattgtgacttttgttcttagggaagcagagaagactccccaagttcttataacctcattgtgcttccctaatttaaagccatgttgaggggctccattcccaattcctgggtcaaggtgaattaaccctatgttggagcactggaaaccgttatttgcaaacattgctgttaccatttagaaatatgtgcactatcagctgggtgcagtggctcacgtctgtaatcccagcactttgggaggccgaggcaggtggatcacctgaggtcaggagttcgagaccagcctggccaacagggtgaaaccccgtctctactaaaagtacaaaaattagctgggcgtggtggcggacgcctgtaatctcagctacttgggaggctgaagcaggagaggtgctggaacctgggaggcggaggttgaagtgagccgagattgcgctattgcactccagctcgggcgacaactgcaagactccatctcaaaaaaataaaaataaaagaaaagaaagaaatatgtgcactacctaagttttgtctttagaaaaactatccacctataaaaaattaccttgacaaaaatagttccggtttgactaatcattttgtttctttaagtggtaagtgtatgcaaggtggatccttgatgagccaacattgcactgtggatacatatctatgtttacgcgctattagaacagaaggcgctgtatatagaaatgttgctttgaagcaatatttgcaaaacacgcagacttctgtatctgtatttggaaaaaataaaacaggttcttgttaaaaaaaaaa

SEQ ID NO: 1253 - protein, 1012 aa, Homo sapiens
MTKHPPNRRGISFEVGAQLEARDRLKNWYPAHIEDIDYEEGKVLIHFKRWNHRYDEWFCWDSPYLRPLEKIQLRKEGLHEEDGSSEFQINEQVLACWSDCRFYPAKVTAVNKDGTYTVKFYDGVVQTVKHIHVKAFSKDQNIVGNARPKETDHKSLSSSPDKREKFKEQRKATVNVKKDKEDKPLKTEKRPKQPDKEGKLICSEKGKVSEKSLPKNEKEDKENISENDREYSGDAQVDKKPENDIVKSPQENLREPKRKRGRPPSIAPTAVDSNSQTLQPITLELRRRKISKGCEVPLKRPRLDKNSSQEKSKNYSENTDKDLSRRRSSRLSTNGTHEILDPDLVVSDLVDTDPLQDTLSSTKESEEGQLKSALEAGQVSSALTCHSFGDGSGAAGLELNCPSMGENTMKTEPTSPLVELQEISTVEVTNTFKKTDDFGSSNAPAVDLDHKFRCKVVDCLKFFRKAKLLHYHMKYFHGMEKSLEPEESPGKRHVQTRGPSASDKPSQETLTRKRVSASSPTTKDKEKNKEKKFKEFVRVKPKKKKKKKKKTKPECPCSEEISDTSQEPSPPKAFAVTRCGSSHKPGVHMSPQLHGPESGHHKGKVKALEEDNLSESSSESFLWSDDEYGQDVDVTTNPDEELDGDDRYDFEVVRCICEVQEENDFMIQCEECQCWQHGVCMGLLEENVPEKYTCYVCQDPPGQRPGFKYWYDKEWLSRGHMHGLAFLEENYSHQNAKKIVATHQLLGDVQRVIEVLHGLQLKMSILQSREHPDLPLWCQPWKQHSGEGRSHFRNIPVTDTRSKEEAPSYRTLNGAVEKPRPLALPLPRSVEESYITSEHCYQKPRAYYPAVEQKLVVETRGSALDDAVNPLHENGDDSLSPRLGWPLDQDRSKGDSDPKPGSPKVKEYVSKKALPEEAPARKLLDRGGEGLLSSQHQWQFNLLTHVESLQDEVTHRMDSIEKELDVLESWLDYTGELEPPEPLARLPQLKHCIKQLLMDLGKVQQIALCCST

SEQ ID NO: 1254 - DNA, 916 bp, Homo sapiens
ggacgcagagaagccagagactttcgcttccggctgccgcaggcgcttcgctggtgcaggtaagctccgcacactctcggccggtcccgagtccgactccctcaagggtgacgcgagctctgccctttaaccggaaacgtctccctgctcaccccacccccgcgcagacgcagtgctgagcacacagctaccggacaaagagtgacgcccggagctggagttatggcggctacggagccgatcttggcggccactgggagtcccgcggcggtgccaccggagaaactggaaggagccggttcgagctcagcccctgagcgtaactgtgtgggctcctcgctgccagaggcctcaccgcctgcccctgagccttccagtcccaacgccgcggtccctgaagccatccctacgccccgagctgcggcctccgcggccctggagctgcctctcgggcccgcacccgtgagcgtagcgcctcaggccgaagctgaagcgcgctccacaccaggccccgccggctctagactcggtcccgagacgttccgccagcgtttccggcagttccgctaccaggatgcggcgggtccccgggaggctttccggcagctgcgggagctgtcccgccagtggctgcggcctgacatccgcaccaaggagcagatcgtggagatgctggtgcaagagcagctgctcgccatcctgcccgaggcggctcgggcccggcggatccgccgccgcacggatgtgcgcatcactggctgagcggtggagctgcgggcggccagggccgggcgctctgtgcggactggggccatgatcgggcccgggggcctgagcctgggaccccaccccgtgttaatgaaaaatgagttttggcagcgccaaaaaaaaaaaaaaaaaaaaaaaaaaaaaaaaa

SEQ ID NO: 1255 - protein, 179 aa, Homo sapiens
MAATEPILAATGSPAAVPPEKLEGAGSSSAPERNCVGSSLPEASPPAPEPSSPNAAVPEAIPTPRAAASAALELPLGPAPVSVAPQAEAEARSTPGPAGSRLGPETFRQRFRQFRYQDAAGPREAFRQLRELSRQWLRPDIRTKEQIVEMLVQEQLLAILPEAARARRIRRRTDVRITG

SEQ ID NO: 1256 - DNA, 840 bp, Homo sapiens
ggacgcagagaagccagagactttcgcttccggctgccgcaggcgcttcgctggtgcagacgcagtgctgagcacacagctaccggacaaagagtgacgcccggagctggagttatggcggctacggagccgatcttggcggccactgggagtcccgcggcggtgccaccggagaaactggaaggagccggttcgagctcagcccctgagcgtaactgtgtgggctcctcgctgccagaggcctcaccgcctgcccctgagccttccagtcccaacgccgcggtccctgaagccatccctacgccccgagctgcggcctccgcggccctggagctgcctctcgggcccgcacccgtgagcgtagcgcctcaggccgaagctgaagcgcgctccacaccaggccccgccggctctagactcggtcccgagacgttccgccagcgtttccggcagttccgctaccaggatgcggcgggtccccgggaggctttccggcagctgcgggagctgtcccgccagtggctgcggcctgacatccgcaccaaggagcagatcgtggagatgctggtgcaagagcagctgctcgccatcctgcccgaggcggctcgggcccggcggatccgccgccgcacggatgtgcgcatcactggctgagcggtggagctgcgggcggccagggccgggcgctctgtgcggactggggccatgatcgggcccgggggcctgagcctgggaccccaccccgtgttaatgaaaaatgagttttggcagcgccaaaaaaaaaaaaaaaaaaaaaaaaaaaaaaaaaaaaaaaaaaaaaaaaaaaaaaaaaaaaaaaaa

SEQ ID NO: 1257 - protein, 179 aa, Homo sapiens; identical to SEQ ID NO: 1255

SEQ ID NO: 1258 - DNA, 1927 bp, Homo sapiens
agctgatggtatggtaggaggagtggagtggagctcttgccttgttactgaggaaatctatttgtttctagtattactggatttttggggaaaaatttgtagtcctccccttgaaaggcaaaggggctagttgtgccatttgcctgcacaggaaccatgaggagacatatggtaacttatgcctggcagctcctgaagaaggaactgggactgtaccagctcgccatggatatcatcataatgatccgagtgtgtaaaatgttccgccaaggcctcaggggattccgggaatatcaaatcattgagactgctcactggaagcaccctatcttctccttctgggataaaaagatgcaaagccgagtcacatttgataccatggacttcattgcagaggagggtcactttcctccaaaggccattcagatcatgcagaagaagccttcctggagaacagaggatgagatccaggccgtctgtaacatcttgcaggttctggatagctatcggaactacgcagagcccctgcagctgctcctggccaaagtcatgcgctttgaacggtttggtcgcaggcgtgtgatcatcaagaaggggcagaagggcaacagcttttatttcatctacctgggcacagttgcaataaccaaggacgaggatggcagcagtgccttcctagatccccacccgaaattgctgcacaagggtagctgttttggggaaatggacgttctgcatgcttcagtgaggaggtccaccatcgtctgtatggaagaaacggagttcctggttgttgaccgggaggacttctttgctaataagctggaccaggaagttcagaaggatgctcagtatcggtttgaattttttaggaagatggagctgtttgcatcatggtctgatgagaagctctggcagctggtagccatggcgaagatagagaggttctcgtatgggcagctgatctcaaaagattttggagagtcacccttcatcatgtttatcagcaagggcagctgtgaagtcctgcggctgttggaccttggggcctccccttcctaccgtagatggatctggcagcacctggagctgatagatggcagacctctgaagacccacctgagtgaatactctcctatggaaagatttaaggaattccagatcaaatcatatcctctgcaagactttagctccttgaaacttccacatctcaaaaaagcctgggggctacaggggacaagcttcagcaggaagatcagaacctcaggagacactctctccaagatgctgggcccgaagatccaatccaggcctgctcagtcgatcaaatgtgccatgatcaatatcaagcctggtgagctccccaaggaggctgcagtgggggcctacgtgaaggtgcacactgtggagcagggagaaattttggccttccttccagagggtgaatgcgacacacgacccttgatcctgatgagcctgggaaatgagttgatacggataaggaaggaaatattttatgaactgattgacaatgatgacgagatgataaaaaagttgttaaagctcaatattgcattccccagtgatgaagatatgtgccagaagttcctccagcagaacagctggaatatctttcggaaggacctgttgcagctgctcgtggagccttgccaaagtcaactgttcactccaaaccggcccaagaagagagagatctacaaccctaagtctgtggtcctggatttgtgcagcatcaacaagacgactaagcctcgttatcctatttttatggcaccccagaaatacctccccccattgaggattgtccaagccatcaaagcacctcggtacaaaatccgagaactcttggcttagtgtaagagcacaggggtccttatttaggacaaataaaggatggtggattggg

SEQ ID NO: 1259 - protein, 572 aa, Homo sapiens
MRRHMVTYAWQLLKKELGLYQLAMDIIIMIRVCKMFRQGLRGFREYQIIETAHWKHPIFSFWDKKMQSRVTFDTMDFIAEEGHFPPKAIQIMQKKPSWRTEDEIQAVCNILQVLDSYRNYAEPLQLLLAKVMRFERFGRRRVIIKKGQKGNSFYFIYLGTVAITKDEDGSSAFLDPHPKLLHKGSCFGEMDVLHASVRRSTIVCMEETEFLVVDREDFFANKLDQEVQKDAQYRFEFFRKMELFASWSDEKLWQLVAMAKIERFSYGQLISKDFGESPFIMFISKGSCEVLRLLDLGASPSYRRWIWQHLELIDGRPLKTHLSEYSPMERFKEFQIKSYPLQDFSSLKLPHLKKAWGLQGTSFSRKIRTSGDTLSKMLGPKIQSRPAQSIKCAMINIKPGELPKEAAVGAYVKVHTVEQGEILAFLPEGECDTRPLILMSLGNELIRIRKEIFYELIDNDDEMIKKLLKLNIAFPSDEDMCQKFLQQNSWNIFRKDLLQLLVEPCQSQLFTPNRPKKREIYNPKSVVLDLCSINKTTKPRYPIFMAPQKYLPPLRIVQAIKAPRYKIRELLA

SEQ ID NO: 1260 - DNA, 6276 bp, Homo sapiens
agtcggcatccatcagcgggcgggggtgtcgccgaacaggctgctccgcagagcccgccgcgaccccgcgccgccccgccccgcggcctgcctgccagaggagccgagggggccgcccctcgcccaacctgcccgacatggggaaccccgggcccaggcgtgctggtcaccatgacaacagagacaggccccgactctgaggtgaagaaagctcaggaggaggccccgcagcagcccgaggctgctgccgctgtgaccacccctgtgacccctgcaggccacggccacccagaggccaactccaatgagaagcatccatcccagcaggacacgcggcctgctgaacagagcctagacatggaggagaaggactacagtgaggccgatggcctttcggagaggaccacgcccagcaaggcccagaaatcgccccagaagattgccaagaaatacaagagtgccatctgccgggtcactctgcttgatgcctcggagtatgagtgtgaggtggagaaacatggccggggccaggtgctgtttgacctggtctgtgaacacctcaacctcctagagaaggactacttcggcctgaccttctgtgatgctgacagccagaagaactggctggacccctccaaggagatcaagaagcagatccggagtagcccctggaattttgccttcacagtcaagttctacccgcctgatcctgcccagctgacagaagacatcacaagatactacctgtgcctgcagctgcgggcagacatcatcacgggccggctgccatgctcctttgtcacgcatgccctactgggctcctacgctgtgcaggctgagctgggtgactatgatgctgaggagcatgtgggcaactatgtcagcgagctccgcttcgcccctaaccagacccgggagctggaggagaggatcatggagctgcataagacatatagggggatgaccccgggagaagcagaaatccacttcttagagaatgccaagaagctttccatgtacggagtagacctgcaccatgccaaggactctgagggcatcgacatcatgttaggcgtttgtgccaatggcctgctcatctaccgggaccggctgagaatcaaccgctttgcctggcccaagatcctcaagatctcctacaagaggagtaacttctatatcaagatccggcctggggagtatgagcaatttgagagcacaattggctttaagctcccaaaccaccggtcagccaagagactgtggaaggtctgcatcgagcatcatacattcttccggctggtgtcccctgagcccccacccaagggcttcctggtgatgggctccaagttccggtacagtgggaggacccaggcacagactcgccaggccagcgccctcattgaccggcctgcacccttctttgagcgttcttccagcaaacggtacaccatgtcccgcagccttgatggagcagagttctcccgcccagcctcggtcagcgagaaccatgatgcagggcctgacggtgacaagcgggatgaggatggcgagtctggggggcaacggtcagaggctgaggagggagaggtcaggactccaaccaagatcaaggagctaaagccggagcaggaaaccacgccgagacacaagcaggagttcttagacaagccagaagatgtcttgctgaagcaccaggccagcatcaatgagctcaaaaggaccctgaaggagcccaacagcaaactcatccaccgggatcgagactgggaacgggagcgcaggctgccctcctcccccgcctccccctcccccaagggcacccctgagaaagccaatgagagagcagggctgagggagggctccgaggagaaagtcaaaccaccacgtccccgggccccagagagtgacacaggcgatgaggaccaggaccaggagagggacacggtgttcctgaaggacaaccacctggccattgagcgcaagtgctccagcatcacggtcagctctacgtctagcctggaggctgaggtggacttcacggtcattggtgactaccatggcagcgccttcgaagacttctcccgcagcctgcctgagctcgaccgggacaaaagcgactcggacactgagggcctgctgttctcccgggatctcaacaagggggcccccagccaggatgatgagtctgggggcattgaggacagcccggatcgaggggcctgctccaccccggatatgccccagtttgagcccgtgaaaacagaaaccatgactgtcagcagtctggccattagaaagaagattgagccggaggccgtactgcagaccagagtctccgctatggataacacccagcaggttgatgggagtgcctcagtggggagggagttcatagcaaccactccctccatcaccacggagaccatatcgaccaccatggagaacagtctcaagtccgggaagggggcagctgccatgatcccaggcccacagacggtggccacggaaatccgttctctttctccgatcatcgggaaagatgtcctcaccagcacctacggcgccactgcggaaaccctctcaacctccaccaccacccatgtcaccaaaactgtgaaaggagggttttctgagacaaggatcgagaagcgaatcatcattactggggatgaagatgtcgatcaagaccaggccctggctttggccatcaaggaggccaaactgcagcatcctgatatgctggtaaccaaagctgtcgtatacagagaaacagacccatccccagaggagagggacaagaagccacaggaatcctgacctctgtgaagagatcctggcatttctggtccaacccaagccagagaaccattaagaaggggccttcattctggattctccgacgcaacactgacgtcccagctgcgacgtactgtcactgatgagagactgggaagggaaaagcatatatatatagatatatagagatatagatatatatacaggaaacaccgcatccttgcactgctgctggggctggcagagcagttggctgacagcaacaaccgacatctgaacacctacatttcctttgcagacaaattgaagaactggtgggatttttttcaagaaaaaaaattatataataactataatcccttgctcacccctttcccccgccaaataagaaacgcaagccagaccacgatgattgtagaagtccctcccgccctggttctgcacgttacagttagcagacgagcaattccatttgttcttctccagcatctctaaggcccacttgaatgcaaaggaaaacacttgcacagcaaagcaagagaagtcacagcagcaagacacgcacagtcaaccattttccgagaaaaaaagaaaattccccacttggaaagaaagaggaggaacactggattcttactttctggatcttgacactgggctgcaaaacctaccttcctctctcccgcctcccctcaccctcaactctcaatgtcttgctgtcattttctgtctcggctccctcctcccccttcccccttcccccaccccacacccttcaccctctgtgtcctggtccttctgagggccactgcagatgactctcctttgaaatgagaaaaagaaaagaaagcaagaacagaaaacgaagccacaggaagggaagtagacattgtatgcttatggtttctcattatgaaggtgcagcttgtaggaggtttgtacggatgtgctttgaagttatgtatattacatataacaggaaaaaatattaaaataaacagtgctggtaagtatgaagctgacattctaaaattataattatctgactgtgattgatgtatcctgaggttcctagatctcactgaactggcccagctaaggagacctggactctgggtgtgggttggctcacagtaggggctgacgggttcagtgtagtaatactgtgtgtggtgtttgtaattggttgattggtggggaggggtggggggccctaatggagaggtgtgggtttggcaagaaagaagcaacacagatgtcgtccccaaaatgccagttcaagacaccttctccctgcccccctggtagtaacagtcagggcctggtctgtgctcaggtactgggtcccagtctgggactctgctgctgaagttgccacagtagaggtccctggcttagtccttatctccctacggggcttgccttggttttcagtcttctctctctttctctcttttttttttttttgccacattctgcccttccctgaccccattgtaataaccaactccatatccaaagggaggtggtgctctcagccattgtagaagatggtggctttaacctgactgtctaaaaattcccagctaagccttttcctctactctcttccttgttctgaatcatttcttcttctcaggccaaagtagccatggtaaggaggcttcatggggcagaccctgaaagatcaaaactgcatttgcaaagccctcccctgtcccaggacaaagctgagactgacgggtgatgttgctcataggctccagctctgcataagaccttggcttggagacctccctctcagtcaacagctgaactctgagcttgtgcccagaaattaccccaagaccacaggaacccttcaagaagctcccatcacaagcttggcattgctctctgccacacgtgggcttcctcaggcttgtctgccacaagctacttctctgagctcagaaagtgccccttgatgagggaaaatgtcccactgcactgcgaatttctcagttccattttacctcccagtcctccttctaaaccagttaataaattcattccacaagtatttactgattacctgcttgtgccagggactattctcaggctgaagaaggtgggaggggagggcggaacctgaggagccacctgagccagctttatatttcaaccatggctggcccatctgagagcatctccccactctcgccaacctatcggggcatagcccagggatgcccccaggcggcccaggttagatgcgtccctttggcttgtcagtgatgacatacaccttagctgcttagctggtgctggcctgaggcagggcaggaaatcagaatagcatttgcttctctgggcaaatgggaagttcagcggggcagcagaatcagtggcattccccctggtgcaggccggtgggtccactccaactccccctgagtgtagcagcacactttccatacaccaggttctttctacaatcctggtggaaaagccacagaaccttcttcctgcccttcttgagagttccccctctttctgggtcaagagctggagtggtggctccatcctctctgggccacttcggtctaggaactcatctttgcaggaaccaggagtcctgagcacactgaacacacctcagagggaggatccttgttgtggattttgcacctggctttggggcaggggtgaagtgaccaggcttagcttgtggagtttatgggccaccagggtttggggaaatcaccatcccgcggatgctgtgacctcccttctacggagatgcaggcagtgccacgagggaggaggggacctgcaaagctagaatctagggcactgtttcctccccatccttctctttgtagagaatagagacgtttgtcttgtctgtcttcaacctacttttccttttctcttttttgtttctcatcctctctgtgccacctctccacccaggaggccatgtagcatagtggaaaaagtccctgagggcggttaggagttctgggtgaccatcctggctcagctcctaactcaccatgtgacatcaggctatccccattccccctcttgggcctcagtttcccgacttgcaaaataagcagaaagaaccagatgctctccagggtctttttctactttgctatctcatgggtcttcattttctcttattttgttttctctggatcttttccatctgagggtacaggaagtaccaggacctgtttcagtttttgaatcctgcaagcacattccaagactggcctgaaactgcatgagcaacatcactcgaaataattttttttttcaaaagcaccttaacaaccaattgcgatgctgtcctgttcctttttactcacacccttctctcctttctcgtccccatgctcccccacctcagtgctccgtgctgtatgcgtgtgctctctgttcttgtatactcaatataagtgaaataaatgtgtttgatgctgaaccata

SEQ ID NO: 1261 - protein, 881 aa, Homo sapiens
MTTETGPDSEVKKAQEEAPQQPEAAAAVTTPVTPAGHGHPEANSNEKHPSQQDTRPAEQSLDMEEKDYSEADGLSERTTPSKAQKSPQKIAKKYKSAICRVTLLDASEYECEVEKHGRGQVLFDLVCEHLNLLEKDYFGLTFCDADSQKNWLDPSKEIKKQIRSSPWNFAFTVKFYPPDPAQLTEDITRYYLCLQLRADIITGRLPCSFVTHALLGSYAVQAELGDYDAEEHVGNYVSELRFAPNQTRELEERIMELHKTYRGMTPGEAEIHFLENAKKLSMYGVDLHHAKDSEGIDIMLGVCANGLLIYRDRLRINRFAWPKILKISYKRSNFYIKIRPGEYEQFESTIGFKLPNHRSAKRLWKVCIEHHTFFRLVSPEPPPKGFLVMGSKFRYSGRTQAQTRQASALIDRPAPFFERSSSKRYTMSRSLDGAEFSRPASVSENHDAGPDGDKRDEDGESGGQRSEAEEGEVRTPTKIKELKPEQETTPRHKQEFLDKPEDVLLKHQASINELKRTLKEPNSKLIHRDRDWERERRLPSSPASPSPKGTPEKANERAGLREGSEEKVKPPRPRAPESDTGDEDQDQERDTVFLKDNHLAIERKCSSITVSSTSSLEAEVDFTVIGDYHGSAFEDFSRSLPELDRDKSDSDTEGLLFSRDLNKGAPSQDDESGGIEDSPDRGACSTPDMPQFEPVKTETMTVSSLAIRKKIEPEAVLQTRVSAMDNTQQVDGSASVGREFIATTPSITTETISTTMENSLKSGKGAAAMIPGPQTVATEIRSLSPIIGKDVLTSTYGATAETLSTSTTTHVTKTVKGGFSETRIEKRIIITGDEDVDQDQALALAIKEAKLQHPDMLVTKAVVYRETDPSPEERDKKPQES

SEQ ID NO: 1262 - DNA, 5863 bp, Homo sapiens
gtgcctgactgacagaagttcttgcccccggggagctggtgtggacagaggagggagcctagacatggaggagaaggactacagtgaggccgatggcctttcggagaggaccacgcccagcaaggcccagaaatcgccccagaagattgccaagaaatacaagagtgccatctgccgggtcactctgcttgatgcctcggagtatgagtgtgaggtggagaaacatggccggggccaggtgctgtttgacctggtctgtgaacacctcaacctcctagagaaggactacttcggcctgaccttctgtgatgctgacagccagaagaactggctggacccctccaaggagatcaagaagcagatccggagtagcccctggaattttgccttcacagtcaagttctacccgcctgatcctgcccagctgacagaagacatcacaagatactacctgtgcctgcagctgcgggcagacatcatcacgggccggctgccatgctcctttgtcacgcatgccctactgggctcctacgctgtgcaggctgagctgggtgactatgatgctgaggagcatgtgggcaactatgtcagcgagctccgcttcgcccctaaccagacccgggagctggaggagaggatcatggagctgcataagacatatagggggatgaccccgggagaagcagaaatccacttcttagagaatgccaagaagctttccatgtacggagtagacctgcaccatgccaaggactctgagggcatcgacatcatgttaggcgtttgtgccaatggcctgctcatctaccgggaccggctgagaatcaaccgctttgcctggcccaagatcctcaagatctcctacaagaggagtaacttctatatcaagatccggcctggggagtatgagcaatttgagagcacaattggctttaagctcccaaaccaccggtcagccaagagactgtggaaggtctgcatcgagcatcatacattcttccggctggtgtcccctgagcccccacccaagggcttcctggtgatgggctccaagttccggtacagtgggaggacccaggcacagactcgccaggccagcgccctcattgaccggcctgcacccttctttgagcgttcttccagcaaacggtacaccatgtcccgcagccttgatggagcagagttctcccgcccagcctcggtcagcgagaaccatgatgcagggcctgacggtgacaagcgggatgaggatggcgagtctggggggcaacggtcagaggctgaggagggagaggtcaggactccaaccaagatcaaggagctaaagttcttagacaagccagaagatgtcttgctgaagcaccaggccagcatcaatgagctcaaaaggaccctgaaggagcccaacagcaaactcatccaccgggatcgagactgggaacgggagcgcaggctgccctcctcccccgcctccccctcccccaagggcacccctgagaaagccaatgagagagcagggctgagggagggctccgaggagaaagtcaaaccaccacgtccccgggccccagagagtgacacaggcgatgaggaccaggaccaggagagggacacggtgttcctgaaggacaaccacctggccattgagcgcaagtgctccagcatcacggtcagctctacgtctagcctggaggctgaggtggacttcacggtcattggtgactaccatggcagcgccttcgaagacttctcccgcagcctgcctgagctcgaccgggacaaaagcgactcggacactgagggcctgctgttctcccgggatctcaacaagggggcccccagccaggatgatgagtctgggggcattgaggacagcccggatcgaggggcctgctccaccccggatatgccccagtttgagcccgtgaaaacagaaaccatgactgtcagcagtctggccattagaaagaagattgagccggaggccgtactgcagaccagagtctccgctatggataacacccaggagaacagtctcaagtccgggaagggggcagctgccatgatcccaggcccacagacggtggccacggaaatccgttctctttctccgatcatcgggaaagatgtcctcaccagcacctacggcgccactgcggaaaccctctcaacctccaccaccacccatgtcaccaaaactgtgaaaggagggttttctgagacaaggatcgagaagcgaatcatcattactggggatgaagatgtcgatcaagaccaggccctggctttggccatcaaggaggccaaactgcagcatcctgatatgctggtaaccaaagctgtcgtatacagagaaacagacccatccccagaggagagggacaagaagccacaggaatcctgacctctgtgaagagatcctggcatttctggtccaacccaagccagagaaccattaagaaggggccttcattctggattctccgacgcaacactgacgtcccagctgcgacgtactgtcactgatgagagactgggaagggaaaagcatatatatatagatatatagagatatagatatatatacaggaaacaccgcatccttgcactgctgctggggctggcagagcagttggctgacagcaacaaccgacatctgaacacctacatttcctttgcagacaaattgaagaactggtgggatttttttcaagaaaaaaaattatataataactataatcccttgctcacccctttcccccgccaaataagaaacgcaagccagaccacgatgattgtagaagtccctcccgccctggttctgcacgttacagttagcagacgagcaattccatttgttcttctccagcatctctaaggcccacttgaatgcaaaggaaaacacttgcacagcaaagcaagagaagtcacagcagcaagacacgcacagtcaaccattttccgagaaaaaaagaaaattccccacttggaaagaaagaggaggaacactggattcttactttctggatcttgacactgggctgcaaaacctaccttcctctctcccgcctcccctcaccctcaactctcaatgtcttgctgtcattttctgtctcggctccctcctcccccttcccccttcccccaccccacacccttcaccctctgtgtcctggtccttctgagggccactgcagatgactctcctttgaaatgagaaaaagaaaagaaagcaagaacagaaaacgaagccacaggaagggaagtagacattgtatgcttatggtttctcattatgaaggtgcagcttgtaggaggtttgtacggatgtgctttgaagttatgtatattacatataacaggaaaaaatattaaaataaacagtgctggtaagtatgaagctgacattctaaaattataattatctgactgtgattgatgtatcctgaggttcctagatctcactgaactggcccagctaaggagacctggactctgggtgtgggttggctcacagtaggggctgacgggttcagtgtagtaatactgtgtgtggtgtttgtaattggttgattggtggggaggggtggggggccctaatggagaggtgtgggtttggcaagaaagaagcaacacagatgtcgtccccaaaatgccagttcaagacaccttctccctgcccccctggtagtaacagtcagggcctggtctgtgctcaggtactgggtcccagtctgggactctgctgctgaagttgccacagtagaggtccctggcttagtccttatctccctacggggcttgccttggttttcagtcttctctctctttctctcttttttttttttttgccacattctgcccttccctgaccccattgtaataaccaactccatatccaaagggaggtggtgctctcagccattgtagaagatggtggctttaacctgactgtctaaaaattcccagctaagccttttcctctactctcttccttgttctgaatcatttcttcttctcaggccaaagtagccatggtaaggaggcttcatggggcagaccctgaaagatcaaaactgcatttgcaaagccctcccctgtcccaggacaaagctgagactgacgggtgatgttgctcataggctccagctctgcataagaccttggcttggagacctccctctcagtcaacagctgaactctgagcttgtgcccagaaattaccccaagaccacaggaacccttcaagaagctcccatcacaagcttggcattgctctctgccacacgtgggcttcctcaggcttgtctgccacaagctacttctctgagctcagaaagtgccccttgatgagggaaaatgtcccactgcactgcgaatttctcagttccattttacctcccagtcctccttctaaaccagttaataaattcattccacaagtatttactgattacctgcttgtgccagggactattctcaggctgaagaaggtgggaggggagggcggaacctgaggagccacctgagccagctttatatttcaaccatggctggcccatctgagagcatctccccactctcgccaacctatcggggcatagcccagggatgcccccaggcggcccaggttagatgcgtccctttggcttgtcagtgatgacatacaccttagctgcttagctggtgctggcctgaggcagggcaggaaatcagaatagcatttgcttctctgggcaaatgggaagttcagcggggcagcagaatcagtggcattccccctggtgcaggccggtgggtccactccaactccccctgagtgtagcagcacactttccatacaccaggttctttctacaatcctggtggaaaagccacagaaccttcttcctgcccttcttgagagttccccctctttctgggtcaagagctggagtggtggctccatcctctctgggccacttcggtctaggaactcatctttgcaggaaccaggagtcctgagcacactgaacacacctcagagggaggatccttgttgtggattttgcacctggctttggggcaggggtgaagtgaccaggcttagcttgtggagtttatgggccaccagggtttggggaaatcaccatcccgcggatgctgtgacctcccttctacggagatgcaggcagtgccacgagggaggaggggacctgcaaagctagaatctagggcactgtttcctccccatccttctctttgtagagaatagagacgtttgtcttgtctgtcttcaacctacttttccttttctcttttttgtttctcatcctctctgtgccacctctccacccaggaggccatgtagcatagtggaaaaagtccctgagggcggttaggagttctgggtgaccatcctggctcagctcctaactcaccatgtgacatcaggctatccccattccccctcttgggcctcagtttcccgacttgcaaaataagcagaaagaaccagatgctctccagggtctttttctactttgctatctcatgggtcttcattttctcttattttgttttctctggatcttttccatctgagggtacaggaagtaccaggacctgtttcagtttttgaatcctgcaagcacattccaagactggcctgaaactgcatgagcaacatcactcgaaataattttttttttcaaaagcaccttaacaaccaattgcgatgctgtcctgttcctttttactcacacccttctctcctttctcgtccccatgctcccccacctcagtgctccgtgctgtatgcgtgtgctctctgttcttgtatactcaatataagtgaaataaatgtgtttgatgctgaaccata

SEQ ID NO: 1263 - protein, 779 aa, Homo sapiens
MEEKDYSEADGLSERTTPSKAQKSPQKIAKKYKSAICRVTLLDASEYECEVEKHGRGQVLFDLVCEHLNLLEKDYFGLTFCDADSQKNWLDPSKEIKKQIRSSPWNFAFTVKFYPPDPAQLTEDITRYYLCLQLRADIITGRLPCSFVTHALLGSYAVQAELGDYDAEEHVGNYVSELRFAPNQTRELEERIMELHKTYRGMTPGEAEIHFLENAKKLSMYGVDLHHAKDSEGIDIMLGVCANGLLIYRDRLRINRFAWPKILKISYKRSNFYIKIRPGEYEQFESTIGFKLPNHRSAKRLWKVCIEHHTFFRLVSPEPPPKGFLVMGSKFRYSGRTQAQTRQASALIDRPAPFFERSSSKRYTMSRSLDGAEFSRPASVSENHDAGPDGDKRDEDGESGGQRSEAEEGEVRTPTKIKELKFLDKPEDVLLKHQASINELKRTLKEPNSKLIHRDRDWERERRLPSSPASPSPKGTPEKANERAGLREGSEEKVKPPRPRAPESDTGDEDQDQERDTVFLKDNHLAIERKCSSITVSSTSSLEAEVDFTVIGDYHGSAFEDFSRSLPELDRDKSDSDTEGLLFSRDLNKGAPSQDDESGGIEDSPDRGACSTPDMPQFEPVKTETMTVSSLAIRKKIEPEAVLQTRVSAMDNTQENSLKSGKGAAAMIPGPQTVATEIRSLSPIIGKDVLTSTYGATAETLSTSTTTHVTKTVKGGFSETRIEKRIIITGDEDVDQDQALALAIKEAKLQHPDMLVTKAVVYRETDPSPEERDKKPQES

SEQ ID NO: 1264 - DNA, 5205 bp, Homo sapiens
gagccgccgccgggtcccgctcgtctgccgcctcagcctcagccccaacctcagccgccgccgttgcgcttgctcccgggcggtcctggcctgtgccgccgccgcccccagcgtcggagccatggcgggcgccgcgtccccttgcgccaacggctgcgggcccggcgcgccctcggacgccgaggtgctgcacctctgccgcagcctcgaggtgggcaccgtcatgactttgttctactccaagaagtcgcagcgacccgagcggaagaccttccaggtcaagctggagacgcgccagatcacgtggagccggggcgccgacaagatcgagggggccattgacattcgtgaaattaaggagatccgcccagggaagacctcacgggactttgatcgctatcaagaggacccagctttccggccggaccagtcacattgctttgtcattctctatggaatggaatttcgcctgaaaacgctgagcctgcaagccacatctgaggatgaagtgaacatgtggatcaagggcttaacttggctgatggaggatacattgcaggcacccacacccctgcagattgagaggtggctccggaagcagttttactcagtggatcggaatcgtgaggatcgtatatcagccaaggacctgaagaacatgctgtcccaggtcaactaccgggtccccaacatgcgcttcctccgagagcggctgacggacctggagcagcgcagcggggacatcacctacgggcagtttgctcagctgtaccgcagcctcatgtacagcgcccagaagacgatggacctccccttcttggaagccagtactctgagggctggggagcggccggagctttgccgagtgtcccttcctgagttccagcagttccttcttgactaccagggggagctgtgggctgttgatcgcctccaggtgcaggagttcatgctcagcttcctccgagaccccttacgagagatcgaggagccatacttcttcctggatgagtttgtcaccttcctgttctccaaagagaacagtgtgtggaactcgcagctggatgcagtatgcccggacaccatgaacaaccctctttcccactactggatctcctcctcgcacaacacgtacctgaccggggaccagttctccagtgagtcctccttggaagcctatgctcgctgcctgcggatgggctgtcgctgcattgagttggactgctgggacggcccggatgggatgccagttatttaccatgggcacacccttaccaccaagatcaagttctcagatgtcctgcacaccatcaaggagcatgcctttgtggcctcagagtacccagtcatcctgtccattgaggaccactgcagcattgcccagcagagaaacatggcccaatacttcaagaaggtgctgggggacacactcctcaccaagcccgtggagatctctgccgacgggctcccctcacccaaccagcttaagaggaagatcctcatcaagcacaagaagctggctgagggcagtgcctacgaggaggtgcctacatccatgatgtactctgagaacgacatcagcaactctatcaagaatggcatcctctacctggaggaccctgtgaaccacgaatggtatccccactactttgttctgaccagcagcaagatctactactctgaggagaccagcagtgaccagggcaacgaggatgaggaggagcccaaggaggtcagcagcagcacagagctgcactccaatgagaagtggttccatgggaagctaggggcagggcgtgacgggcgtcacatcgctgagcgcctgcttactgagtactgcatcgagaccggagcccctgacggctccttcctcgtgcgagagagtgagaccttcgtgggcgactacacgctctctttctggcggaacgggaaagtccagcactgccgtatccactcccggcaagatgctgggacccccaagttcttcttgacagacaacctcgtctttgactccctctatgacctcatcacgcactaccagcaggtgcccctgcgctgtaatgagtttgagatgcgactttcagagcctgtcccacagaccaacgcccacgagagcaaagagtggtaccacgcgagcctgaccagagcacaggctgagcacatgctaatgcgcgtccctcgtgatggggccttcctggtgcggaagcggaatgaacccaactcatatgccatctctttccgggctgagggcaagatcaagcattgccgtgtccagcaagagggccagacagtgatgctagggaactcggagttcgacagccttgttgacctcatcagctactatgagaaacacccgctataccgcaagatgaagctgcgctatcccatcaacgaggaggcactggagaagattggcacagctgagcctgactacggggccctgtatgagggacgcaaccctggcttctatgtagaggcaaaccctatgccaactttcaagtgtgcagtcaaagccctctttgactacaaggcccagagggaggacgagctgaccttcatcaagagcgccatcatccagaatgtggagaagcaagagggaggctggtggcgaggggactacggagggaagaagcagctgtggttcccatcaaactacgtggaagagatggtcaaccccgtggccctggagccggagagggagcacttggacgagaacagccccctaggggacttgctgcggggggtcttggatgtgccggcttgtcagattgccatccgtcctgagggcaagaacaaccggctcttcgtcttctccatcagcatggcgtcggtggcccactggtccctggatgttgctgccgactcacaggaggagctgcaggactgggtgaaaaagatccgtgaagtggcccagacagcagacgccaggctcactgaagggaagataatggaacggaggaagaagattgccctggagctctctgaacttgtcgtctactgccggcctgttccctttgatgaagagaagattggcacagaacgtgcttgctaccgggacatgtcatccttcccggaaaccaaggctgagaaatacgtgaacaaggccaaaggcaagaagttccttcagtacaatcgactgcagctctcccgcatctaccccaagggccagcgactggattcctccaactacgatcctttgcccatgtggatctgtggcagtcagcttgtggccctcaacttccagacccctgacaagcctatgcagatgaaccaggccctcttcatgacgggcaggcactgtggctacgtgctgcagccaagcaccatgcgggatgaggccttcgacccctttgacaagagcagcctccgcgggctggagccatgtgccatctctattgaggtgctgggggcccgacatctgccaaagaatggccgaggcattgtgtgtccttttgtggagattgaggtggctggagctgagtatgacagcaccaagcagaagacagagtttgtggtggacaatggactcaaccctgtatggccagccaagcccttccacttccagatcagtaaccctgaatttgcctttctgcgcttcgtggtgtatgaggaagacatgtttagtgaccagaatttcctggctcaggctactttcccagtaaaaggcctgaagacaggatacagagcagtgcctttgaagaacaactacagtgaggacctggagttggcctccctgctgatcaagattgacattttccctgccaagcaggagaatggtgacctcagtcccttcagtggtacgtccctgcgggagcggggctcagatgcctcaggccagctgtttcatggccgagcccgggaaggctcctttgaatcccgctaccagcagccgtttgaggacttccgcatctcccaggagcatctcgcagaccattttgacagtcgagaacgaagggccccaagaaggactcgggtcaatggagacaaccgcctctagttgtaccccagcctcgttggagagcagcaggtgctgtgcgccttgtagaatgccgcgaactgggttctttggaagcagccccctgtggcggccttccgggtctcgcagcctgaagcctggattccagcagtgaatgctagacagaaaccaagccattaatgagatgttattactgttttgggcctccatgccccagctctggatgaaggcaaaaactgtactgtgtttcgcattaagcacacacatctggccctgacttctggagatggatccttccatcttgtggggccaggaccatggccgaagccccttggagagagaggctgcctcagccagtggcacaggagactccaaggagctactgacattcctaagagtggaggaggaggaggagccttgctgggccagggaaacaaagtttacattgtcctgtagctttaaaaccacagctgggcagggtgagaagctagatgcccctgcagtttggccctggagccagggcagaggaatgtagggcctgcatggagaagggttctgccctgcctgaggaggaggacacagcacaagggcacattgcccatggctgggaacatgacccagcctgaaagatacaggggatcatgttaaaaatagcagtattatttttcgtctcaatggtattgtaactaagttatttactcctcctgctcctcacccctgtagggaaaccttggagaggagagtggcaggtgggctgcctgctgtgttaagaggacttagtttgtgatgtaaggcactgtcaggaatggggggcgggccagggtgggaagagaagaaatagcagagcctattttggtgaggttttttgtttttaagtcaaagaagactcagtatgctttccctgaggaatgaaaaagggattgaggagttgcctgactcctgggtgggtggggtacaggcagttaggtgctgaatgaagctgccatccttgctgcagcttctaactggtaaaaagatccagggatggagatgggaaggttagaaaggcagccctcacctctgaggacagaggccggggtccaggcccgtgggcgcaaaggtgcctcatagcatagccagcattcagcacacacaaacctactgcccacatttgggctcagggttggccatttgctagttctgctgccctcttaagatctgactgccaaataaatcatcctcatgtcctt

SEQ ID NO: 1265 - protein, 1291 aa, Homo sapiens
MAGAASPCANGCGPGAPSDAEVLHLCRSLEVGTVMTLFYSKKSQRPERKTFQVKLETRQITWSRGADKIEGAIDIREIKEIRPGKTSRDFDRYQEDPAFRPDQSHCFVILYGMEFRLKTLSLQATSEDEVNMWIKGLTWLMEDTLQAPTPLQIERWLRKQFYSVDRNREDRISAKDLKNMLSQVNYRVPNMRFLRERLTDLEQRSGDITYGQFAQLYRSLMYSAQKTMDLPFLEASTLRAGERPELCRVSLPEFQQFLLDYQGELWAVDRLQVQEFMLSFLRDPLREIEEPYFFLDEFVTFLFSKENSVWNSQLDAVCPDTMNNPLSHYWISSSHNTYLTGDQFSSESSLEAYARCLRMGCRCIELDCWDGPDGMPVIYHGHTLTTKIKFSDVLHTIKEHAFVASEYPVILSIEDHCSIAQQRNMAQYFKKVLGDTLLTKPVEISADGLPSPNQLKRKILIKHKKLAEGSAYEEVPTSMMYSENDISNSIKNGILYLEDPVNHEWYPHYFVLTSSKIYYSEETSSDQGNEDEEEPKEVSSSTELHSNEKWFHGKLGAGRDGRHIAERLLTEYCIETGAPDGSFLVRESETFVGDYTLSFWRNGKVQHCRIHSRQDAGTPKFFLTDNLVFDSLYDLITHYQQVPLRCNEFEMRLSEPVPQTNAHESKEWYHASLTRAQAEHMLMRVPRDGAFLVRKRNEPNSYAISFRAEGKIKHCRVQQEGQTVMLGNSEFDSLVDLISYYEKHPLYRKMKLRYPINEEALEKIGTAEPDYGALYEGRNPGFYVEANPMPTFKCAVKALFDYKAQREDELTFIKSAIIQNVEKQEGGWWRGDYGGKKQLWFPSNYVEEMVNPVALEPEREHLDENSPLGDLLRGVLDVPACQIAIRPEGKNNRLFVFSISMASVAHWSLDVAADSQEELQDWVKKIREVAQTADARLTEGKIMERRKKIALELSELVVYCRPVPFDEEKIGTERACYRDMSSFPETKAEKYVNKAKGKKFLQYNRLQLSRIYPKGQRLDSSNYDPLPMWICGSQLVALNFQTPDKPMQMNQALFMTGRHCGYVLQPSTMRDEAFDPFDKSSLRGLEPCAISIEVLGARHLPKNGRGIVCPFVEIEVAGAEYDSTKQKTEFVVDNGLNPVWPAKPFHFQISNPEFAFLRFVVYEEDMFSDQNFLAQATFPVKGLKTGYRAVPLKNNYSEDLELASLLIKIDIFPAKQENGDLSPFSGTSLRERGSDASGQLFHGRAREGSFESRYQQPFEDFRISQEHLADHFDSRERRAPRRTRVNGDNRL

SEQ ID NO: 1266 - DNA, 5202 bp, Homo sapiens
gagccgccgccgggtcccgctcgtctgccgcctcagcctcagccccaacctcagccgccgccgttgcgcttgctcccgggcggtcctggcctgtgccgccgccgcccccagcgtcggagccatggcgggcgccgcgtccccttgcgccaacggctgcgggcccggcgcgccctcggacgccgaggtgctgcacctctgccgcagcctcgaggtgggcaccgtcatgactttgttctactccaagaagtcgcagcgacccgagcggaagaccttccaggtcaagctggagacgcgccagatcacgtggagccggggcgccgacaagatcgagggggccattgacattcgtgaaattaaggagatccgcccagggaagacctcacgggactttgatcgctatcaagaggacccagctttccggccggaccagtcacattgctttgtcattctctatggaatggaatttcgcctgaaaacgctgagcctgcaagccacatctgaggatgaagtgaacatgtggatcaagggcttaacttggctgatggaggatacattgcaggcacccacacccctgcagattgagaggtggctccggaagcagttttactcagtggatcggaatcgtgaggatcgtatatcagccaaggacctgaagaacatgctgtcccaggtcaactaccgggtccccaacatgcgcttcctccgagagcggctgacggacctggagcagcgcagcggggacatcacctacgggcagtttgctcagctgtaccgcagcctcatgtacagcgcccagaagacgatggacctccccttcttggaagccagtactctgagggctggggagcggccggagctttgccgagtgtcccttcctgagttccagcagttccttcttgactaccagggggagctgtgggctgttgatcgcctccaggtgcaggagttcatgctcagcttcctccgagaccccttacgagagatcgaggagccatacttcttcctggatgagtttgtcaccttcctgttctccaaagagaacagtgtgtggaactcgcagctggatgcagtatgcccggacaccatgaacaaccctctttcccactactggatctcctcctcgcacaacacgtacctgaccggggaccagttctccagtgagtcctccttggaagcctatgctcgctgcctgcggatgggctgtcgctgcattgagttggactgctgggacggcccggatgggatgccagttatttaccatgggcacacccttaccaccaagatcaagttctcagatgtcctgcacaccatcaaggagcatgcctttgtggcctcagagtacccagtcatcctgtccattgaggaccactgcagcattgcccagcagagaaacatggcccaatacttcaagaaggtgctgggggacacactcctcaccaagcccgtggagatctctgccgacgggctcccctcacccaaccagcttaagaggaagatcctcatcaagcacaagaagctggctgagggcagtgcctacgaggaggtgcctacatccatgatgtactctgagaacgacatcagcaactctatcaagaatggcatcctctacctggaggaccctgtgaaccacgaatggtatccccactactttgttctgaccagcagcaagatctactactctgaggagaccagcagtgaccagggcaacgaggatgaggaggagcccaaggaggtcagcagcagcacagagctgcactccaatgagaagtggttccatgggaagctaggggcagggcgtgacgggcgtcacatcgctgagcgcctgcttactgagtactgcatcgagaccggagcccctgacggctccttcctcgtgcgagagagtgagaccttcgtgggcgactacacgctctctttctggcggaacgggaaagtccagcactgccgtatccactcccggcaagatgctgggacccccaagttcttcttgacagacaacctcgtctttgactccctctatgacctcatcacgcactaccagcaggtgcccctgcgctgtaatgagtttgagatgcgactttcagagcctgtcccacagaccaacgcccacgagagcaaagagtggtaccacgcgagcctgaccagagcacaggctgagcacatgctaatgcgcgtccctcgtgatggggccttcctggtgcggaagcggaatgaacccaactcatatgccatctctttccgggctgagggcaagatcaagcattgccgtgtccagcaagagggccagacagtgatgctagggaactcggagttcgacagccttgttgacctcatcagctactatgagaaacacccgctataccgcaagatgaagctgcgctatcccatcaacgaggaggcactggagaagattggcacagctgagcctgactacggggccctgtatgagggacgcaaccctggcttctatgtagaggcaaaccctatgccaactttcaagtgtgcagtcaaagccctctttgactacaaggcccagagggaggacgagctgaccttcatcaagagcgccatcatccagaatgtggagaagcaagagggaggctggtggcgaggggactacggagggaagaagcagctgtggttcccatcaaactacgtggaagagatggtcaaccccgtggccctggagccggagagggagcacttggacgagaacagccccctaggggacttgctgcggggggtcttggatgtgccggcttgtcagattgccatccgtcctgagggcaagaacaaccggctcttcgtcttctccatcagcatggcgtcggtggcccactggtccctggatgttgctgccgactcacaggaggagctgcaggactgggtgaaaaagatccgtgaagtggcccagacagcagacgccaggctcactgaagggaagataatggaacggaggaagaagattgccctggagctctctgaacttgtcgtctactgccggcctgttccctttgatgaagagaagattggcacagaacgtgcttgctaccgggacatgtcatccttcccggaaaccaaggctgagaaatacgtgaacaaggccaaaggcaagaagttccttcagtacaatcgactgcagctctcccgcatctaccccaagggccagcgactggattcctccaactacgatcctttgcccatgtggatctgtggcagtcagcttgtggccctcaacttccagacccctgacaagcctatgcagatgaaccaggccctcttcatgacgggcaggcactgtggctacgtgctgcagccaagcaccatgcgggatgaggccttcgacccctttgacaagagcagcctccgcgggctggagccatgtgccatctctattgaggtgctgggggcccgacatctgccaaagaatggccgaggcattgtgtgtccttttgtggagattgaggtggctggagctgagtatgacagcaccaagcagaagacagagtttgtggtggacaatggactcaaccctgtatggccagccaagcccttccacttccagatcagtaaccctgaatttgcctttctgcgcttcgtggtgtatgaggaagacatgtttagtgaccagaatttcctggctcaggctactttcccagtaaaaggcctgaagacaggatacagagcagtgcctttgaagaacaactacagtgaggacctggagttggcctccctgctgatcaagattgacattttccctgccaaggagaatggtgacctcagtcccttcagtggtacgtccctgcgggagcggggctcagatgcctcaggccagctgtttcatggccgagcccgggaaggctcctttgaatcccgctaccagcagccgtttgaggacttccgcatctcccaggagcatctcgcagaccattttgacagtcgagaacgaagggccccaagaaggactcgggtcaatggagacaaccgcctctagttgtaccccagcctcgttggagagcagcaggtgctgtgcgccttgtagaatgccgcgaactgggttctttggaagcagccccctgtggcggccttccgggtctcgcagcctgaagcctggattccagcagtgaatgctagacagaaaccaagccattaatgagatgttattactgttttgggcctccatgccccagctctggatgaaggcaaaaactgtactgtgtttcgcattaagcacacacatctggccctgacttctggagatggatccttccatcttgtggggccaggaccatggccgaagccccttggagagagaggctgcctcagccagtggcacaggagactccaaggagctactgacattcctaagagtggaggaggaggaggagccttgctgggccagggaaacaaagtttacattgtcctgtagctttaaaaccacagctgggcagggtgagaagctagatgcccctgcagtttggccctggagccagggcagaggaatgtagggcctgcatggagaagggttctgccctgcctgaggaggaggacacagcacaagggcacattgcccatggctgggaacatgacccagcctgaaagatacaggggatcatgttaaaaatagcagtattatttttcgtctcaatggtattgtaactaagttatttactcctcctgctcctcacccctgtagggaaaccttggagaggagagtggcaggtgggctgcctgctgtgttaagaggacttagtttgtgatgtaaggcactgtcaggaatggggggcgggccagggtgggaagagaagaaatagcagagcctattttggtgaggttttttgtttttaagtcaaagaagactcagtatgctttccctgaggaatgaaaaagggattgaggagttgcctgactcctgggtgggtggggtacaggcagttaggtgctgaatgaagctgccatccttgctgcagcttctaactggtaaaaagatccagggatggagatgggaaggttagaaaggcagccctcacctctgaggacagaggccggggtccaggcccgtgggcgcaaaggtgcctcatagcatagccagcattcagcacacacaaacctactgcccacatttgggctcagggttggccatttgctagttctgctgccctcttaagatctgactgccaaataaatcatcctcatgtcctt

SEQ ID NO: 1267 - protein, 1290 aa, Homo sapiens
MAGAASPCANGCGPGAPSDAEVLHLCRSLEVGTVMTLFYSKKSQRPERKTFQVKLETRQITWSRGADKIEGAIDIREIKEIRPGKTSRDFDRYQEDPAFRPDQSHCFVILYGMEFRLKTLSLQATSEDEVNMWIKGLTWLMEDTLQAPTPLQIERWLRKQFYSVDRNREDRISAKDLKNMLSQVNYRVPNMRFLRERLTDLEQRSGDITYGQFAQLYRSLMYSAQKTMDLPFLEASTLRAGERPELCRVSLPEFQQFLLDYQGELWAVDRLQVQEFMLSFLRDPLREIEEPYFFLDEFVTFLFSKENSVWNSQLDAVCPDTMNNPLSHYWISSSHNTYLTGDQFSSESSLEAYARCLRMGCRCIELDCWDGPDGMPVIYHGHTLTTKIKFSDVLHTIKEHAFVASEYPVILSIEDHCSIAQQRNMAQYFKKVLGDTLLTKPVEISADGLPSPNQLKRKILIKHKKLAEGSAYEEVPTSMMYSENDISNSIKNGILYLEDPVNHEWYPHYFVLTSSKIYYSEETSSDQGNEDEEEPKEVSSSTELHSNEKWFHGKLGAGRDGRHIAERLLTEYCIETGAPDGSFLVRESETFVGDYTLSFWRNGKVQHCRIHSRQDAGTPKFFLTDNLVFDSLYDLITHYQQVPLRCNEFEMRLSEPVPQTNAHESKEWYHASLTRAQAEHMLMRVPRDGAFLVRKRNEPNSYAISFRAEGKIKHCRVQQEGQTVMLGNSEFDSLVDLISYYEKHPLYRKMKLRYPINEEALEKIGTAEPDYGALYEGRNPGFYVEANPMPTFKCAVKALFDYKAQREDELTFIKSAIIQNVEKQEGGWWRGDYGGKKQLWFPSNYVEEMVNPVALEPEREHLDENSPLGDLLRGVLDVPACQIAIRPEGKNNRLFVFSISMASVAHWSLDVAADSQEELQDWVKKIREVAQTADARLTEGKIMERRKKIALELSELVVYCRPVPFDEEKIGTERACYRDMSSFPETKAEKYVNKAKGKKFLQYNRLQLSRIYPKGQRLDSSNYDPLPMWICGSQLVALNFQTPDKPMQMNQALFMTGRHCGYVLQPSTMRDEAFDPFDKSSLRGLEPCAISIEVLGARHLPKNGRGIVCPFVEIEVAGAEYDSTKQKTEFVVDNGLNPVWPAKPFHFQISNPEFAFLRFVVYEEDMFSDQNFLAQATFPVKGLKTGYRAVPLKNNYSEDLELASLLIKIDIFPAKENGDLSPFSGTSLRERGSDASGQLFHGRAREGSFESRYQQPFEDFRISQEHLADHFDSRERRAPRRTRVNGDNRL

SEQ ID NO: 1268 - DNA, 9991 bp, Homo sapiens
gtgatagccgtcaaaggcagcaaatagactgaatgaaagatgagcttctgcctttatatccttctctcctgctacccaactcattgtggtgaaggaaaaagaaaacgcgggtggagactgcactatatgcttaggactgaaatgcaactgcagaagcaacatgtgaccttttagagatgcttgtgggactgcataaagtgaagagggaaactggaaaaaaacaatgaaattgaatagggaaaacctgctttctgcaaacaactgaaaaagctgcatttagaaactgtttctttggccctcatcgagaagctggaacttgtattgttaggccccttatgggacaagctctcaactgctgatcacccagtgattgtcaccatggccagcaagaggaaatccaccacaccatgcatgatcccagtgaagactgtggtgttgcaagatgccagcatggaggcccagcccgctgagaccttgcctgaaggaccccagcaggatctgcccccagaagcatctgctgccagcagtgaggcagcacagaaccccagcagtactgatggctctacactggccaatgggcatcggagcactttagatggctatttatattcctgtaaatactgcgatttcagatcccatgacatgacccaatttgtgggacatatgaactcagagcacacagactttaataaagacccaacctttgtatgcagtgggtgcagttttctggcaaaaacccctgaggggctttccttgcacaatgccacatgtcactccggggaagccagctttgtgtggaacgtggccaagccagacaatcatgtggttgtggagcagagcatccctgagagcaccagcactcctgacctagcgggtgagcccagtgctgaaggggctgatggacaggcagaaatcatcattaccaaaactccaatcatgaagataatgaaaggcaaagctgaagccaaaaaaattcatacactcaaggagaatgtccctagccagcctgtgggtgaggccttaccaaagctgtcgactggagaaatggaggtgagagagggggaccattccttcatcaatggggcagttccagtcagccaggcatctgccagctctgcaaaaaacccccatgccgccaacgggcccctgataggaacagtgccagttttgccagctggcatagcacagttcctctccctccagcagcagcccccagtgcatgcccaacaccatgtccaccagccactgcccacggccaaggcccttcccaaagtgatgatccccctgagcagcattccaacgtacaatgcagccatggactctaacagcttcctgaagaactccttccacaagttcccctaccccaccaaagccgagctctgctatttgactgtggtgaccaagtatccagaagaacagctcaagatctggttcacagcccaaaggctgaagcaggggatcagctggtcccctgaggagattgaggatgcccggaaaaagatgttcaatacagtcatccagtctgtgcctcagcccacaattacggttctaaataccccactcgtcgccagtgctggcaatgtccagcatctcatccaggccgctcttccaggtcacgttgtggggcagccagagggtacaggagggggacttctggtcactcagccattgatggccaatgggttgcaagcaacaagttcccctctccccctcacggtgacatccgtccccaagcagccaggtgtggcacccattaacactgtgtgttcaaatacaacgtcagctgtgaaggtggtcaatgcggcccagtcgctcctcacggcctgccccagcataacctcccaagccttccttgatgctagcatctacaaaaataagaaatctcatgaacagctgtcagctctgaaagggagcttctgtcggaaccagttcccagggcagagcgaagttgaacatctcacaaaagtgacgggcctcagtaccagagaggtgcggaaatggttcagtgatcgtagataccactgccggaacttgaagggctccagagcgatgatacctggagatcacagttccatcatcattgactctgtgccagaggtgtccttctccccatcgtccaaggtccctgaggtaacctgcattccgacaacagccacactagcaacccacccttctgccaaacgacaatcttggcaccagactcctgacttcacaccaaccaaatacaaggagagagcccctgagcagctcagagccctggagagcagttttgcacaaaaccctcttcctcttgatgaggaactggaccgcctgagaagtgaaaccaaaatgacccgacgagaaattgatagctggttttcagagagacggaaaaaagtgaatgctgaggagaccaagaaggctgaggagaatgcctctcaggaggaagaggaggctgctgaggatgagggtggagaagaggatttggccagtgagctaagggtctctggtgaaaatggctctctggaaatgcccagcagccatatcttggcagagcgcaaagtcagccccattaaaatcaacctgaagaacctgagggtcactgaagccaatggcaggaacgagattccagggctgggtgcctgtgaccctgaggatgatgagtcaaacaaactggcagagcagctcccaggcaaagtgagctgcaaaaagactgcccagcagcggcacttgctgcggcagctctttgtccagacacagtggccaagcaaccaggactatgactccatcatggcccagacgggtctgccacggccagaggtggtgcgctggtttggagatagcaggtacgcactgaagaacggccaactcaaatggtacgaagactataagcgaggcaacttcccaccagggctactggtcattgcccctggcaaccgggagctcctgcaggactattacatgacacacaagatgctgtatgaagaggacctgcagaacctctgtgacaagacccagatgagctcccagcaggtcaagcagtggtttgctgagaaaatgggggaggagaccagagccgtggcagacacaggcagtgaggaccagggccctggtactggtgagctcacagcagttcacaaagggatgggtgacacctattcagaggtgtctgagaacagtgagtcgtgggagccccgtgtccctgaggccagctcagagccctttgacacatcgagtccccaggctggacgtcagctcgaaacagactgaatttgatctgattaatgtgaaggactggccagtctgggaaaccgcctgccacgtggaagagccaaacccgactctctgctgccacatgccgttcccatgcccggctgctgggcacctgggagagcttccagaatcctcgcagacagcccagagcctgccgctaccctcggcctgcccaccaccaagcaagcagcaagcaagatggggttctcatcagttcttcctcccacaatgtaggacctttcctttaccttccaatggataaaatagttcagagttcatagtcatattcatagacacagaatcaagcttttaacatatacatccacctctatatgttaaataaaacatcagattatcaacactgtcattacgtagaaactttggttagccaagcagtgcattgtcagttacgtcatctctaaaaatgacctgtgtctgttctctggggattgctgggtcacaggtgcccctcaccttccacagtcaggcagggaagttataggcacaaagctacgtctggaacccctttgtgccccctttgtgttcctcaaggaagcagtacctttgaagagatctctgctgcattaagtgatgaccggctacgtttcatgtcaggcttgctttgccttgtgggctactcagtgcagaacctgctgtaaccctcagttcaaaaaatggactggcaatgtgattagcgttggatgctttaccattctctttagttgttaccgtaattctgctttttcatgggagtttgaatcatggaccataacttttcagttatcagatcaactaaagaaacatttgttgttaagcctaatgtgctgacctatgtgcctgcattttttttttaatctagacatgtttggagtgagagaaagatggaaaaaagacatggggtagggacgtaagtggaaatctatagccacagcctgaagctttgaccactgcggttttcagagccctttctccacactcatttcagagcctcctatggtttgggaaggaataacacactggcccattagtaagggtgaaggctggagggatttgttgacttcttggaattatcagaggtagggtggtctttagcacaaagacttgcatgcagagatccctggcagaacacccagagtgcccgtggctcccaccccagggtctggccggtgtgctggatgcatgcccaagggtgctgggcatcactggtccttgtgaggatgcttttaaagttttatatttatgtccccaaacttggaaacaagaactctactttagcctaaccctcatgtccttttttgaattgagaaaattacaggaaatggtgcctttgaaaattagaaaacttgcttacagagctgttctaaatggtaaatcctcaatttccccaagaccggttgctctgagagtagctggtaaagaggggcgaactaaagacctgtccacctgtagctccgctcatttcttagaaaccacctgcttcccagagtgccaagccacaagtaccaggcttcgtgggcacagacacctcctgggctgggcagagtgacagtgctagaagaccccagagagagggcaagggctttgggcaagaagcactggtggtgttttagggaccgtccttctcccctacccagggaactggacctggcagggcaccgtgctcatgtggctccaaggacaagcatggcggtggccccttctgccttccaggagaggtcttgcttttgaaaccaaaatcatgttcttctaaagtgtcatcttctgccctccctgtcccaatagggaccacatcttatttgtctcaaacagggacttgtgagtacttggcaagttttgcagcctatttttgtattcttaatttggggagtaaagatgtttggtctcaaaaacctttgaggaattgccaagaatggcgagtgattgctttccttcagagaacagacacttggaatttctccttttagtgtttatatacgtgcagattaatttatatatatatatatacacacacacatatacagtataaatactcatttgattctcgtaaaacgcgcatctggcgtgtgcagttgagaaacttggtggcacatgggtgttgggggagtagcctgtgttggagggacaccagtgcactaggcagctggggcggcccaggctgaagccatctccgggtgtctgagaaaccacccagtgcctcacctccagatcctgctggcatcacctccagagccctgcatgcactggctgaagagttggtctgtggagaggattttcttggttacttgtattcacggttaatttacaacccaaacagcaaaacacagttggtggacaagttcatgcaggacctacagtgacccagccatgggcactagctcatctttcaggtggaaaagtacagtgctgcctgccctggtatgtttttcttatagatgttagccctgcccaacagccagggctacactacaaaaggcaagaatgcccatgtaaggagcccagcagtctggacagatccttcttcctctgctgttggatgagagtgagtgagtatgctctggaccttatccttgaaagatgatcaaaagcgatgatgagggaggcagtcatcacgcaggtgcttaaagggacattgtaggaggtactcaagggtttgggggcaaaaccctgaatccagccagtcgtgcacagagacacacccacactagcccagtggcagtgggggatgtgggatggcagcagccaggtatgtagccctgtcacaggacagctcactgtggttttgcacactgcctaagggttaaattgtgttgttgccttcagtagaaggcatttgtgggctgcagagttgagagttgggtgaggttagtctctcctgaagaaaaagcctataaaaagtggctaatcttatcccttttctctgtatgcagttggactcgtcagagatagtaaaatcatcttttagtgtttttttgttgctgatgtcttgtacccatttgttttttacatggggttgtagatcgagttctcaaaggtgaaaccagatgatcattctgataaaggaaatttaaatttgatacatatgctttgtatattttgattacttgttttcgtttttgactataaaggagcttttttattttgggaggggaggagtgtcatttttgagaatcttgggttcctgaaaaagaacgccctagttggatggcttgccagggccttggggtttggtagtgattgtacaacttaaagctcctttctcttggctgagtgacaggtggctgttcaggtggaccaaagcaccttgacacaaggactccacactgtgctctctagtagcacaaggaggaagttggacagaacattgggtagtgccttgcgggctcacacatgtactagtggtctcatctccagctagccttgggaggccgtcccaccaggaaatctctctattccgtagcctgagatgtgcccttgtgggttttatcctgctcagtcagtggcctaggggcaggtcctgtgttctctccctctctctcctggctctgggacatctgtccctggctgcctttcatggaggaaggacactggcctttctggttggatgctgtgtggatgctctctgcttgagcctcgtggtctcttgtctctttttggaccaatatcctcagattggtgcagctttttcagttcagatatcacaccccaagtggataaaggcaacttgcaggagaggagagccagccaagaagaaaattttaaaaccaaacctcgtttaggattttcctaaagtcatcttctcttttttcttgctcagagtttacctgggagatttcaccagtttgactcaccatttgcagatgtgcttttgtattaaatttaaattttcacatatcacatccattctcaaggtagttatatgctggagaagaaaaatcctctagacacatgaaggcccacatagtcaagtcttccagggcaaagccagcagcccacccaggtcaggtagccagcagggctcagttcccctcactccagacacggaccctcctcttcagggtctcttgacccagcttccttctctccttttacctgagagcacagacctctctcagccagcctgcccagaccacggggggctactcccatgtagtttggggagcacttgatctcagaaaagctccattgtctgagcaaatgggcagttgtggagctcaagcctttctcctgtgctcaagtcccttccccaagcaaggcttcaacctcatctacccaccatgtagttttctctggccatttaagtggggcggcagggacatggttgggccatgccacaccagggctggtgaggcaaccagttttgattttgacagagtggctggaggaaaagtggcaatcaaggtgctgcttggtttgctctgagtgcaaatggaaccaacaggtttctgctgcaatctgtgtgttcccagtgccaggtcacaccaggaggggtggggcagggctaaccaagtggtctctgaactcaccgagcgtctgcacttggttgtgaagttaatgggagtacagagagcgtctggccttggagaggggttgagagcctcctttttggttcttcattcctgagctcttgcctgcccacaaatctgacctctttgaatggggacgcagtccttcaacagagaagtttctatggcaaagaagtttctatttagctctagatccagcagagtcatccattctaactgccctgaagtctagagcaggggagggaacccagaggctggggatgagactaggcagaccctggttaccatatggacaaggacaggggaaagcacccccttcctcaatttctgaaagttctatctttgggttcgcaggactttgaggatgataaagaacatataggtactagcttgttgttgctggtccaaagcttccacagccctgagaatttggctttcgtggctgctctggcagctgagcgaagggaggaaggcagccgctctggtggggactctaggcaccttccctgctgtccacttggataggcggtgagccccagggtactgagaggagcctgagcatttacctgccattagtgcctcttccttcaggagactggcttgaaacgtgtgttcatgtgcgcgtgcacacacacacatgagcacctgtatgtgttaatgaatagtttttcttggttaatgctttttaacttctgttcctttccgtaagtggatgattcaaaattaacgtgacttggctgggcgcagtggctcacacctgtaatcccagcactttgggaggccaagggaggcggatcacctgaggtcaggagttcgagaccagcctgatcggcatggtgaaaccccgtttctactaaaaatacaaaaattagccgggcgtggtggtgcgcgcctgtaatcccagctactcaggaggctgaggaaggagaatcacttgaacccgggaggtggaggttgcagtgagctgagatcgtgccactgcactccagcctgggcgacagagcgaaactccgtctcaaaaaaaaaaaaaaaacttaatgtgactggagttaaaagtgaaatgtcaggttgtttagtcactgaatagagagctacaagtgcttggtctttcccaagaatcaaacctgagtagaaatacatttaaaagaaaaatctacatggtacctatgaatcctgtaatttgtttagggagatcttgtcactcatccctggttcctgcccatactgtttggtctcgttcttgcagtttgcttggaacagggccagagccccacatgagattgtcagcaggagtgaggagcgccagtccctactcctcagcagggacccagcacagcaatccggttgttctcggttagactgggtcggggccaggggagaagcagtcacccctgtgtagagggttcccgctgtgcttctgagcagttgctttgttcagaagtgttaggagggtcagattgtgccataattgttattaaagagaaaacacgcccaccttcctttctcccctgctggccattgttcattgagttttactgagggcagcctttgtggaagtcagggaggttgccaaaggcctgtagatgcctcctgacaaggtcttgattcctggttttctagcacccatttgcattttggtcttcagcacaaagccttgttccctgtggccggacttctgggcaataagactggggagtgactgttgagcagtctgctgtcaggagagatggctgaaaaggtgatcatcttggtgctaaacaagtaagaggcaactgccctgtttttgtttgttttgaggcacaatgaaactttagccaaactctgcaagagggtcccatctcctgccatggccaggtgtgagagaccaaaccgagaaaacagcatactctatcacttaagccttgggtagaatgggaattctttaccctgggtaaacgttttaacaaaaaaatggaacttaacttcggtttggactgtggtcgtgctgaggcaggagtggggttgccctcttggggctgaatctccaggcctcacgaggtcccctgtggggatgctgctatttctaagatgcaaattgcacatttcctagattttgtatctgtggatttggataagggaggggaacacggacaaattgcttgtacaatttgaaatgggcctcaatggtacttcaaaccttttgattattcctaaataaaaacataaatatatttcac

SEQ ID NO: 1269 - protein, 956 aa, Homo sapiens
MASKRKSTTPCMIPVKTVVLQDASMEAQPAETLPEGPQQDLPPEASAASSEAAQNPSSTDGSTLANGHRSTLDGYLYSCKYCDFRSHDMTQFVGHMNSEHTDFNKDPTFVCSGCSFLAKTPEGLSLHNATCHSGEASFVWNVAKPDNHVVVEQSIPESTSTPDLAGEPSAEGADGQAEIIITKTPIMKIMKGKAEAKKIHTLKENVPSQPVGEALPKLSTGEMEVREGDHSFINGAVPVSQASASSAKNPHAANGPLIGTVPVLPAGIAQFLSLQQQPPVHAQHHVHQPLPTAKALPKVMIPLSSIPTYNAAMDSNSFLKNSFHKFPYPTKAELCYLTVVTKYPEEQLKIWFTAQRLKQGISWSPEEIEDARKKMFNTVIQSVPQPTITVLNTPLVASAGNVQHLIQAALPGHVVGQPEGTGGGLLVTQPLMANGLQATSSPLPLTVTSVPKQPGVAPINTVCSNTTSAVKVVNAAQSLLTACPSITSQAFLDASIYKNKKSHEQLSALKGSFCRNQFPGQSEVEHLTKVTGLSTREVRKWFSDRRYHCRNLKGSRAMIPGDHSSIIIDSVPEVSFSPSSKVPEVTCIPTTATLATHPSAKRQSWHQTPDFTPTKYKERAPEQLRALESSFAQNPLPLDEELDRLRSETKMTRREIDSWFSERRKKVNAEETKKAEENASQEEEEAAEDEGGEEDLASELRVSGENGSLEMPSSHILAERKVSPIKINLKNLRVTEANGRNEIPGLGACDPEDDESNKLAEQLPGKVSCKKTAQQRHLLRQLFVQTQWPSNQDYDSIMAQTGLPRPEVVRWFGDSRYALKNGQLKWYEDYKRGNFPPGLLVIAPGNRELLQDYYMTHKMLYEEDLQNLCDKTQMSSQQVKQWFAEKMGEETRAVADTGSEDQGPGTGELTAVHKGMGDTYSEVSENSESWEPRVPEASSEPFDTSSPQAGRQLETD

SEQ ID NO: 1270 - DNA, 4464 bp, Homo sapiens
cgaagacactcacctgtggagcctgtgcacgtaggtagaggcggcggctctgagtccaggagctccagtgggcagctccccagcaccagccatgaactacgtggggcagctggcggagacggtgtttgggacggtgaaggagctgtaccggggcctgaacccagccacactgagcggcggcattgacgtgctggtggtgaagcaggtggacggctcgttccggtgctcacccttccacgtgcgttttggcaagctgggcgtcctgcggtcgcgggagaaggtggtagacattgagctcaatggggagcctgtggacttgcacatgaagcttggggacagcggggaggccttctttgttcaggagctggagagcgatgatgaacatgtgcctcccggcctgtgcacctcacccatcccttgggggggtctgtctggcttcccctcggactcccagctgggcactgccagtgagcctgagggcctcgtcatggcaggcacggcctccactgggcggaggaagaggcgtcgcaggaggaaacccaagcagaaagaggatgcagtggcaactgattctagtccagaggaactggaggcaggcgctgagagtgagctatccctgccggaaaagctgaggccagagcccccaggtgtccagttggaagagaagtcttcactgcagcccaaagacatctacccctactcggatggcgagtggcccccccaggccagcctctcagcaggtgagctaacatcccctaagagcgactcggagctggaggtgcggaccccggagcccagtcccctaagagccgagtcccacatgcagtgggcctgggggaggctgcctaaggtggccagagctgagcggcccgagtcctcagtggtccttgaaggcagagctggggcaacctctcctcctcggggaggacccagcactccctctacctctgtggctggcggcgtggaccctttgggactcccaatccagcaaacagaggctggtgccgaccttcagcctgacacagaggatcccactctagtgggtccccctctccacaccccagagacagaggaaagcaagactcagagctctggggacatgggcctccctcctgcctccaagtcatggagctgggccactctggaggttccagttcccaccgggcagccagagagggtctccagggggaaaggctccccaaagagaagccagcacctgggccccagtgacatctacctggatgacttgccctccctggactctgagaatgcagcgctttacttcccccaaagtgactctgggctgggggccagaagatggagtgaacccagcagtcagaagtccctgagggaccccaaccctgaacatgaacctgaacccactctggacacagtggatacaatagcactgtccctctgtggtggactggctgacagccgggacatctccctagagaaattcaaccagcacagcgtctcttaccaggacctcaccaaaaaccccggacttttggatgacccaaacctagtggtgaaaatcaatggaaagcattataactgggctgtggctgcccccatgatcctctccctgcaagccttccagaaaaacttgcccaagagcaccatggacaagctggagagggagaagatgccccggaagggtgggcgatggtggttttcctggcgacgcagggacttcctggccgaggagcgcagtgcccagaaggagaagactgcagccaaggagcagcagggggagaagacagaagtcctgagcagtgatgacgatgccccagacagccctgtgatcctggagatcccctccttgccaccctccactccaccctccactcctacctacaagaagtccctccgcctctcctccgatcagatccggcgcctgaacctgcaagaaggtgccaatgatgtggtcttcagcgtgaccactcagtaccagggcacctgccgctgcaaggccaccatctacctgtggaaatgggacgacaaggtggtcatctctgacatcgacggcaccatcaccaagtcagatgctctgggccatatcctgccccagctggggaaagactggacacaccagggcatcaccagtctctatcacaaaatccaactaaatgggtacaagttcctgtactgctcggcgcgggccattggcatggcggacctcaccaaggggtacctgcagtgggtgagcgaggggggctgtagcctccccaagggccccatccttctgtctcccagcagcctcttctctgccctccacagagaggtgatcgagaagaaaccagaggtgttcaaggtcgcctgcctgagtgacatccagcagctgtttctgccccacggacagcccttctatgctgcctttgggaataggcccaatgatgtctttgcctaccggcaggtgggcctgcctgagtcacgcatcttcacagtcaacccccggggagagctcatccaggagctcataaagaaccacaaatccacgtatgagcggcttggtgaagtggtcgagctcctcttcccacctgtggcccgtggccccagcacagacctggccaaccctgaatacagtaacttctgctactggcgggagccactgcctgctgtggaccttgataccctggactgaacctgccctggctggctcctcctccctggcccggcccaggactggctaggtgtcctggggtataggagggtgggaattggagtgtcatggggcaaacccactgaaggggaaggaggaggctgcaggttggttggcagctagagagactcccccatcttccccgtcatatttttgccagctaagctgcagctgctccaggcgtcagtgtggcactgtcctggggcaattagcttgtcatctgggcccttgcagggttctttttttttttttttttttttttttcctgagacagggtcttgttctgttgcccaggctggagtgcagtggcatgatctctcggctcactgcaacctccgcctcccgggttcaagcgattcacctgcctcagcctcccaagtagctgggattacaggcgtgtaccaccacgcctggctaattttcgtgtttttagtagagatgggttttcaccacattggccaggctggtctcgaactcctgacctcaagtgatttgcccacctcggcctcccaaagtgctgggattacaggcatgagctaccatgccaggcctccttgcagggttttctatgcccttgatatctgtctccctgtcaacctgggaccttgctgtaagtcttgataggacagggagaagagggaggccctaccgaggctcgaggcttcagtgaagggtgacagcagtgggagtgtggtacagcctctggaaggacacagtgttctccccgccccttgtctgggagccaggactgtaccctccgaagccagacatcactgccaacatatcccccttgctggtgccctggcatctcagcacatgacacacacccacacctgcaggctgtggttccggcttggcctgctccccgtccggctgctgccgctgcctctctccagacctcgcttaaggacagtcccaaactcagctggggcaggtgttggcctgaaagtcctcccccagcctctgctggccagcttggtgctcacagctgctgggtaagctcttgcctaaggagctgtgggaagcagggctgatgccccagcaacctctcctcccactgtctttgaagaaagtagctttagaccggctaaaagctttaatccagagcctgccctactctgatagtaccagagtggagggcagaataccaaatgtccaggaaccaaaggcagggctgtggggacctgaagagcggcacagtggggcccgtgctgctgtgggggaaactgaggctgggagcctcagcagagaccggtgtcaagagtctctgggaactgcataggcctgaggaacatgcattttcaagttgtccattgatggtttcgtacctgaatttctcaccttttgtgaacatcttgggagggtgggggttttgcaggggtgttaaaagcaaggcttggagcccctttcctccagctggtggctccttctcagggcctggcctcattcaggccactttgtagagaaatgccctgacctcgcaggaaggatttccccacccccaagtggaaggaagaggacagtgtgggcaccagagggccctggaaacatcttaggggaaggaaaggaaaaggataaatttggagtggggggtctctaaacagattgcctggattccgttctttcctggggttctacagctgcctaagccctcaccttgggggaggatcaaagggaataaagagaactcttggctgaaaaaaaaaaaaaaaaaaaaaaaaaaaaaaaaaaaaaaaaaaaaaaaaaaaaaaaaaaaaaaaaaaaaaaaaaaaaaaaaaaaaaaaaaaaaaaaaaaaaaa

SEQ ID NO: 1271 - protein, 851 aa, Homo sapiens
MNYVGQLAETVFGTVKELYRGLNPATLSGGIDVLVVKQVDGSFRCSPFHVRFGKLGVLRSREKVVDIELNGEPVDLHMKLGDSGEAFFVQELESDDEHVPPGLCTSPIPWGGLSGFPSDSQLGTASEPEGLVMAGTASTGRRKRRRRRKPKQKEDAVATDSSPEELEAGAESELSLPEKLRPEPPGVQLEEKSSLQPKDIYPYSDGEWPPQASLSAGELTSPKSDSELEVRTPEPSPLRAESHMQWAWGRLPKVARAERPESSVVLEGRAGATSPPRGGPSTPSTSVAGGVDPLGLPIQQTEAGADLQPDTEDPTLVGPPLHTPETEESKTQSSGDMGLPPASKSWSWATLEVPVPTGQPERVSRGKGSPKRSQHLGPSDIYLDDLPSLDSENAALYFPQSDSGLGARRWSEPSSQKSLRDPNPEHEPEPTLDTVDTIALSLCGGLADSRDISLEKFNQHSVSYQDLTKNPGLLDDPNLVVKINGKHYNWAVAAPMILSLQAFQKNLPKSTMDKLEREKMPRKGGRWWFSWRRRDFLAEERSAQKEKTAAKEQQGEKTEVLSSDDDAPDSPVILEIPSLPPSTPPSTPTYKKSLRLSSDQIRRLNLQEGANDVVFSVTTQYQGTCRCKATIYLWKWDDKVVISDIDGTITKSDALGHILPQLGKDWTHQGITSLYHKIQLNGYKFLYCSARAIGMADLTKGYLQWVSEGGCSLPKGPILLSPSSLFSALHREVIEKKPEVFKVACLSDIQQLFLPHGQPFYAAFGNRPNDVFAYRQVGLPESRIFTVNPRGELIQELIKNHKSTYERLGEVVELLFPPVARGPSTDLANPEYSNFCYWREPLPAVDLDTLD

SEQ ID NO: 1272 - DNA, 3827 bp, Homo sapiens
cgcctcccctccgcggccccagccgctagcagcgccggccactccgcgggacgcagccgccgcgaagcgccaggcggccgggccagcgagctcgggggccgaaggggaccccgggaccctcggggcgggacccgggccgaccagcggcgggggcggcgcggcgctgcaggcggacacccggcggggggcaccgcgcggggccgggcagaggcgcgggggccgctatgggccgccgccgcctgctcgtctggctgtgcgccgtcgcggcgctgctctcgggggcgcaggccaggggcaccccgctcctggcgcggcctgcgccgcccggtgcctcccgctacagtctctacacgacgggatggcgcccgcggctgcgcccggggccgcacaaggccctctgtgcctatgtggtgcacaggaatgtgacctgcatcctacaggagggagcggagagctacgtaaaggctgaataccggcagtgtagatgggggcccaagtgccccgggacagtcacgtaccgcacagtactcagacccaaatacaaggttggctacaagacagtgacagacctcgcctggcgttgctgtcccggcttcactgggaaacgctgccctgagcacctcacggaccatggggctgcctcaccccagctggagcctgagcctcagattccttcagggcagctggacccaggccccaggcccccttcctacagcagagcagcccccagccctcatggaaggaaaggcccagggctgtttggtgagcggctggaacgcctggagggtgatgtccagcgcctggctcaaacatatggtaccctcagtggcctggtggctagccacgaggatcccaacaggatgactggtggccccagggctcctgctgtccctgtgggctttggggtcatccctgaggggcttgtgggcccaggagacagagccagagggccactaacacctcccttagacgagatcctaagcaaggtgacagaggtgagcaacactcttcagaccaaggtgcagcttctagacaaggtgcatgggctggcacttggccatgaggcccacctgcagcggctgcgggaagccccaccatccccgctcacctccctggccctgctggaggagtacgtggaccgacggctgcaccgactctgggggagcctgctggatggctttgagcagaagctgcaaggcgtccagagtgagtgtgacctgcgggtgcaggaggtacggcggcaatgtgaggagggtcaggccgccagccggaggctgcaccagagccttgatggccgggagctggccctgcgccaggagctgtcacagctgggcagccagctgcagggcctgagcgtgtctggcaggggcagctgctgtgggcaactagccttgatcaatgcccgtatggatggccttgagagggccctgcaggcagtcaccgagacccaaaggggccccggtgccccggccggggatgagcttacgaggctctctgctgccatgctcgagggaggtgtggacgggctgcttgagggtctggagacgctcaatgggacagagggtggagcaaggggatgctgtctgaggttggacatgggggggtggggagtgggcggctttgggaccatgctggaagagcgcgtgcagagcctcgaggagcgcctagcaacattggctggggagctaagccatgacagcgcctctccgggcaggtcagctcggccccttgtacagacagagctggctgtgctagagcaacggttggtctcactggagacttcgtgcaccccgagcaccacctcagccatcctggacagcctcgtggcagaggtgaaggcctggcagagccggagcgaggccctcctacgccaggtggccagccacgcagcactgctccagcagctcaatggcactgtggccgaggtccagggacagctggcagaagggacgggcagctcacttcaaggcgagatcactctgctcaaggtcaatctgaactcagtgagcaagtcgctcacaggcctcagtgactctgtcagccagtactctgatgccttcttggctgccaacacgtccctggatgagcgggaacgcaaggtggaagccgaagtccaggccatccaggagcaggtcagcagccaaggctccaggcttcaggctggccacaggcaggtcctgaacctgcgtggggagctggagcaactcaaggctggtgtggccaaggtggccagtgggctgagccgctgccaggacacagcccagaaacttcagcacacagtgggacactttgaccagcgggtggcacaagtggagggtgcgtgcaggaggctgggcctgctggccgcgggcctggacagcttgcccactgagccactgaggcccagagagggcctgtggagccatgtggaccagctgaatcgtacgctggcccagcacacgcaggacattgcccgcctccgggatgacctactggactgccaggcccagctggctgagcaggtgcggccagggcaagccaactagacaggctggccaggacccaacccctagatcccaccaactcggggaacatcaccccagagcccagccttatccagcagcgccttccagccttccctggctagcccaaatggcactaaggaggccactgagggaatcctccacgtggctgtcccagccaccaaaacccatgcacagtgctgcagaaactggacagttccggacagcggtcaaggcaaggatgtcatgcttgaaggccagggtagacttgagagagttcacattccactgtcagcaaatcagtgtctggacagccagctgcagggcctgagcatggctggcaggggcagctgctgtggcaaactggccttgatcagtgtccgtatgtaaggccttgagaggaccctgcaggcagtcagcaccagcctcagcaactgtgcagagacctacaggcccacagccagtggcctgtccgcattgccctgtgcccacaagcaacagtccacagcccttggtggcttctgttccttgtcccctcggcttctcttcgcagccatcaggactaggtttgtgcaggaaggtgatgcccactggaactctcctcacacctggcagcttcatggatgttgtatctgaactaaggaccagaggctgccagatgtttctggctcctcacgtgtccttcaggacagaacagaagcacaaagactcagccaagagttctctttattccctttgatcctcccccaaggtgagggcttaggcagctgtagaaccccaggaaagaacggaatccaggcaatctgtttagagaccccccactccaaatttatccttttcctttccttcccctaagatgtttccagggccctctggtgcccacactgtcctcttccttccacttgggggtggggaaatccttcctgcgaggtcagggcatttctctacaaagtggcctgaatgaggccaggccctgagaaggagccaccagctggaggaaaggggctccaagccttgcttttaacacccctgcaaaacccccaccctcccaagatgttcacaaaaggtgagaaattcaggtacgaaaccatcaatggacaacttgaaaatgcatgttcctcaggcctatgcagttcccagagactcttgacaccggtctctgctgaggctcccagcctcagtttcccccacagcagcacgggccccactgtgctgctcttcaggtccccacagccctgcctttggttcctggacatttggtattctgccctccactctggtactatcagagtagggcaggctctggattaaagcttttagccggtc

SEQ ID NO: 1273 - protein, 766 aa, Homo sapiens
MGRRRLLVWLCAVAALLSGAQARGTPLLARPAPPGASRYSLYTTGWRPRLRPGPHKALCAYVVHRNVTCILQEGAESYVKAEYRQCRWGPKCPGTVTYRTVLRPKYKVGYKTVTDLAWRCCPGFTGKRCPEHLTDHGAASPQLEPEPQIPSGQLDPGPRPPSYSRAAPSPHGRKGPGLFGERLERLEGDVQRLAQTYGTLSGLVASHEDPNRMTGGPRAPAVPVGFGVIPEGLVGPGDRARGPLTPPLDEILSKVTEVSNTLQTKVQLLDKVHGLALGHEAHLQRLREAPPSPLTSLALLEEYVDRRLHRLWGSLLDGFEQKLQGVQSECDLRVQEVRRQCEEGQAASRRLHQSLDGRELALRQELSQLGSQLQGLSVSGRGSCCGQLALINARMDGLERALQAVTETQRGPGAPAGDELTRLSAAMLEGGVDGLLEGLETLNGTEGGARGCCLRLDMGGWGVGGFGTMLEERVQSLEERLATLAGELSHDSASPGRSARPLVQTELAVLEQRLVSLETSCTPSTTSAILDSLVAEVKAWQSRSEALLRQVASHAALLQQLNGTVAEVQGQLAEGTGSSLQGEITLLKVNLNSVSKSLTGLSDSVSQYSDAFLAANTSLDERERKVEAEVQAIQEQVSSQGSRLQAGHRQVLNLRGELEQLKAGVAKVASGLSRCQDTAQKLQHTVGHFDQRVAQVEGACRRLGLLAAGLDSLPTEPLRPREGLWSHVDQLNRTLAQHTQDIARLRDDLLDCQAQLAEQVRPGQAN

SEQ ID NO: 1274 - DNA, 7923 bp, Homo sapiens
agcgacggcggcggctgcggcttagtcggtggcggccggcggcggctgcgggctgagcggcgagtttccgatttaaagctgagctgcgaggaaaatggcggcgggaggatcaaaatacttgctggatggtggactcagagaccaataaaaataaactgcttgaacatcctttgactggttagccagttgctgatgtatattcaagatgagtggattaggagaaaacttggatccactggccagtgattcacgaaaacgcaaattgccatgtgatactccaggacaaggtcttacctgcagtggtgaaaaacggagacgggagcaggaaagtaaatatattgaagaattggctgagctgatatctgccaatcttagtgatattgacaatttcaatgtcaaaccagataaatgtgcgattttaaaggaaacagtaagacagatacgtcaaataaaagagcaaggaaaaactatttccaatgatgatgatgttcaaaaagccgatgtatcttctacagggcagggagttattgataaagactccttaggaccgcttttacttcaggcattggatggtttcctatttgtggtgaatcgagacggaaacattgtatttgtatcagaaaatgtcacacaatacctgcaatataagcaagaggacctggttaacacaagtgtttacaatatcttacatgaagaagacagaaaggattttcttaagaatttaccaaaatctacagttaatggagtttcctggacaaatgagacccaaagacaaaaaagccatacatttaattgccgtatgttgatgaaaacaccacatgatattctggaagacataaacgccagtcctgaaatgcgccagagatatgaaacaatgcagtgctttgccctgtctcagccacgagctatgatggaggaaggggaagatttgcaatcttgtatgatctgtgtggcacgccgcattactacaggagaaagaacatttccatcaaaccctgagagctttattaccagacatgatctttcaggaaaggttgtcaatatagatacaaattcactgagatcctccatgaggcctggctttgaagatataatccgaaggtgtattcagagattttttagtctaaatgatgggcagtcatggtcccagaaacgtcactatcaagaagcttatcttaatggccatgcagaaaccccagtatatcgattctcgttggctgatggaactatagtgactgcacagacaaaaagcaaactcttccgaaatcctgtaacaaatgatcgacatggctttgtctcaacccacttccttcagagagaacagaatggatatagaccaaacccaaatcctgttggacaagggattagaccacctatggctggatgcaacagttcggtaggcggcatgagtatgtcgccaaaccaaggcttacagatgccgagcagcagggcctatggcttggcagaccctagcaccacagggcagatgagtggagctaggtatgggggttccagtaacatagcttcattgacccctgggccaggcatgcaatcaccatcttcctaccagaacaacaactatgggctcaacatgagtagccccccacatgggagtcctggtcttgccccaaaccagcagaatatcatgatttctcctcgtaatcgtgggagtccaaagatagcctcacatcagttttctcctgttgcaggtgtgcactctcccatggcatcttctggcaatactgggaaccacagcttttccagcagctctctcagtgccctgcaagccatcagtgaaggtgtggggacttcccttttatctactctgtcatcaccaggccccaaattggataactctcccaatatgaatattacccaaccaagtaaagtaagcaatcaggattccaagagtcctctgggcttttattgcgaccaaaatccagtggagagttcaatgtgtcagtcaaatagcagagatcacctcagtgacaaagaaagtaaggagagcagtgttgagggggcagagaatcaaaggggtcctttggaaagcaaaggtcataaaaaattactgcagttacttacctgttcttctgatgaccggggtcattcctccttgaccaactcccccctagattcaagttgtaaagaatcttctgttagtgtcaccagcccctctggagtctcctcctctacatctggaggagtatcctctacatccaatatgcatgggtcactgttacaagagaagcaccggattttgcacaagttgctgcagaatgggaattcaccagctgaggtagccaagattactgcagaagccactgggaaagacaccagcagtataacttcttgtggggacggaaatgttgtcaagcaggagcagctaagtcctaagaagaaggagaataatgcacttcttagatacctgctggacagggatgatcctagtgatgcactctctaaagaactacagccccaagtggaaggagtggataataaaatgagtcagtgcaccagctccaccattcctagctcaagtcaagagaaagaccctaaaattaagacagagacaagtgaagagggatctggagacttggataatctagatgctattcttggtgatctgactagttctgacttttacaataattccatatcctcaaatggtagtcatctggggactaagcaacaggtgtttcaaggaactaattctctgggtttgaaaagttcacagtctgtgcagtctattcgtcctccatataaccgagcagtgtctctggatagccctgtttctgttggctcaagtcctccagtaaaaaatatcagtgctttccccatgttaccaaagcaacccatgttgggtgggaatccaagaatgatggatagtcaggaaaattatggctcaagtatgggtgggccaaaccgaaatgtgactgtgactcagactccttcctcaggagactggggcttaccaaactcaaaggccggcagaatggaacctatgaattcaaactccatgggaagaccaggaggagattataatacttctttacccagacctgcactgggtggctctattcccacattgcctcttcggtctaatagcataccaggtgcgagaccagtattgcaacagcagcagcagatgcttcaaatgaggcctggtgaaatccccatgggaatgggggctaatccctatggccaagcagcagcatctaaccaactgggttcctggcccgatggcatgttgtccatggaacaagtttctcatggcactcaaaataggcctcttcttaggaattccctggatgatcttgttgggccaccttccaacctggaaggccagagtgacgaaagagcattattggaccagctgcacactcttctcagcaacacagatgccacaggcctggaagaaattgacagagctttgggcattcctgaacttgtcaatcagggacaggcattagagcccaaacaggatgctttccaaggccaagaagcagcagtaatgatggatcagaaggcaggattatatggacagacatacccagcacaggggcctccaatgcaaggaggctttcatcttcagggacaatcaccatcttttaactctatgatgaatcagatgaaccagcaaggcaattttcctctccaaggaatgcacccacgagccaacatcatgagaccccggacaaacacccccaagcaacttagaatgcagcttcagcagaggctgcagggccagcagtttttgaatcagagccgacaggcacttgaattgaaaatggaaaaccctactgctggtggtgctgcggtgatgaggcctatgatgcagccccagcagggttttcttaatgctcaaatggtcgcccaacgcagcagagagctgctaagtcatcacttccgacaacagagggtggctatgatgatgcagcagcagcagcagcagcaacagcagcagcagcagcagcagcagcagcaacagcaacagcaacagcaacagcagcaacagcagcaaacccaggccttcagcccacctcctaatgtgactgcttcccccagcatggatgggcttttggcaggacccacaatgccacaagctcctccgcaacagtttccatatcaaccaaattatggaatgggacaacaaccagatccagcctttggtcgagtgtctagtcctcccaatgcaatgatgtcgtcaagaatgggtccctcccagaatcccatgatgcaacacccgcaggctgcatccatctatcagtcctcagaaatgaagggctggccatcaggaaatttggccaggaacagctccttttcccagcagcagtttgcccaccaggggaatcctgcagtgtatagtatggtgcacatgaatggcagcagtggtcacatgggacagatgaacatgaaccccatgcccatgtctggcatgcctatgggtcctgatcagaaatactgctgacatctctgcaccaggacctcttaaggaaaccactgtacaaatgacactgcactaggattattgggaaggaatcattgttccaggcatccatcttggaagaaaggaccagctttgagctccatcaagggtattttaagtgatgtcatttgagcaggactggattttaagccgaagggcaatatctacgtgtttttcccccctccttctgctgtgtatcatggtgttcaaaacagaaatgttttttggcattccacctcctagggatataattctggagacatggagtgttactgatcataaaacttttgtgtcacttttttctgccttgctagccaaaatctcttaaatacacgtaggtgggccagagaacattggaagaatcaagagagattagaatatctggtttctctagttgcagtattggacaaagagcatagtcccagccttcaggtgtagtagttctgtgttgaccctttgtccagtggaattggtgattctgaattgtcctttactaatggtgttgagttgctctgtccctattatttgccctaggctttctcctaatgaaggttttcatttgccattcatgtcctgtaatacttcacctccaggaactgtcatggatgtccaaatggctttgcagaaaggaaatgagatgacagtatttaatcgcagcagtagcaaacttttcacatgctaatgtgcagctgagtgcactttatttaaaaagaatggataaatgcaatattcttgaggtcttgagggaatagtgaaacacattcctggtttttgcctacacttacgtgttagacaagaactatgatttttttttttaaagtactggtgtcaccctttgcctatatggtagagcaataatgctttttaaaaataaacttctgaaaacccaaggccaggtactgcattctgaatcagaatctcgcagtgtttctgtgaatagatttttttgtaaatatgacctttaagatattgtattatgtaaaatatgtatatacctttttttgtaggtcacaacaactcatttttacagagtttgtgaagctaaatatttaacattgttgatttcagtaagctgtgtggtgaggctaccagtggaagagacatcccttgacttttgtggcctgggggaggggtagtgctccacagcttttccttccccaccccccagccttagatgcctcgctcttttcaatctcttaatctaaatgctttttaaagagattatttgtttagatgtaggcattttaattttttaaaaattcctctaccagaactaagcactttgttaatttggggggaaagaatagatatggggaaataaacttaaaaaaaaatcaggaatttaaaaaaacgagcaatttgaagagaatcttttggattttaagcagtccgaaataatagcaattcatgggctgtgtgtgtgtgtgtatgtgtgtgtgtgtgtgtgtatgtttaattatgttaccttttcatcccctttaggagcgttttcagattttggttgctaagacctgaatcccatattgagatctcgagtagaatccttggtgtggtttctggtgtctgctcagctgtcccctcattctactaatgtgatgctttcattatgtccctgtggattagaatagtgtcagttatttcttaagtaactcagtacccagaacagccagttttactgtgattcagagccacagtctaactgagcaccttttaaacccctccctcttctgccccctaccacttttctgctgttgcctctctttgacacctgttttagtcagttgggaggaagggaaaaatcaagtttaattccctttatctgggttaattcatttggttcaaatagttgacggaattgggtttctgaatgtctgtgaatttcagaggtctctgctagccttggtatcattttctagcaataactgagagccagttaattttaagaatttcacacatttagccaatctttctagatgtctctgaaggtaagatcatttaatatctttgatatgcttacgagtaagtgaatcctgattatttccagacccaccaccagagtggatcttattttcaaagcagtatagacaattatgagtttgccctctttcccctaccaagttcaaaatatatctaagaaagattgtaaatccgaaaacttccattgtagtggcctgtgcttttcagatagtatactctcctgtttggagacagaggaagaaccaggtcagtctgtctctttttcagctcaattgtatctgacccttctttaagttatgtgtgtggggagaaatagaatggtgctcttatctttcttgactttaaaaaaattattaaaaacaaaaaaaaaataaatttttttgcaatcctttcctcagacctggctccaggctaactggaaggcagcactcccttttttatatagtagaaaaatgaagtttattataagtttttatattttctacttgttcatttggtgcaaactcaagatttcttttaataggtgcagtctttgagataatttgtttttacctgtattgccctttatcttttttaggtaattctttgtactcctgctgtctacctctcctcacaccccagcaccccccattttttcaaaccttggtatctgttgggtgaacagtataatcttttcatctgcttttagaatgtgggatatttccagtacctactttttttttttttttttgctgaatccaaagatatataaataaaatatatatattttataaagatcagaatgatataaaggagatacatgtttcttcctttaaaaaataaacggaagttacattgttaatgttcatattatgatgccacttttctaaactgcatctggattgaaaggtgtaaatatcaataacagtgctacttagttatcagtatttaatatctgaggtgagttgggggtatctatattaggggtagggtattacagaagataattggcttgatgtcctagaagttctttgatccagaggtgggtgcagctgaaagtaaacagaatggattgccagttacatgtatgcctgcccagttccctttttatttgcagaagctgtgagttttgttcacaattaggttcctaggagcaaaacctcaaggattgatttattgttttcaactccaaggcacactgttaataaacgagcagggtgttttctctcttcctttctaatatatggagtttcgaagaataaaatatgagagcaatatttaaattctcaggaattgacttatactcttgagaatgaattcagtttcaatcaagtttacattatgttgcttaaaaaaatagaaattattctttatcttgcaaagaattgaaaccacatgaaatgacttatgggggatggtgagctgtgactgctttgctgaccattttggatgtcattgtaaataaaggtttctatttaaaa

SEQ ID NO: 1275 - protein, 1420 aa, Homo sapiens
MSGLGENLDPLASDSRKRKLPCDTPGQGLTCSGEKRRREQESKYIEELAELISANLSDIDNFNVKPDKCAILKETVRQIRQIKEQGKTISNDDDVQKADVSSTGQGVIDKDSLGPLLLQALDGFLFVVNRDGNIVFVSENVTQYLQYKQEDLVNTSVYNILHEEDRKDFLKNLPKSTVNGVSWTNETQRQKSHTFNCRMLMKTPHDILEDINASPEMRQRYETMQCFALSQPRAMMEEGEDLQSCMICVARRITTGERTFPSNPESFITRHDLSGKVVNIDTNSLRSSMRPGFEDIIRRCIQRFFSLNDGQSWSQKRHYQEAYLNGHAETPVYRFSLADGTIVTAQTKSKLFRNPVTNDRHGFVSTHFLQREQNGYRPNPNPVGQGIRPPMAGCNSSVGGMSMSPNQGLQMPSSRAYGLADPSTTGQMSGARYGGSSNIASLTPGPGMQSPSSYQNNNYGLNMSSPPHGSPGLAPNQQNIMISPRNRGSPKIASHQFSPVAGVHSPMASSGNTGNHSFSSSSLSALQAISEGVGTSLLSTLSSPGPKLDNSPNMNITQPSKVSNQDSKSPLGFYCDQNPVESSMCQSNSRDHLSDKESKESSVEGAENQRGPLESKGHKKLLQLLTCSSDDRGHSSLTNSPLDSSCKESSVSVTSPSGVSSSTSGGVSSTSNMHGSLLQEKHRILHKLLQNGNSPAEVAKITAEATGKDTSSITSCGDGNVVKQEQLSPKKKENNALLRYLLDRDDPSDALSKELQPQVEGVDNKMSQCTSSTIPSSSQEKDPKIKTETSEEGSGDLDNLDAILGDLTSSDFYNNSISSNGSHLGTKQQVFQGTNSLGLKSSQSVQSIRPPYNRAVSLDSPVSVGSSPPVKNISAFPMLPKQPMLGGNPRMMDSQENYGSSMGGPNRNVTVTQTPSSGDWGLPNSKAGRMEPMNSNSMGRPGGDYNTSLPRPALGGSIPTLPLRSNSIPGARPVLQQQQQMLQMRPGEIPMGMGANPYGQAAASNQLGSWPDGMLSMEQVSHGTQNRPLLRNSLDDLVGPPSNLEGQSDERALLDQLHTLLSNTDATGLEEIDRALGIPELVNQGQALEPKQDAFQGQEAAVMMDQKAGLYGQTYPAQGPPMQGGFHLQGQSPSFNSMMNQMNQQGNFPLQGMHPRANIMRPRTNTPKQLRMQLQQRLQGQQFLNQSRQALELKMENPTAGGAAVMRPMMQPQQGFLNAQMVAQRSRELLSHHFRQQRVAMMMQQQQQQQQQQQQQQQQQQQQQQQQQQQQQTQAFSPPPNVTASPSMDGLLAGPTMPQAPPQQFPYQPNYGMGQQPDPAFGRVSSPPNAMMSSRMGPSQNPMMQHPQAASIYQSSEMKGWPSGNLARNSSFSQQQFAHQGNPAVYSMVHMNGSSGHMGQMNMNPMPMSGMPMGPDQKYC

SEQ ID NO: 1276 - DNA, 7935 bp, Homo sapiens
agcgacggcggcggctgcggcttagtcggtggcggccggcggcggctgcgggctgagcggcgagtttccgatttaaagctgagctgcgaggaaaatggcggcgggaggatcaaaatacttgctggatggtggactcagagaccaataaaaataaactgcttgaacatcctttgactggttagccagttgctgatgtatattcaagatgagtggattaggagaaaacttggatccactggccagtgattcacgaaaacgcaaattgccatgtgatactccaggacaaggtcttacctgcagtggtgaaaaacggagacgggagcaggaaagtaaatatattgaagaattggctgagctgatatctgccaatcttagtgatattgacaatttcaatgtcaaaccagataaatgtgcgattttaaaggaaacagtaagacagatacgtcaaataaaagagcaaggaaaaactatttccaatgatgatgatgttcaaaaagccgatgtatcttctacagggcagggagttattgataaagactccttaggaccgcttttacttcaggcattggatggtttcctatttgtggtgaatcgagacggaaacattgtatttgtatcagaaaatgtcacacaatacctgcaatataagcaagaggacctggttaacacaagtgtttacaatatcttacatgaagaagacagaaaggattttcttaagaatttaccaaaatctacagttaatggagtttcctggacaaatgagacccaaagacaaaaaagccatacatttaattgccgtatgttgatgaaaacaccacatgatattctggaagacataaacgccagtcctgaaatgcgccagagatatgaaacaatgcagtgctttgccctgtctcagccacgagctatgatggaggaaggggaagatttgcaatcttgtatgatctgtgtggcacgccgcattactacaggagaaagaacatttccatcaaaccctgagagctttattaccagacatgatctttcaggaaaggttgtcaatatagatacaaattcactgagatcctccatgaggcctggctttgaagatataatccgaaggtgtattcagagattttttagtctaaatgatgggcagtcatggtcccagaaacgtcactatcaagaagcttatcttaatggccatgcagaaaccccagtatatcgattctcgttggctgatggaactatagtgactgcacagacaaaaagcaaactcttccgaaatcctgtaacaaatgatcgacatggctttgtctcaacccacttccttcagagagaacagaatggatatagaccaaacccaaatcctgttggacaagggattagaccacctatggctggatgcaacagttcggtaggcggcatgagtatgtcgccaaaccaaggcttacagatgccgagcagcagggcctatggcttggcagaccctagcaccacagggcagatgagtggagctaggtatgggggttccagtaacatagcttcattgacccctgggccaggcatgcaatcaccatcttcctaccagaacaacaactatgggctcaacatgagtagccccccacatgggagtcctggtcttgccccaaaccagcagaatatcatgatttctcctcgtaatcgtgggagtccaaagatagcctcacatcagttttctcctgttgcaggtgtgcactctcccatggcatcttctggcaatactgggaaccacagcttttccagcagctctctcagtgccctgcaagccatcagtgaaggtgtggggacttcccttttatctactctgtcatcaccaggccccaaattggataactctcccaatatgaatattacccaaccaagtaaagtaagcaatcaggattccaagagtcctctgggcttttattgcgaccaaaatccagtggagagttcaatgtgtcagtcaaatagcagagatcacctcagtgacaaagaaagtaaggagagcagtgttgagggggcagagaatcaaaggggtcctttggaaagcaaaggtcataaaaaattactgcagttacttacctgttcttctgatgaccggggtcattcctccttgaccaactcccccctagattcaagttgtaaagaatcttctgttagtgtcaccagcccctctggagtctcctcctctacatctggaggagtatcctctacatccaatatgcatgggtcactgttacaagagaagcaccggattttgcacaagttgctgcagaatgggaattcaccagctgaggtagccaagattactgcagaagccactgggaaagacaccagcagtataacttcttgtggggacggaaatgttgtcaagcaggagcagctaagtcctaagaagaaggagaataatgcacttcttagatacctgctggacagggatgatcctagtgatgcactctctaaagaactacagccccaagtggaaggagtggataataaaatgagtcagtgcaccagctccaccattcctagctcaagtcaagagaaagaccctaaaattaagacagagacaagtgaagagggatctggagacttggataatctagatgctattcttggtgatctgactagttctgacttttacaataattccatatcctcaaatggtagtcatctggggactaagcaacaggtgtttcaaggaactaattctctgggtttgaaaagttcacagtctgtgcagtctattcgtcctccatataaccgagcagtgtctctggatagccctgtttctgttggctcaagtcctccagtaaaaaatatcagtgctttccccatgttaccaaagcaacccatgttgggtgggaatccaagaatgatggatagtcaggaaaattatggctcaagtatgggtgggccaaaccgaaatgtgactgtgactcagactccttcctcaggagactggggcttaccaaactcaaaggccggcagaatggaacctatgaattcaaactccatgggaagaccaggaggagattataatacttctttacccagacctgcactgggtggctctattcccacattgcctcttcggtctaatagcataccaggtgcgagaccagtattgcaacagcagcagcagatgcttcaaatgaggcctggtgaaatccccatgggaatgggggctaatccctatggccaagcagcagcatctaaccaactgggttcctggcccgatggcatgttgtccatggaacaagtttctcatggcactcaaaataggcctcttcttaggaattccctggatgatcttgttgggccaccttccaacctggaaggccagagtgacgaaagagcattattggaccagctgcacactcttctcagcaacacagatgccacaggcctggaagaaattgacagagctttgggcattcctgaacttgtcaatcagggacaggcattagagcccaaacaggatgctttccaaggccaagaagcagcagtaatgatggatcagaaggcaggattatatggacagacatacccagcacaggggcctccaatgcaaggaggctttcatcttcagggacaatcaccatcttttaactctatgatgaatcagatgaaccagcaaggcaattttcctctccaaggaatgcacccacgagccaacatcatgagaccccggacaaacacccccaagcaacttagaatgcagcttcagcagaggctgcagggccagcagtttttgaatcagagccgacaggcacttgaattgaaaatggaaaaccctactgctggtggtgctgcggtgatgaggcctatgatgcagccccaggtgagctcccagcagggttttcttaatgctcaaatggtcgcccaacgcagcagagagctgctaagtcatcacttccgacaacagagggtggctatgatgatgcagcagcagcagcagcagcaacagcagcagcagcagcagcagcagcagcaacagcaacagcaacagcaacagcagcaacagcagcaaacccaggccttcagcccacctcctaatgtgactgcttcccccagcatggatgggcttttggcaggacccacaatgccacaagctcctccgcaacagtttccatatcaaccaaattatggaatgggacaacaaccagatccagcctttggtcgagtgtctagtcctcccaatgcaatgatgtcgtcaagaatgggtccctcccagaatcccatgatgcaacacccgcaggctgcatccatctatcagtcctcagaaatgaagggctggccatcaggaaatttggccaggaacagctccttttcccagcagcagtttgcccaccaggggaatcctgcagtgtatagtatggtgcacatgaatggcagcagtggtcacatgggacagatgaacatgaaccccatgcccatgtctggcatgcctatgggtcctgatcagaaatactgctgacatctctgcaccaggacctcttaaggaaaccactgtacaaatgacactgcactaggattattgggaaggaatcattgttccaggcatccatcttggaagaaaggaccagctttgagctccatcaagggtattttaagtgatgtcatttgagcaggactggattttaagccgaagggcaatatctacgtgtttttcccccctccttctgctgtgtatcatggtgttcaaaacagaaatgttttttggcattccacctcctagggatataattctggagacatggagtgttactgatcataaaacttttgtgtcacttttttctgccttgctagccaaaatctcttaaatacacgtaggtgggccagagaacattggaagaatcaagagagattagaatatctggtttctctagttgcagtattggacaaagagcatagtcccagccttcaggtgtagtagttctgtgttgaccctttgtccagtggaattggtgattctgaattgtcctttactaatggtgttgagttgctctgtccctattatttgccctaggctttctcctaatgaaggttttcatttgccattcatgtcctgtaatacttcacctccaggaactgtcatggatgtccaaatggctttgcagaaaggaaatgagatgacagtatttaatcgcagcagtagcaaacttttcacatgctaatgtgcagctgagtgcactttatttaaaaagaatggataaatgcaatattcttgaggtcttgagggaatagtgaaacacattcctggtttttgcctacacttacgtgttagacaagaactatgatttttttttttaaagtactggtgtcaccctttgcctatatggtagagcaataatgctttttaaaaataaacttctgaaaacccaaggccaggtactgcattctgaatcagaatctcgcagtgtttctgtgaatagatttttttgtaaatatgacctttaagatattgtattatgtaaaatatgtatatacctttttttgtaggtcacaacaactcatttttacagagtttgtgaagctaaatatttaacattgttgatttcagtaagctgtgtggtgaggctaccagtggaagagacatcccttgacttttgtggcctgggggaggggtagtgctccacagcttttccttccccaccccccagccttagatgcctcgctcttttcaatctcttaatctaaatgctttttaaagagattatttgtttagatgtaggcattttaattttttaaaaattcctctaccagaactaagcactttgttaatttggggggaaagaatagatatggggaaataaacttaaaaaaaaatcaggaatttaaaaaaacgagcaatttgaagagaatcttttggattttaagcagtccgaaataatagcaattcatgggctgtgtgtgtgtgtgtatgtgtgtgtgtgtgtgtgtatgtttaattatgttaccttttcatcccctttaggagcgttttcagattttggttgctaagacctgaatcccatattgagatctcgagtagaatccttggtgtggtttctggtgtctgctcagctgtcccctcattctactaatgtgatgctttcattatgtccctgtggattagaatagtgtcagttatttcttaagtaactcagtacccagaacagccagttttactgtgattcagagccacagtctaactgagcaccttttaaacccctccctcttctgccccctaccacttttctgctgttgcctctctttgacacctgttttagtcagttgggaggaagggaaaaatcaagtttaattccctttatctgggttaattcatttggttcaaatagttgacggaattgggtttctgaatgtctgtgaatttcagaggtctctgctagccttggtatcattttctagcaataactgagagccagttaattttaagaatttcacacatttagccaatctttctagatgtctctgaaggtaagatcatttaatatctttgatatgcttacgagtaagtgaatcctgattatttccagacccaccaccagagtggatcttattttcaaagcagtatagacaattatgagtttgccctctttcccctaccaagttcaaaatatatctaagaaagattgtaaatccgaaaacttccattgtagtggcctgtgcttttcagatagtatactctcctgtttggagacagaggaagaaccaggtcagtctgtctctttttcagctcaattgtatctgacccttctttaagttatgtgtgtggggagaaatagaatggtgctcttatctttcttgactttaaaaaaattattaaaaacaaaaaaaaaataaatttttttgcaatcctttcctcagacctggctccaggctaactggaaggcagcactcccttttttatatagtagaaaaatgaagtttattataagtttttatattttctacttgttcatttggtgcaaactcaagatttcttttaataggtgcagtctttgagataatttgtttttacctgtattgccctttatcttttttaggtaattctttgtactcctgctgtctacctctcctcacaccccagcaccccccattttttcaaaccttggtatctgttgggtgaacagtataatcttttcatctgcttttagaatgtgggatatttccagtacctactttttttttttttttttgctgaatccaaagatatataaataaaatatatatattttataaagatcagaatgatataaaggagatacatgtttcttcctttaaaaaataaacggaagttacattgttaatgttcatattatgatgccacttttctaaactgcatctggattgaaaggtgtaaatatcaataacagtgctacttagttatcagtatttaatatctgaggtgagttgggggtatctatattaggggtagggtattacagaagataattggcttgatgtcctagaagttctttgatccagaggtgggtgcagctgaaagtaaacagaatggattgccagttacatgtatgcctgcccagttccctttttatttgcagaagctgtgagttttgttcacaattaggttcctaggagcaaaacctcaaggattgatttattgttttcaactccaaggcacactgttaataaacgagcagggtgttttctctcttcctttctaatatatggagtttcgaagaataaaatatgagagcaatatttaaattctcaggaattgacttatactcttgagaatgaattcagtttcaatcaagtttacattatgttgcttaaaaaaatagaaattattctttatcttgcaaagaattgaaaccacatgaaatgacttatgggggatggtgagctgtgactgctttgctgaccattttggatgtcattgtaaataaaggtttctatttaaaa

SEQ ID NO: 1277 - protein, 1424 aa, Homo sapiens
MSGLGENLDPLASDSRKRKLPCDTPGQGLTCSGEKRRREQESKYIEELAELISANLSDIDNFNVKPDKCAILKETVRQIRQIKEQGKTISNDDDVQKADVSSTGQGVIDKDSLGPLLLQALDGFLFVVNRDGNIVFVSENVTQYLQYKQEDLVNTSVYNILHEEDRKDFLKNLPKSTVNGVSWTNETQRQKSHTFNCRMLMKTPHDILEDINASPEMRQRYETMQCFALSQPRAMMEEGEDLQSCMICVARRITTGERTFPSNPESFITRHDLSGKVVNIDTNSLRSSMRPGFEDIIRRCIQRFFSLNDGQSWSQKRHYQEAYLNGHAETPVYRFSLADGTIVTAQTKSKLFRNPVTNDRHGFVSTHFLQREQNGYRPNPNPVGQGIRPPMAGCNSSVGGMSMSPNQGLQMPSSRAYGLADPSTTGQMSGARYGGSSNIASLTPGPGMQSPSSYQNNNYGLNMSSPPHGSPGLAPNQQNIMISPRNRGSPKIASHQFSPVAGVHSPMASSGNTGNHSFSSSSLSALQAISEGVGTSLLSTLSSPGPKLDNSPNMNITQPSKVSNQDSKSPLGFYCDQNPVESSMCQSNSRDHLSDKESKESSVEGAENQRGPLESKGHKKLLQLLTCSSDDRGHSSLTNSPLDSSCKESSVSVTSPSGVSSSTSGGVSSTSNMHGSLLQEKHRILHKLLQNGNSPAEVAKITAEATGKDTSSITSCGDGNVVKQEQLSPKKKENNALLRYLLDRDDPSDALSKELQPQVEGVDNKMSQCTSSTIPSSSQEKDPKIKTETSEEGSGDLDNLDAILGDLTSSDFYNNSISSNGSHLGTKQQVFQGTNSLGLKSSQSVQSIRPPYNRAVSLDSPVSVGSSPPVKNISAFPMLPKQPMLGGNPRMMDSQENYGSSMGGPNRNVTVTQTPSSGDWGLPNSKAGRMEPMNSNSMGRPGGDYNTSLPRPALGGSIPTLPLRSNSIPGARPVLQQQQQMLQMRPGEIPMGMGANPYGQAAASNQLGSWPDGMLSMEQVSHGTQNRPLLRNSLDDLVGPPSNLEGQSDERALLDQLHTLLSNTDATGLEEIDRALGIPELVNQGQALEPKQDAFQGQEAAVMMDQKAGLYGQTYPAQGPPMQGGFHLQGQSPSFNSMMNQMNQQGNFPLQGMHPRANIMRPRTNTPKQLRMQLQQRLQGQQFLNQSRQALELKMENPTAGGAAVMRPMMQPQVSSQQGFLNAQMVAQRSRELLSHHFRQQRVAMMMQQQQQQQQQQQQQQQQQQQQQQQQQQQQQTQAFSPPPNVTASPSMDGLLAGPTMPQAPPQQFPYQPNYGMGQQPDPAFGRVSSPPNAMMSSRMGPSQNPMMQHPQAASIYQSSEMKGWPSGNLARNSSFSQQQFAHQGNPAVYSMVHMNGSSGHMGQMNMNPMPMSGMPMGPDQKYC

SEQ ID NO: 1278 - DNA, 3897 bp, Homo sapiens
gagcgagagtgtgtcgagtgagtgtgcgtctgtgtgtcccggcgagggtgcgcgctcggcgccgggagcgcggccagccgagtccggaggcatcgggaggtcgagagccgccgggaccccagctctgcgttcactgccccgtccggagctggacttcggggccggggccggggccgtgcgccggggacaggcagggccgggtcgcgggccgcgcgtcccccaggccggagatctgcgagtgaagagggacgagggaaaagaaacaaagccacagacgcaacttgagactcccgcatcccaaaagaagcaccagatcagcaaaaaaagaagatgggccccccgagcctcgtgctgtgcttgctgtccgcaactgtgttctccctgctgggtggaagctcggccttcctgtcgcaccaccgcctgaaaggcaggtttcagagggaccgcaggaacatccgccccaacatcatcctggtgctgacggacgaccaggatgtggagctgggttccatgcaggtgatgaacaagacccggcgcatcatggagcagggcggggcgcacttcatcaacgccttcgtgaccacacccatgtgctgcccctcacgctcctccatcctcactggcaagtacgtccacaaccacaacacctacaccaacaatgagaactgctcctcgccctcctggcaggcacagcacgagagccgcacctttgccgtgtacctcaatagcactggctaccggacagctttcttcgggaagtatcttaatgaatacaacggctcctacgtgccacccggctggaaggagtgggtcggactccttaaaaactcccgcttttataactacacgctgtgtcggaacggggtgaaagagaagcacggctccgactactccaaggattacctcacagacctcatcaccaatgacagcgtgagcttcttccgcacgtccaagaagatgtacccgcacaggccagtcctcatggtcatcagccatgcagccccccacggccctgaggattcagccccacaatattcacgcctcttcccaaacgcatctcagcacatcacgccgagctacaactacgcgcccaacccggacaaacactggatcatgcgctacacggggcccatgaagcccatccacatggaattcaccaacatgctccagcggaagcgcttgcagaccctcatgtcggtggacgactccatggagacgatttacaacatgctggttgagacgggcgagctggacaacacgtacatcgtatacaccgccgaccacggttaccacatcggccagtttggcctggtgaaagggaaatccatgccatatgagtttgacatcagggtcccgttctacgtgaggggccccaacgtggaagccggctgtctgaatccccacatcgtcctcaacattgacctggcccccaccatcctggacattgcaggcctggacatacctgcggatatggacgggaaatccatcctcaagctgctggacacggagcggccggtgaatcggtttcacttgaaaaagaagatgagggtctggcgggactccttcttggtggagagaggcaagctgctacacaagagagacaatgacaaggtggacgcccaggaggagaactttctgcccaagtaccagcgtgtgaaggacctgtgtcagcgtgctgagtaccagacggcgtgtgagcagctgggacagaagtggcagtgtgtggaggacgccacggggaagctgaagctgcataagtgcaagggccccatgcggctgggcggcagcagagccctctccaacctcgtgcccaagtactacgggcagggcagcgaggcctgcacctgtgacagcggggactacaagctcagcctggccggacgccggaaaaaactcttcaagaagaagtacaaggccagctatgtccgcagtcgctccatccgctcagtggccatcgaggtggacggcagggtgtaccacgtaggcctgggtgatgccgcccagccccgaaacctcaccaagcggcactggccaggggcccctgaggaccaagatgacaaggatggtggggacttcagtggcactggaggccttcccgactactcagccgccaaccccattaaagtgacacatcggtgctacatcctagagaacgacacagtccagtgtgacctggacctgtacaagtccctgcaggcctggaaagaccacaagctgcacatcgaccacgagattgaaaccctgcagaacaaaattaagaacctgagggaagtccgaggtcacctgaagaaaaagcggccagaagaatgtgactgtcacaaaatcagctaccacacccagcacaaaggccgcctcaagcacagaggctccagtctgcatcctttcaggaagggcctgcaagagaaggacaaggtgtggctgttgcgggagcagaagcgcaagaagaaactccgcaagctgctcaagcgcctgcagaacaacgacacgtgcagcatgccaggcctcacgtgcttcacccacgacaaccagcactggcagacggcgcctttctggacactggggcctttctgtgcctgcaccagcgccaacaataacacgtactggtgcatgaggaccatcaatgagactcacaatttcctcttctgtgaatttgcaactggcttcctagagtactttgatctcaacacagacccctaccagctgatgaatgcagtgaacacactggacagggatgtcctcaaccagctacacgtacagctcatggagctgaggagctgcaagggttacaagcagtgtaacccccggactcgaaacatggacctgggacttaaagatggaggaagctatgagcaatacaggcagtttcagcgtcgaaagtggccagaaatgaagagaccttcttccaaatcactgggacaactgtgggaaggctgggaaggttaagaaacaacagaggtggacctccaaaaacatagaggcatcacctgactgcacaggcaatgaaaaaccatgtgggtgatttccagcagacctgtggtattggccaggaggcctgagaaagcaagcacgcactctcagtcaacatgacagattctggaggataaccagcaggagcagagataacttcaggaagtccatttttgcccctgcttttgctttggattatacctcaccagctgcacaaaatgcattttttcgtatcaaaaagtcaccactaaccctcccccagaagctcacaaaggaaaacggagagagcgagcgagagagatttccttggaaatttctcccaagggcgaaagtcattggaatttttaaatcataggggaaaagcagtcctgttctaaatcctcttattcttttggtttgtcacaaagaaggaactaagaagcaggacagaggcaacgtggagaggctgaaaacagtgcagagacgtttgacaatgagtcagtagcacaaaagagatgacatttacctagcactataaaccctggttgcctctgaagaaactgccttcattgtatatatgtgactatttacatgtaatcaacatgggaacttttaggggaacctaataagaaatcccaattttcaggagtggtggtgtcaataaacgctctgtggccagtgtaaaagaaaatccctcgcagttgtggacatttctgttcctgtccagataccatttctcctagtatttctttgttatgtcccagaactgatgttttttttttaaggtactgaaaagaaatgaagttgatgtatgtcccaagttttgatgaaactgtatttgtaaaaaaaattttgtagtttaagtattgtcatacagtgttcaaaaccccagccaatgaccagcagttggtatgaagaacctttgacattttgtaaaaggccatttcttgg

SEQ ID NO: 1279 - protein, 870 aa, Homo sapiens
MGPPSLVLCLLSATVFSLLGGSSAFLSHHRLKGRFQRDRRNIRPNIILVLTDDQDVELGSMQVMNKTRRIMEQGGAHFINAFVTTPMCCPSRSSILTGKYVHNHNTYTNNENCSSPSWQAQHESRTFAVYLNSTGYRTAFFGKYLNEYNGSYVPPGWKEWVGLLKNSRFYNYTLCRNGVKEKHGSDYSKDYLTDLITNDSVSFFRTSKKMYPHRPVLMVISHAAPHGPEDSAPQYSRLFPNASQHITPSYNYAPNPDKHWIMRYTGPMKPIHMEFTNMLQRKRLQTLMSVDDSMETIYNMLVETGELDNTYIVYTADHGYHIGQFGLVKGKSMPYEFDIRVPFYVRGPNVEAGCLNPHIVLNIDLAPTILDIAGLDIPADMDGKSILKLLDTERPVNRFHLKKKMRVWRDSFLVERGKLLHKRDNDKVDAQEENFLPKYQRVKDLCQRAEYQTACEQLGQKWQCVEDATGKLKLHKCKGPMRLGGSRALSNLVPKYYGQGSEACTCDSGDYKLSLAGRRKKLFKKKYKASYVRSRSIRSVAIEVDGRVYHVGLGDAAQPRNLTKRHWPGAPEDQDDKDGGDFSGTGGLPDYSAANPIKVTHRCYILENDTVQCDLDLYKSLQAWKDHKLHIDHEIETLQNKIKNLREVRGHLKKKRPEECDCHKISYHTQHKGRLKHRGSSLHPFRKGLQEKDKVWLLREQKRKKKLRKLLKRLQNNDTCSMPGLTCFTHDNQHWQTAPFWTLGPFCACTSANNNTYWCMRTINETHNFLFCEFATGFLEYFDLNTDPYQLMNAVNTLDRDVLNQLHVQLMELRSCKGYKQCNPRTRNMDLGLKDGGSYEQYRQFQRRKWPEMKRPSSKSLGQLWEGWEG

SEQ ID NO: 1280 - DNA, 3843 bp, Homo sapiens
gagcgagagtgtgtcgagtgagtgtgcgtctgtgtgtcccggcgagggtgcgcgctcggcgccgggagcgcggccagccgagtccggaggcatcgggaggtcgagagccgccgggaccccagctctgcgttcactgccccgtccggagctggacttcggggccggggccggggccgtgcgccggggacaggcagggccgggtcgcgggccgcgcgtcccccaggccggagatctgcgagtgaagagggacgagggaaaagaaacaaagccacagacgcaacttgagactcccgcatcccaaaagaagcaccagatcagcaaaaaaagaagatgggccccccgagcctcgtgctgtgcttgctgtccgcaactgtgttctccctgctgggtggaagctcggccttcctgtcgcaccaccgcctgaaaggcaggtttcagagggaccgcaggaacatccgccccaacatcatcctggtgctgacggacgaccaggatgtggagctgggttccatgcaggtgatgaacaagacccggcgcatcatggagcagggcggggcgcacttcatcaacgccttcgtgaccacacccatgtgctgcccctcacgctcctccatcctcactggcaagtacgtccacaaccacaacacctacaccaacaatgagaactgctcctcgccctcctggcaggcacagcacgagagccgcacctttgccgtgtacctcaatagcactggctaccggacagctttcttcgggaagtatcttaatgaatacaacggctcctacgtgccacccggctggaaggagtgggtcggactccttaaaaactcccgcttttataactacacgctgtgtcggaacggggtgaaagagaagcacggctccgactactccaaggattacctcacagacctcatcaccaatgacagcgtgagcttcttccgcacgtccaagaagatgtacccgcacaggccagtcctcatggtcatcagccatgcagccccccacggccctgaggattcagccccacaatattcacgcctcttcccaaacgcatctcagcacatcacgccgagctacaactacgcgcccaacccggacaaacactggatcatgcgctacacggggcccatgaagcccatccacatggaattcaccaacatgctccagcggaagcgcttgcagaccctcatgtcggtggacgactccatggagacgatttacaacatgctggttgagacgggcgagctggacaacacgtacatcgtatacaccgccgaccacggttaccacatcggccagtttggcctggtgaaagggaaatccatgccatatgagtttgacatcagggtcccgttctacgtgaggggccccaacgtggaagccggctgtctgaatccccacatcgtcctcaacattgacctggcccccaccatcctggacattgcaggcctggacatacctgcggatatggacgggaaatccatcctcaagctgctggacacggagcggccggtgaatcggtttcacttgaaaaagaagatgagggtctggcgggactccttcttggtggagagaggcaagctgctacacaagagagacaatgacaaggtggacgcccaggaggagaactttctgcccaagtaccagcgtgtgaaggacctgtgtcagcgtgctgagtaccagacggcgtgtgagcagctgggacagaagtggcagtgtgtggaggacgccacggggaagctgaagctgcataagtgcaagggccccatgcggctgggcggcagcagagccctctccaacctcgtgcccaagtactacgggcagggcagcgaggcctgcacctgtgacagcggggactacaagctcagcctggccggacgccggaaaaaactcttcaagaagaagtacaaggccagctatgtccgcagtcgctccatccgctcagtggccatcgaggtggacggcagggtgtaccacgtaggcctgggtgatgccgcccagccccgaaacctcaccaagcggcactggccaggggcccctgaggaccaagatgacaaggatggtggggacttcagtggcactggaggccttcccgactactcagccgccaaccccattaaagtgacacatcggtgctacatcctagagaacgacacagtccagtgtgacctggacctgtacaagtccctgcaggcctggaaagaccacaagctgcacatcgaccacgagattgaaaccctgcagaacaaaattaagaacctgagggaagtccgaggtcacctgaagaaaaagcggccagaagaatgtgactgtcacaaaatcagctaccacacccagcacaaaggccgcctcaagcacagaggctccagtctgcatcctttcaggaagggcctgcaagagaaggacaaggtgtggctgttgcgggagcagaagcgcaagaagaaactccgcaagctgctcaagcgcctgcagaacaacgacacgtgcagcatgccaggcctcacgtgcttcacccacgacaaccagcactggcagacggcgcctttctggacactggggcctttctgtgcctgcaccagcgccaacaataacacgtactggtgcatgaggaccatcaatgagactcacaatttcctcttctgtgaatttgcaactggcttcctagagtactttgatctcaacacagacccctaccagctgatgaatgcagtgaacacactggacagggatgtcctcaaccagctacacgtacagctcatggagctgaggagctgcaagggttacaagcagtgtaacccccggactcgaaacatggacctgggacttaaagatggaggaagctatgagcaatacaggggacaactgtgggaaggctgggaaggttaagaaacaacagaggtggacctccaaaaacatagaggcatcacctgactgcacaggcaatgaaaaaccatgtgggtgatttccagcagacctgtggtattggccaggaggcctgagaaagcaagcacgcactctcagtcaacatgacagattctggaggataaccagcaggagcagagataacttcaggaagtccatttttgcccctgcttttgctttggattatacctcaccagctgcacaaaatgcattttttcgtatcaaaaagtcaccactaaccctcccccagaagctcacaaaggaaaacggagagagcgagcgagagagatttccttggaaatttctcccaagggcgaaagtcattggaatttttaaatcataggggaaaagcagtcctgttctaaatcctcttattcttttggtttgtcacaaagaaggaactaagaagcaggacagaggcaacgtggagaggctgaaaacagtgcagagacgtttgacaatgagtcagtagcacaaaagagatgacatttacctagcactataaaccctggttgcctctgaagaaactgccttcattgtatatatgtgactatttacatgtaatcaacatgggaacttttaggggaacctaataagaaatcccaattttcaggagtggtggtgtcaataaacgctctgtggccagtgtaaaagaaaatccctcgcagttgtggacatttctgttcctgtccagataccatttctcctagtatttctttgttatgtcccagaactgatgttttttttttaaggtactgaaaagaaatgaagttgatgtatgtcccaagttttgatgaaactgtatttgtaaaaaaaattttgtagtttaagtattgtcatacagtgttcaaaaccccagccaatgaccagcagttggtatgaagaacctttgacattttgtaaaaggccatttcttgg

SEQ ID NO: 1281 - protein, 852 aa, Homo sapiens
MGPPSLVLCLLSATVFSLLGGSSAFLSHHRLKGRFQRDRRNIRPNIILVLTDDQDVELGSMQVMNKTRRIMEQGGAHFINAFVTTPMCCPSRSSILTGKYVHNHNTYTNNENCSSPSWQAQHESRTFAVYLNSTGYRTAFFGKYLNEYNGSYVPPGWKEWVGLLKNSRFYNYTLCRNGVKEKHGSDYSKDYLTDLITNDSVSFFRTSKKMYPHRPVLMVISHAAPHGPEDSAPQYSRLFPNASQHITPSYNYAPNPDKHWIMRYTGPMKPIHMEFTNMLQRKRLQTLMSVDDSMETIYNMLVETGELDNTYIVYTADHGYHIGQFGLVKGKSMPYEFDIRVPFYVRGPNVEAGCLNPHIVLNIDLAPTILDIAGLDIPADMDGKSILKLLDTERPVNRFHLKKKMRVWRDSFLVERGKLLHKRDNDKVDAQEENFLPKYQRVKDLCQRAEYQTACEQLGQKWQCVEDATGKLKLHKCKGPMRLGGSRALSNLVPKYYGQGSEACTCDSGDYKLSLAGRRKKLFKKKYKASYVRSRSIRSVAIEVDGRVYHVGLGDAAQPRNLTKRHWPGAPEDQDDKDGGDFSGTGGLPDYSAANPIKVTHRCYILENDTVQCDLDLYKSLQAWKDHKLHIDHEIETLQNKIKNLREVRGHLKKKRPEECDCHKISYHTQHKGRLKHRGSSLHPFRKGLQEKDKVWLLREQKRKKKLRKLLKRLQNNDTCSMPGLTCFTHDNQHWQTAPFWTLGPFCACTSANNNTYWCMRTINETHNFLFCEFATGFLEYFDLNTDPYQLMNAVNTLDRDVLNQLHVQLMELRSCKGYKQCNPRTRNMDLGLKDGGSYEQYRGQLWEGWEG

SEQ ID NO: 1282 - DNA, 9004 bp, Homo sapiens
ggcggcgccgtggggccgaggtgtcgcttcctgacggggcggcgcggacggacgcggccggtgccggccgggacgccgggcccgcagcctagctcgccatctcgctcacgccgcccgcccgcggggccgtcagcccccgccgggccggggccatgcaggagagccagaccaagagcatgttcgtgtcccgggccctggagaagatcctagccgacaaggaggtgaagcggccccagcactcccagctgcgcagggcctgccaggtggcgctcgatgaaattaaagcagaaatagaaaagcagaggcttggcactgctgcaccaccaaaggcaaacttcattgaagctgacaagtattttcttccattcgagctagcttgccagtccaagtccccaagggtagtcagcacatcccttgactgcttgcagaaactcatcgcatacgggcacatcactggcaacgcccctgacagtggagcccctgggaagcggctgatcgacagaattgttgaaaccatttgcagttgttttcagggccctcagactgatgaaggggttcagttacaaataattaaggctcttctgactgcagtgacttccccacacattgaaattcatgagggtactatcctgcagacagtgagaacatgttacaatatctatttggccagcaaaaatctcatcaatcaaaccactgccaaggctacccttactcagatgctgaacgtcattttcacccgcatggaaaaccaagtgttgcaggaggccagagaactggaaaaaccaatccagtcaaaaccccagtcccctgtgatccaagctgcagcagtatccccaaagttcgttcgtttgaagcacagtcaggcacaaagcaaaccaacaactcccgaaaaaacagatttaaccaacggtgaacatgccaggagtgattctggaaaagtaagcacagaaaatggagacgcacccagagaaagaggctcatcactgtcagggactgatgacggagcccaggaggtggtgaaggacatcttggaagatgtagtcacatctgccattaaagaagcagcggaaaagcatggtctgacagaacctgagagagttctaggtgaactggagtgccaggaatgtgctattcccccaggagttgatgaaaactcacagaccaacgggatagccgatgacaggcagtccttgtcgtcagcagataatctggaatcggatgcacaaggacatcaagtggctgccaggttctcccacgttctgcagaaggatgccttccttgtgttccgctccctgtgcaagctgtccatgaaaccccttggtgaaggccctccagacccaaaatcccatgagctgcgttccaaggtggtttccctgcagctgctcctctctgtgttgcaaaatgctggccccgtattcaggactcacgagatgttcatcaatgcaatcaagcaatatctctgtgtggccttgtccaaaaacggcgtctcttcagtgcctgatgtctttgagctctctcttgccatttttcttactcttctttcaaactttaaaatgcacttgaaaatgcagatagaggtctttttcaaagagattttcctgaacattttagaaacatcaacaagttcttttgagcacaggtggatggtcattcagactctgacgaggatctgtgcagatgcccagtgtgttgtggatatttatgtcaactacgactgtgatttaaatgctgctaacatttttgagcgccttgtaaatgatttatccaaaattgctcagggaagaagtggacatgagctgggaatgacacctctgcaggagctcagcctgaggaagaaaggcctggagtgcctcgtgtccattctcaagtgcatggtggagtggagcaaagacctgtatgtgaatcccaaccaccagaccagcctcggtcaggagaggctcacggatcaggaaataggggatgggaaaggccttgacatggcaagacggtgtagtgtgacgtccatggagtccacagtgtcctcggggacccagacaactgttcaggatgaccctgagcaatttgaggtcatcaagcaacaaaaagaaatcattgaacacggcatcgagctgttcaacaagaaacccaagagggggatccagtttctccaggagcagggcatgctgggaacgtcagttgaagacatagcccaattcctgcaccaggaggagcgcctggattccacccaagtaggcgattttctgggagatagcgcaaggttcaacaaggaggtgatgtatgcctacgtggaccaacttgacttctgtgaaaaagaatttgtctcagccctgcggacattcctagaaggtttccgcctacctggagaagcccaaaagattgaccgattaatggagaagtttgccgcaagatacatagaatgcaaccaagggcaaactctgtttgctagtgctgacactgcttatgtcctagcgtattcaattattatgctgactacagacttgcacagtcctcaggtaaaaaataaaatgacgaaagagcagtatattaaaatgaatcggggtatcaatgatagtaaagatctgccagaagagtatctctcaagcatctatgaagagatagaaggcaagaaaattgcaatgaaagaaacaaaagagctaacgattgcaaccaaatctactaagcagaatgtagctagtgaaaagcagcggcggctgctgtacaacttagagatggagcaaatggctaaaacagccaaagctctgatggaggctgtgagccatgccaaagccccgtttaccagtgccactcacctggaccatgtccggccaatgttcaaactggtgtggacgccactattggcagcctacagcatcggactccagaactgtgatgacactgaagtggcctccttgtgtttggaaggcatccgatgtgcaatccgaatcgcctgcatctttggaatgcagctggaacgagatgcctatgttcaggctcttgctcgcttctccctactcacagccagctccagcatcacagaaatgaagcagaaaaacatcgacaccattaagacgcttatcacagtggctcacaccgatggcaactaccttgggaattcctggcatgagatcttgaaatgcatcagccagctggagctcgctcagctgataggaaccggtgtgaagacgcgctacctgtctggatctgggcgtgaaagagaagggagcctgaagggccacacattggcaggagaagagttcatgggccttggcctcggtaatttggtgagtggcggagtggataaaagacagatggccagcttccaagaatcggttggtgagaccagctcgcagagtgtggttgtagctgtggacaggatttttactgggtctaccagactggatggaaatgcaatagttgactttgtccgctggctgtgtgctgtgtccatggatgaactggcttccccccaccatcctcgcatgttcagcttgcagaagattgtggagatatcatactacaacatgaatcggatccgactacagtggtctcgaatatggcatgtgattggagatcacttcaataaggttggctgcaaccctaatgaagatgtggctatctttgctgttgactcattaaggcaactctccatgaagtttcttgagaagggtgaattagccaacttccgtttccagaaagattttctgaggccctttgagcatattatgaagaaaaacaggtctcccaccatccgggacatggcgatccgctgcattgcccagatggtgaactcccaggcggccaacatccgctcaggttggaagaacatctttgccgtgttccaccaggcagcctctgatcatgatgggaacattgtggagctggccttccagaccacttgccacattgtcacaactattttccagcaccattttcctgcagccatcgattcctttcaggatgctgtgaagtgcttatcagagttcgcctgcaacgccgctttccctgacacgagcatggaagcgattcggctcatccgcttctgtggcaaatacgtctctgagaggcctcgggtgctacaagaatacacaagtgatgacatgaatgtagctcctggtgacagagtctgggtccgaggctggttccccatcttattcgaactctcctgcatcattaatagatgcaagttagatgtacgaacaaggggactcacagtcatgtttgagatcatgaagagctatggccacacctttgaaaagcactggtggcaggacctgttcagaatcgtgtttcggatttttgacaatatgaaactccctgagcaactgtcagagaaatctgagtggatgacaacaacctgcaatcacgcactttatgctatttgtgatgtttttacccagttttatgaagctttgaatgaagttcttctttctgatgtatttgcacaattgcagtggtgtgtcaaacaagataatgaacagttggcgcgatcaggtacaaattgcttagaaaacttagtaatatccaatggagagaaattcagtcctgaagtctgggatgaaacctgcaactgtatgttggatattttcaaaacaaccatcccacatgttttgctgacatggagacctgtaggaatggaggaagattcatcagaaaagcatttggatgtggatctggaccgccagtctttaagcagcatagataaaaatccctctgagaggggacagagccagctctctaacccaacagatgacagctggaagggtagaccatacgcaaatcagaaactgtttgccagcctcctcatcaagtgtgtggtccagttggaattgatacagaccattgacaacattgtgttctaccctgcgacgagcaaaaaggaggatgcagagcacatggttgccgcccagcaagacacgctggatgcagatatccacatagagacggaggatcagggcatgtataagtacatgtcttcccagcacctcttcaagctgttggactgtttgcaggaatcccattcattctcaaaggccttcaactccaattacgagcagcggactgtcctgtggcgagcaggttttaagggcaagtctaaacccaatcttctaaaacaagaaaccagcagcctggcctgttgtttgaggatcctgtttcgaatgtatgttgatgagaaccgcagggattcctgggaagaaatacagcagagacttttaactgtttgcagtgaagctcttgcctatttcatcactgtgaattctgagagccatcgggaggcctggacaagtctcttgttgttacttctaactaaaaccctcaaaataaatgatgaaaagttcaaagcacatgcttcaatgtactacccctacttgtgtgaaattatgcagtttgacctgatccctgagctccgagcagttctgcggaagttcttcctacggataggtgttgtgtataagatatggataccagaagagccatcacaggtaccagcagcactgtcaccagtgtggtagccctggctgcccaggccagtgctgcagctctgcagaatgttcagcatgccatttctgactggcacatctcgtgaagtttcatagaaacaaggagttggcatcttggatctcagaatggcctggaaacggatggcctctacgctgttccatcacagtctccaactaaggcttatggtatttcattaaactgttgcatacccagttagcacagtaggtggggagtctgcttcatttctatcattccatttttctgattaaactgtcaaatctgtcattgcatatgccatcgttttctagcaaaatcccatgattggctataaacgttttgtaagaagtcactctccttgaaaatactgaacatagctgtataggtttgtgattattagagaatatgttaataaaacttcttgtaacggctaactgccacctaaaatatgctgggttttctgttgtttgagtgtgttagagaaatttgaatgtttttgtcagttacgagtcagccgtaattagattagtttaaggacaggtcaggattagagaagagttgtttttgtgttttgttaatgtctgagtgatttttaaagtattttacaaaaagatattgaaaatttggttgaaggcagagtttagtaattaagttagaattaagagttttgcgaggttaaaaaaatgtgcctcgtggatctccctgttttagtaacatggagagaaaaagtctacacgaaaaagtgaacaatttaatgaagatgattagccttccttgaaataagtatttgtggatgggtgttaaattaaaatttccagaatacactgtccatctcacacactctgaaatctaatatatgaagtagtaatgaaaatgaagtagtaatttaaccagagttcatttatccttgaataaacctttttattttcacctcagaaaagtgagtgtactggcagttagtgtcactgctttgcacagtccccattaaaggaccctccagagagggacagtaactgtgcatgagaagccgctcccataagcctcctcagccagatgtcatgggtggaactggagctgtgtcggggccagcacagctgaactgtgacaatggcaggaggtggcatgtgcccagcacttccattaatctgagcctaggagttgaattctttggcaaggttggattctgaggtccttattatgttaatgatggtgcaatactctcacctgcagtagaactgagttctgctgcagcttgtgtaaaagtgggcagtacacaagtacgtcccaaagcctgtgagcagtatacgtggatgctcacccatgagaaggagcacacacgcctcattctctgccctcacccactgctcacctagagcatcgctgagcgttagacaaagtgttacacagaatgattaaaactttcagacttctacctatgctctttagtcctgtaaattgggttgtattgatgtcaactctggtgccttagaagttagtagtttgggaacctatctgtaaaatcagatgttttttctttgtagagaaggatttctggtgcttttgcttactaagagaccgatattcttaagttgttttcttgttttaacagccttgagaaatgtttggttttggccagcagaattcttgtctacttttttctttcccaaaaagtgttttttaatttctctaccaaagaaaaaatgagcaggtttaggtttttacatgacttatatacattagataaaaggagctgtataatttagcaggaagggactatgggagaatactttactgtgagtggaaaatgttagcacatttgactggtttgccctggaatccactgcacctttacactgcaccatgaaacctacactccctggtatcatagcgcgtcatcacctcaacaagtcagtcgtctccattgatatttgtacaaaaggtatacatggggaacacgtgttcattcattaagtccatcttgcgtgcagctatatccctgattggttatttttcctttccttctgaggttctcatgtcattttcttcatcggatgtgactaaaatttttctggtgtcttctgccctctctttaattttgcctcttgaggggtagcagatgtgtcagtgcattttattacttgctgaaacattcaggcttacatttcttattagtttagtattttaaaagatttaattttctgaatgaggcatttgaattgtaccagcaatggacttttaaaaaattggatgtaaaaccattcagggtgatttttcttgtcagtggacagtgacgaacagagatttgaaatcccttacctccaataataagccattcagcctaaattcatttttatgaataaatctcttctttctcatggtaaatgtggcttgtgccactcaaacactagtgaaagggtatgtacaaccgcaacatcaggccaggacaccatttatttaaccaagtaatggaggagagtgaaacattttccaaggccttatttctttttcagaatgctttaagtgttgattatatgtgctgggtctctagagaagtttttatttgttacaatactgctgctttgagcaattttgtttctcttcattgtctgttagggaaatcaccagctttggcatcttaacaacaaacagtggatgggtaatttttatttctgatacgcatctttagagtcaaatatatcttttccctgtactcctcatgtacaaccaaagaacatacattatgaaaattgtattataatatctggaaacacaacattttcctctggcaggtgacttttgtacgaaatgaaaaaaaaaaaacctgtattttttttgttgttcttttgtgattaaggatatacatttagtagtctttgttattaaaggaacctgctgataagtacaagtgtgaccatctcattcaaatgtttgttgttatgatgcaaatggatattggtttcaatagaagctggatccttaatactgcattttctgaattctgttttaatatttgtgttaaagtagacatagctgaactcacatggaatcctggagttttgttatcagcagctttgcagtttgggaaacaaagaaaccaaagctgagtgttttaaagaatgaacatatctggaaatccttgctctcaaaacaaaacaatataatctatcaaaggtgttttactcagtgttctaatttttaaaaaattttatctgcatatttgcatcaaatatttatgtgtaaaatgtatgttttacctccttaaaatgcctaaaagttagttaatagttactttggtttaacctatacacaatgattaagtgcatttaatattggtaatttaatgaaaaccattccttgcccaatggatgtataaatttttgaaagaataagcagaattatataatatgaaatgctatgtaaagttttctatgtaaaaatattatgtataatactattaaaatatcccatgctttgatcaggtggtacatcaataaaattttaaaaagta

SEQ ID NO: 1283 - protein, 1785 aa, Homo sapiens
MQESQTKSMFVSRALEKILADKEVKRPQHSQLRRACQVALDEIKAEIEKQRLGTAAPPKANFIEADKYFLPFELACQSKSPRVVSTSLDCLQKLIAYGHITGNAPDSGAPGKRLIDRIVETICSCFQGPQTDEGVQLQIIKALLTAVTSPHIEIHEGTILQTVRTCYNIYLASKNLINQTTAKATLTQMLNVIFTRMENQVLQEARELEKPIQSKPQSPVIQAAAVSPKFVRLKHSQAQSKPTTPEKTDLTNGEHARSDSGKVSTENGDAPRERGSSLSGTDDGAQEVVKDILEDVVTSAIKEAAEKHGLTEPERVLGELECQECAIPPGVDENSQTNGIADDRQSLSSADNLESDAQGHQVAARFSHVLQKDAFLVFRSLCKLSMKPLGEGPPDPKSHELRSKVVSLQLLLSVLQNAGPVFRTHEMFINAIKQYLCVALSKNGVSSVPDVFELSLAIFLTLLSNFKMHLKMQIEVFFKEIFLNILETSTSSFEHRWMVIQTLTRICADAQCVVDIYVNYDCDLNAANIFERLVNDLSKIAQGRSGHELGMTPLQELSLRKKGLECLVSILKCMVEWSKDLYVNPNHQTSLGQERLTDQEIGDGKGLDMARRCSVTSMESTVSSGTQTTVQDDPEQFEVIKQQKEIIEHGIELFNKKPKRGIQFLQEQGMLGTSVEDIAQFLHQEERLDSTQVGDFLGDSARFNKEVMYAYVDQLDFCEKEFVSALRTFLEGFRLPGEAQKIDRLMEKFAARYIECNQGQTLFASADTAYVLAYSIIMLTTDLHSPQVKNKMTKEQYIKMNRGINDSKDLPEEYLSSIYEEIEGKKIAMKETKELTIATKSTKQNVASEKQRRLLYNLEMEQMAKTAKALMEAVSHAKAPFTSATHLDHVRPMFKLVWTPLLAAYSIGLQNCDDTEVASLCLEGIRCAIRIACIFGMQLERDAYVQALARFSLLTASSSITEMKQKNIDTIKTLITVAHTDGNYLGNSWHEILKCISQLELAQLIGTGVKTRYLSGSGREREGSLKGHTLAGEEFMGLGLGNLVSGGVDKRQMASFQESVGETSSQSVVVAVDRIFTGSTRLDGNAIVDFVRWLCAVSMDELASPHHPRMFSLQKIVEISYYNMNRIRLQWSRIWHVIGDHFNKVGCNPNEDVAIFAVDSLRQLSMKFLEKGELANFRFQKDFLRPFEHIMKKNRSPTIRDMAIRCIAQMVNSQAANIRSGWKNIFAVFHQAASDHDGNIVELAFQTTCHIVTTIFQHHFPAAIDSFQDAVKCLSEFACNAAFPDTSMEAIRLIRFCGKYVSERPRVLQEYTSDDMNVAPGDRVWVRGWFPILFELSCIINRCKLDVRTRGLTVMFEIMKSYGHTFEKHWWQDLFRIVFRIFDNMKLPEQLSEKSEWMTTTCNHALYAICDVFTQFYEALNEVLLSDVFAQLQWCVKQDNEQLARSGTNCLENLVISNGEKFSPEVWDETCNCMLDIFKTTIPHVLLTWRPVGMEEDSSEKHLDVDLDRQSLSSIDKNPSERGQSQLSNPTDDSWKGRPYANQKLFASLLIKCVVQLELIQTIDNIVFYPATSKKEDAEHMVAAQQDTLDADIHIETEDQGMYKYMSSQHLFKLLDCLQESHSFSKAFNSNYEQRTVLWRAGFKGKSKPNLLKQETSSLACCLRILFRMYVDENRRDSWEEIQQRLLTVCSEALAYFITVNSESHREAWTSLLLLLLTKTLKINDEKFKAHASMYYPYLCEIMQFDLIPELRAVLRKFFLRIGVVYKIWIPEEPSQVPAALSPVW

SEQ ID NO: 1284 - DNA, 4352 bp, Homo sapiens
ggaggagtttgttaatgttcagtttgttcagcgggatcgatgtttgctggcatcgcctcgccctgtcttgtgtgtgtgtgcgagggtgtgtgtgtgtgtttgtgtgtgtgtgcatatgtggggggtgtgagtgtgtgtgtgcgaggaagcgggggtgcgtgcgcgtgtgagtgcgtgtgtgagtgtctgtgtgtgtgtctgtgtgtgtgtgtgagtgagtgaattccagattttctgtctttccaaaacccgctcctgtcctctcgcatatcactcacagacggggatctgacagcagccacaaacctacagtgagtgatcgctctccccccggcacgaatccgccatagagatcggcgaggaggaggaggaggaggaggaagaaaagaaggaggaggtggaggaggaggtggaggaggaggaggaggagggaaagaggagaaggaagaagaagaaaaagaagaaacccactaccttcccaggattgccttttttttttccttatctttacgcgcgagtgtgcctgtggcgcgtgtgcgcccctcgtcccttccatccgaacccgggcttggatgtttaataaagaaatcaagtgtctcaacagtcaccaaaaaaaaaaaaaaccgcaaaaacaaaaccaaaaaaattccaaaagcaaaaacaaaaaagagagaggaaaaaaaattcaaaataaacaaacaaacaaacaaggcagaaccaacctctacttcaaagcagccggcacaagccacccgtgtctgccacccagagaggggggtctctggcccgtggtggaggagttgcaggggggatcgtcagggggacagaggccgagtgacgtcctaggagccaccgggcaagaggcggaggagacccagagaggccagagagacagcgggccccagcgcgcggctcggggctggggcgccagaagtgggactggagcgaagtagaggatgccgaggagaaaacagcaggcacccaagcgggcggcaggctacgcccaggaggaacagctgaaagaagaggaggaaataaaagaagaggaggaggaggaggacagcggttcagtagctcaactgcagggtggcaatgacacagggacggacgaggagctagaaacgggcccagagcaaaaaggctgcttcagctaccagaactctccaggaagtcatttgtccaatcaggatgccgagaacgagtctctgctgagtgacgccagtgatcaggtgtcggacatcaagagtgtctgcggcagagatgcctcagacaagaaagcacacactcacgtcaggcttccaaacgaagcacacaattgcatggataaaatgaccgctgtctacgccaacatcctgtcggattcctactggtcaggcctgggccttggcttcaagctgtccaatagtgagaggaggaactgtgacacccgaaacggcagcaacaagagtgattttgattggcaccaagacgctctgtccaaaagcctgcagcagaacttgccttctcggtccgtctcgaaacccagcctgttcagctcggtgcagttgtaccgacagagcagcaagatgtgcgggactgtgttcacaggggccagcagattccgatgccgacagtgcagcgcggcctatgacaccctagtcgagctgactgtgcacatgaatgaaacgggccactatcaagatgacaaccgcaaaaaggacaagctcagacccacgagctattcaaagcccaggaaaagggctttccaggatatggacaaagaggatgctcaaaaggttctgaaatgtatgttttgtggcgactcctttgattccctccaagatttgagcgtccacatgattaaaacaaaacattaccaaaaagtgcctttgaaggagccagtcccaaccatttcctcgaaaatggtcaccccggctaagaaacgcgtttttgatgtcaatcggccgtgttcccccgattcaaccacaggatcttttgcagattctttttcttctcagaagaacgccaacttgcagttgtcctccaacaaccgctatggctaccaaaatggagccagctacacctggcagtttgaggcctgcaagtcccagatcttaaagtgcatggagtgtgggagctcccatgacaccttgcagcagctcaccacccacatgatggtcacaggtcactttctcaaggtcaccagctctgcctccaagaaagggaagcagctggtattagacccgttagcagtggagaaaatgcagtcgttgtctgaggccccaaacagtgattctctggctcccaagccatccagtaactcagcatcagattgtacagcctctacaactgagttaaagaaagagagtaaaaaagaaaggccagaggaaaccagcaaggatgagaaagtcgtgaaaagcgaggactatgaagatcctctacaaaaacctttagaccctacaatcaaatatcaatacctaagggaggaagacttggaagatggctcaaagggtggaggggacattttgaaatctttggaaaatactgtcaccacagccatcaacaaagcccaaaacggggcccccagctggagtgcctaccccagcatccacgcagcctaccagctgtctgagggcaccaagccgcctttgcctatgggatcccaggtactgcagatccggcctaatctcaccaacaagctgaggcccattgcaccaaagtggaaagtgatgccactggtttctatgcccacacacctggccccttacactcaagtcaagaaagagtcagaagacaaagatgaagcggtgaaggagtgtgggaaagaaagtccccacgaagaggcctcatctttcagccacagtgagggcgattctttccgcaaaagtgaaacacctccagaagccaaaaagaccgagctgggtcccctgaaggaggaggagaagctgatgaaagagggcagcgagaaggagaaaccccagcccctggagcccacatctgctctgagcaatgggtgcgccctcgccaaccacgccccggccctgccatgcatcaacccactcagcgccctgcagtccgtcctgaacaatcacttgggcaaagccacggagcccttgcgctcaccttcctgctccagcccaagttcaagcacaatttccatgttccacaagtcgaatctcaatgtcatggacaagccggtcttgagtcctgcctccacaaggtcagccagcgtgtccaggcgctacctgtttgagaacagcgatcagcccattgacctgaccaagtccaaaagcaagaaagccgagtcctcgcaagcacaatcttgtatgtccccacctcagaagcacgctctgtctgacatcgccgacatggtcaaagtcctccccaaagccaccaccccaaagccagcctcctcctccagggtcccccccatgaagctggaaatggatgtcaggcgctttgaggatgtctccagtgaagtctcaactttgcataaaagaaaaggccggcagtccaactggaatcctcagcatcttctgattctacaagcccagtttgcctcgagcctcttccagacatcagagggcaaatacctgctgtctgatctgggcccacaagagcgtatgcaaatctctaagtttacgggactctcaatgaccactatcagtcactggctggccaacgtcaagtaccagcttaggaaaacgggcgggacaaaatttctgaaaaacatggacaaaggccaccccatcttttattgcagtgactgtgcctcccagttcagaaccccttctacctacatcagtcacttagaatctcacctgggtttccaaatgaaggacatgacccgcttgtcagtggaccagcaaagcaaggtggagcaagagatctcccgggtatcgtcggctcagaggtctccagaaacaatagctgccgaagaggacacagactctaaattcaagtgtaagttgtgctgtcggacatttgtgagcaaacatgcggtaaaactccacctaagcaaaacgcacagcaagtcacccgaacaccattcacagtttgtaacagacgtggatgaagaatagctctgcaggacgaatgccttagtttccactttccagcctggatcccctcacactgaacccttcttcgttgcaccatcctgcttctgacattgaactcattgaactcctcctgacaccctggctctgagaagactgccaaaaaaaaaaaaaaaaaaaaatcaccccagccatttctcttcatcctcactaacaatttggtaatgaagtattgatttccacttctctgcttatgggcggtattagattttcattgataaattgcaatggggctgtctcgtctccacagtaccc

SEQ ID NO: 1285 - protein, 1034 aa, Homo sapiens
MPRRKQQAPKRAAGYAQEEQLKEEEEIKEEEEEEDSGSVAQLQGGNDTGTDEELETGPEQKGCFSYQNSPGSHLSNQDAENESLLSDASDQVSDIKSVCGRDASDKKAHTHVRLPNEAHNCMDKMTAVYANILSDSYWSGLGLGFKLSNSERRNCDTRNGSNKSDFDWHQDALSKSLQQNLPSRSVSKPSLFSSVQLYRQSSKMCGTVFTGASRFRCRQCSAAYDTLVELTVHMNETGHYQDDNRKKDKLRPTSYSKPRKRAFQDMDKEDAQKVLKCMFCGDSFDSLQDLSVHMIKTKHYQKVPLKEPVPTISSKMVTPAKKRVFDVNRPCSPDSTTGSFADSFSSQKNANLQLSSNNRYGYQNGASYTWQFEACKSQILKCMECGSSHDTLQQLTTHMMVTGHFLKVTSSASKKGKQLVLDPLAVEKMQSLSEAPNSDSLAPKPSSNSASDCTASTTELKKESKKERPEETSKDEKVVKSEDYEDPLQKPLDPTIKYQYLREEDLEDGSKGGGDILKSLENTVTTAINKAQNGAPSWSAYPSIHAAYQLSEGTKPPLPMGSQVLQIRPNLTNKLRPIAPKWKVMPLVSMPTHLAPYTQVKKESEDKDEAVKECGKESPHEEASSFSHSEGDSFRKSETPPEAKKTELGPLKEEEKLMKEGSEKEKPQPLEPTSALSNGCALANHAPALPCINPLSALQSVLNNHLGKATEPLRSPSCSSPSSSTISMFHKSNLNVMDKPVLSPASTRSASVSRRYLFENSDQPIDLTKSKSKKAESSQAQSCMSPPQKHALSDIADMVKVLPKATTPKPASSSRVPPMKLEMDVRRFEDVSSEVSTLHKRKGRQSNWNPQHLLILQAQFASSLFQTSEGKYLLSDLGPQERMQISKFTGLSMTTISHWLANVKYQLRKTGGTKFLKNMDKGHPIFYCSDCASQFRTPSTYISHLESHLGFQMKDMTRLSVDQQSKVEQEISRVSSAQRSPETIAAEEDTDSKFKCKLCCRTFVSKHAVKLHLSKTHSKSPEHHSQFVTDVDEE

SEQ ID NO: 1286 - DNA, 1625 bp, Homo sapiens
cgtgagcttctggaacagccggaaaccttgtcaactgtccaggtagtttgtccacctgaagtctcacctatgacttctctggatcctttggcatcctagcactgaaatctgcaaagctgcttatgtactttctgtaaggtgaaaattacggatgcagcacctgtgattaagtcatgatggctggaagtaaatcttggtgaatatttctaaatgttttccacatttcccatacagaggtttgataatttgttcacctagtttccattttataattgaggttggcagtggagaccaagactcgatgtggtgtgggtcaatttggaagaattacttcgaagaaaatgagaaagaaacactcaaatgaaatcccttttgaggaaggagatactcttttccttaaaaaaaaaaaaatcaacatttgtatcaataaaggttgagatcagaaaatgtttcccgttcaatgagaaagatttggactgtgatgaagataaactaaaaagaaaagagtttgaccaactggcaagggtttgacccctttcccctttaaaaaaatcacactaaaactacagcttatgtttcgcatgagtggatgctctgaattgcaatgcaaagtgcttatgaaaacttaagatcttacattactacttcaaagagtacatgtgataggaattcctatagaagaaaatgaaaaaggatatagcttgaaaatccaaatttatagcaaattctgcatctatcatttggcgatgctatgactggatgctatcactatttggaagtatcaaaaatattacaaaggaaaattaagcttcattttactctatcttcttataaagtgaggcccacatcctggtgatgactatttccttaatgagactatgggattttatcaaactccataaaacatgattgcatttccttcactctgaaatcaccttattttaatttccacatgaaattgggatgcaatttgtgtgtacatttaatatgcgagggttccttctccacctctcactcactcctccccaaaaaagctttggccaaatctacagcatgttttacaatggacagagtcttaggattgaggcaagtacaatcaagaggagtcaggggctaagataaacaaaagaacatgaaaacagtgatggtgatgcctcatgtgattagctctatggtcccttcctcttctcagagtgacaggcagaaaaatcgacagttaattccagatccatcaggggctgtgctgcctttctacagaaatgatgagtttagagagcaagctgcagatgagtgtctgagcactcgcgggaggtgccgagtgtcatggcagaagttcgtgtggcatcgctgtctgctgcgtccaagagatgatagggtccttccagaagaggaacagcagggtagcgcagaaatggaaggaagaccactcttcccagtttctggccaatgggatgagggaagaagtgatgggcatcagttacagaactcattcacaccttcaatggttttggaagccacatgctccagatggcagagctaccctggaaagaaggttgcatctgagtcaccacgtggagatcaactttgtacatgtgaaacataaatgtttactgtgttgggccact

SEQ ID NO: 1287 - protein, 143 aa, Homo sapiens
MVPSSSQSDRQKNRQLIPDPSGAVLPFYRNDEFREQAADECLSTRGRCRVSWQKFVWHRCLLRPRDDRVLPEEEQQGSAEMEGRPLFPVSGQWDEGRSDGHQLQNSFTPSMVLEATCSRWQSYPGKKVASESPRGDQLCTCET

SEQ ID NO: 1288 - DNA, 2438 bp, Homo sapiens
ctcgggccgctgcgctcctggccagctccccccagcgcctgggaggcgacccccagtgcgcccgggttcaaaggcccggcgaggcagttccagcccctctggggggcggggaggcgacgggggtggtgcagaagccagaaaagcccgagccacagccggccagctccgcgcagggatgggcagcgcgctctgaaagtttatgaccgccgcagccaactcctggccggagctggagacgcagcgagcgatcggccggcctcgaacccccacagctggagggcgaggccagctgtacccggccccagtgccctttcgcggccacaagcggccgtcctcctggtccggtgctccggcgcctgatctaggttcatggagccggggctgtggctccttttcgggctcacagtgacctccgccgcaggattcgtgccttgctcccagtctggggatgctggcaggcgcggcgtgtcccaggcccccactgcagccagatctgagggggactgtgaagagactgtggctggccctggcgaggagactgtggctggccctggcgaggggactgtggccccgacagcactgcagggtccaagccctggaagccctgggcaggagcaggcggccgagggggcccctgagcaccaccgatccaggcgctgcacgtgcttcacctacaaggacaaggagtgtgtctactattgccacctggacatcatttggatcaacactcccgaacagacggtgccctatggactgtccaactacagaggaagcttccggggcaagaggtctgcggggccacttccagggaatctgcagctctcacatcggccacacttgcgctgcgcttgtgtggggagatatgacaaggcctgcctgcacttttgcacccaaactctggacgtcagcagtaattcaaggacggcagaaaaaacagacaaagaagaggaagggaaggttgaagtcaaggaccaacaaagcaagcaggctttagacctccaccatccaaagctcatgcccggcagtggactcgccctcgctccatctacctgcccccgctgcctctttcaggaaggagccccttaggaggacaggcctgcactccggtttcatgcaggaaattggttttggagagttttggcaagttggaaagccacttactggcttttgacatgacttctcttggagaataagtggactccaagctaactctttgcaaatgtaaacacatgtccatcttgtaataaatgcaaaatgcccgtgcagcagaagcatgcgactttcatatccttgcctagaataggctgcatggtgtatgtcagtgagggccacgaggcgtcggctttagacacagatcatagctctacaggagtttatgaatttgaagcttatgggattttggcagagaaattttcagctgtgcttgatacccaccaaaagaatgtatctcgaaagaatgaaggaagaagaaaaaaggatccttgatgtttgtgacaagaaaatgagaaagttagtatctgcaatacagagcttgttcctgttcagtgactgaccctctgtattctgtatagacaccaggccgatacacagtggagttcccaggccttgtttgcaggaagccgactgtaaagacagccccagctcaaggctattaggttgaatatttgctttcatgagtaaatgtggatctttggggaatggcttcaaaataagtcacgaacacaaattctttgtaaattatgtaaattcctgtttatataaattggcaacaacttataccgtctgacagttcaaaatctctttcagctgcgctcttcccaccgagccgagcttactgtgagtgtggagatgttatcccaccatgtaaagtcgcctgcgcaggggagggctgcccatctccccaacccagtcacagagagataggaaacggcatttgagtgggtgtccagggccccgtagagagacatttaagatggtgtatgacagagcattggccttgaccaaatgttaaatcctctgtgtgtatttcataagttattacaggtataaaagtgatgacctatcatgaggaaatgaaagtggctgatttgctggtaggattttgtacagtttagagaagcgattatttattgtgaaactgttctccactccaactcctttatgtggatctgttcaaagtagtcactgtatatacgtatagagaggtagataggtaggtagattttaaattgcattctgaatacaaactcatactccttagagcttgaattacatttttaaaatgcatatgtgctgtttggcaccgtggcaagatggtatcagagagaaacccatcaattgctcaaatactcagaaagtactgtcaaaagcctaataaaaaacctaaagtttgctctgaaaaaaaaaaaaaaaaaaaaaaaaaaaaaaaaaaaaaaaaa

SEQ ID NO: 1289 - protein, 238 aa, Homo sapiens
MEPGLWLLFGLTVTSAAGFVPCSQSGDAGRRGVSQAPTAARSEGDCEETVAGPGEETVAGPGEGTVAPTALQGPSPGSPGQEQAAEGAPEHHRSRRCTCFTYKDKECVYYCHLDIIWINTPEQTVPYGLSNYRGSFRGKRSAGPLPGNLQLSHRPHLRCACVGRYDKACLHFCTQTLDVSSNSRTAEKTDKEEEGKVEVKDQQSKQALDLHHPKLMPGSGLALAPSTCPRCLFQEGAP

SEQ ID NO: 1290 - DNA, 2694 bp, Homo sapiens
ctcgggccgctgcgctcctggccagctccccccagcgcctgggaggcgacccccagtgcgcccgggttcaaaggcccggcgaggcagttccagcccctctggggggcggggaggcgacgggggtggtgcagaagccagaaaagcccgagccacagccggccagctccgcgcagggatgggcagcgcgctctgaaagtttatgaccgccgcagccaactcctggccggagctggagacgcagcgagcgatcggccggcctcgaacccccacagctggagggcgaggccagctgtacccggccccagtgccctttcgcggccacaagcggccgtcctcctggtccggtgctccggcgcctgatctaggttcatggagccggggctgtggctccttttcgggctcacagtgacctccgccgcaggattcgtgccttgctcccagtctggggatgctggcaggcgcggcgtgtcccaggcccccactgcagccagatctgagggggactgtgaagagactgtggctggccctggcgaggagactgtggctggccctggcgaggggactgtggccccgacagcactgcagggtccaagccctggaagccctgggcaggagcaggcggccgagggggcccctgagcaccaccgatccaggcgctgcacgtgcttcacctacaaggacaaggagtgtgtctactattgccacctggacatcatttggatcaacactcccgaacagacggtgccctatggactgtccaactacagaggaagcttccggggcaagaggtctgcggggccacttccagggaatctgcagctctcacatcggccacacttgcgctgcgcttgtgtggggagatatgacaaggcctgcctgcacttttgcacccaaactctggacgtcagcagtaattcaaggacggcagaaaaaacagacaaagaagaggaagggaaggtgagaggtgccaacagaggcctgtgtcaaaggaggttgaagtcaaggaccaacaaagcaagcaggctttagacctccaccatccaaagctcatgcccggcagtggactcgccctcgctccatctacctgcccccgctgcctctttcaggaaggagccccttaggaggacaggcctgcagcatcctggtctcgggaggcttctgtcattgctcacacacagttcagatttccacctctttatagacaagaagtgaatttgcctggggcagaacacccacccaaagagtccccacttaacaataccccccccccacggcaagaatgcccaaatccgaatgaccccagttttcctaatgagtaaaatgatcccagatgtgccccagagcatgacgcctgcagctccggtttcatgcaggaaattggttttggagagttttggcaagttggaaagccacttactggcttttgacatgacttctcttggagaataagtggactccaagctaactctttgcaaatgtaaacacatgtccatcttgtaataaatgcaaaatgcccgtgcagcagaagcatgcgactttcatatccttgcctagaataggctgcatggtgtatgtcagtgagggccacgaggcgtcggctttagacacagatcatagctctacaggagtttatgaatttgaagcttatgggattttggcagagaaattttcagctgtgcttgatacccaccaaaagaatgtatctcgaaagaatgaaggaagaagaaaaaaggatccttgatgtttgtgacaagaaaatgagaaagttagtatctgcaatacagagcttgttcctgttcagtgactgaccctctgtattctgtatagacaccaggccgatacacagtggagttcccaggccttgtttgcaggaagccgactgtaaagacagccccagctcaaggctattaggttgaatatttgctttcatgagtaaatgtggatctttggggaatggcttcaaaataagtcacgaacacaaattctttgtaaattatgtaaattcctgtttatataaattggcaacaacttataccgtctgacagttcaaaatctctttcagctgcgctcttcccaccgagccgagcttactgtgagtgtggagatgttatcccaccatgtaaagtcgcctgcgcaggggagggctgcccatctccccaacccagtcacagagagataggaaacggcatttgagtgggtgtccagggccccgtagagagacatttaagatggtgtatgacagagcattggccttgaccaaatgttaaatcctctgtgtgtatttcataagttattacaggtataaaagtgatgacctatcatgaggaaatgaaagtggctgatttgctggtaggattttgtacagtttagagaagcgattatttattgtgaaactgttctccactccaactcctttatgtggatctgttcaaagtagtcactgtatatacgtatagagaggtagataggtaggtagattttaaattgcattctgaatacaaactcatactccttagagcttgaattacatttttaaaatgcatatgtgctgtttggcaccgtggcaagatggtatcagagagaaacccatcaattgctcaaatactcagaaagtactgtcaaaagcctaataaaaaacctaaagtttgctctgaaaaaaaaaaaaaaaaaaaaaaaaaaaaaaaaaaaaaaaaa

SEQ ID NO: 1291 - protein, 219 aa, Homo sapiens
MEPGLWLLFGLTVTSAAGFVPCSQSGDAGRRGVSQAPTAARSEGDCEETVAGPGEETVAGPGEGTVAPTALQGPSPGSPGQEQAAEGAPEHHRSRRCTCFTYKDKECVYYCHLDIIWINTPEQTVPYGLSNYRGSFRGKRSAGPLPGNLQLSHRPHLRCACVGRYDKACLHFCTQTLDVSSNSRTAEKTDKEEEGKVRGANRGLCQRRLKSRTNKASRL

SEQ ID NO: 1292 - DNA, 2617 bp, Homo sapiens
ctcgggccgctgcgctcctggccagctccccccagcgcctgggaggcgacccccagtgcgcccgggttcaaaggcccggcgaggcagttccagcccctctggggggcggggaggcgacgggggtggtgcagaagccagaaaagcccgagccacagccggccagctccgcgcagggatgggcagcgcgctctgaaagtttatgaccgccgcagccaactcctggccggagctggagacgcagcgagcgatcggccggcctcgaacccccacagctggagggcgaggccagctgtacccggccccagtgccctttcgcggccacaagcggccgtcctcctggtccggtgctccggcgcctgatctaggttcatggagccggggctgtggctccttttcgggctcacagtgacctccgccgcaggattcgtgccttgctcccagtctggggatgctggcaggcgcggcgtgtcccaggcccccactgcagccagatctgagggggactgtgaagagactgtggctggccctggcgaggagactgtggctggccctggcgaggggactgtggccccgacagcactgcagggtccaagccctggaagccctgggcaggagcaggcggccgagggggcccctgagcaccaccgatccaggcgctgcacgtgcttcacctacaaggacaaggagtgtgtctactattgccacctggacatcatttggatcaacactcccgaacagacggtgccctatggactgtccaactacagaggaagcttccggggcaagaggtctgcggggccacttccagggaatctgcagctctcacatcggccacacttgcgctgcgcttgtgtggggagatatgacaaggcctgcctgcacttttgcacccaaactctggacgtcagcagacaggttgaagtcaaggaccaacaaagcaagcaggctttagacctccaccatccaaagctcatgcccggcagtggactcgccctcgctccatctacctgcccccgctgcctctttcaggaaggagccccttaggaggacaggcctgcagcatcctggtctcgggaggcttctgtcattgctcacacacagttcagatttccacctctttatagacaagaagtgaatttgcctggggcagaacacccacccaaagagtccccacttaacaataccccccccccacggcaagaatgcccaaatccgaatgaccccagttttcctaatgagtaaaatgatcccagatgtgccccagagcatgacgcctgcagctccggtttcatgcaggaaattggttttggagagttttggcaagttggaaagccacttactggcttttgacatgacttctcttggagaataagtggactccaagctaactctttgcaaatgtaaacacatgtccatcttgtaataaatgcaaaatgcccgtgcagcagaagcatgcgactttcatatccttgcctagaataggctgcatggtgtatgtcagtgagggccacgaggcgtcggctttagacacagatcatagctctacaggagtttatgaatttgaagcttatgggattttggcagagaaattttcagctgtgcttgatacccaccaaaagaatgtatctcgaaagaatgaaggaagaagaaaaaaggatccttgatgtttgtgacaagaaaatgagaaagttagtatctgcaatacagagcttgttcctgttcagtgactgaccctctgtattctgtatagacaccaggccgatacacagtggagttcccaggccttgtttgcaggaagccgactgtaaagacagccccagctcaaggctattaggttgaatatttgctttcatgagtaaatgtggatctttggggaatggcttcaaaataagtcacgaacacaaattctttgtaaattatgtaaattcctgtttatataaattggcaacaacttataccgtctgacagttcaaaatctctttcagctgcgctcttcccaccgagccgagcttactgtgagtgtggagatgttatcccaccatgtaaagtcgcctgcgcaggggagggctgcccatctccccaacccagtcacagagagataggaaacggcatttgagtgggtgtccagggccccgtagagagacatttaagatggtgtatgacagagcattggccttgaccaaatgttaaatcctctgtgtgtatttcataagttattacaggtataaaagtgatgacctatcatgaggaaatgaaagtggctgatttgctggtaggattttgtacagtttagagaagcgattatttattgtgaaactgttctccactccaactcctttatgtggatctgttcaaagtagtcactgtatatacgtatagagaggtagataggtaggtagattttaaattgcattctgaatacaaactcatactccttagagcttgaattacatttttaaaatgcatatgtgctgtttggcaccgtggcaagatggtatcagagagaaacccatcaattgctcaaatactcagaaagtactgtcaaaagcctaataaaaaacctaaagtttgctctgaaaaaaaaaaaaaaaaaaaaaaaaaaaaaaaaaaaaaaaaa

SEQ ID NO: 1293 - protein, 224 aa, Homo sapiens
MEPGLWLLFGLTVTSAAGFVPCSQSGDAGRRGVSQAPTAARSEGDCEETVAGPGEETVAGPGEGTVAPTALQGPSPGSPGQEQAAEGAPEHHRSRRCTCFTYKDKECVYYCHLDIIWINTPEQTVPYGLSNYRGSFRGKRSAGPLPGNLQLSHRPHLRCACVGRYDKACLHFCTQTLDVSRQVEVKDQQSKQALDLHHPKLMPGSGLALAPSTCPRCLFQEGAP

SEQ ID NO: 1294 - DNA, 2659 bp, Homo sapiens
ctcgggccgctgcgctcctggccagctccccccagcgcctgggaggcgacccccagtgcgcccgggttcaaaggcccggcgaggcagttccagcccctctggggggcggggaggcgacgggggtggtgcagaagccagaaaagcccgagccacagccggccagctccgcgcagggatgggcagcgcgctctgaaagtttatgaccgccgcagccaactcctggccggagctggagacgcagcgagcgatcggccggcctcgaacccccacagctggagggcgaggccagctgtacccggccccagtgccctttcgcggccacaagcggccgtcctcctggtccggtgctccggcgcctgatctaggttcatggagccggggctgtggctccttttcgggctcacagtgacctccgccgcaggattcgtgccttgctcccagtctggggatgctggcaggcgcggcgtgtcccaggcccccactgcagccagatctgagggggactgtgaagagactgtggctggccctggcgaggagactgtggctggccctggcgaggggactgtggccccgacagcactgcagggtccaagccctggaagccctgggcaggagcaggcggccgagggggcccctgagcaccaccgatccaggcgctgcacgtgcttcacctacaaggacaaggagtgtgtctactattgccacctggacatcatttggatcaacactcccgaacagacggtgccctatggactgtccaactacagaggaagcttccggggcaagaggtctgcggggccacttccagggaatctgcagctctcacatcggccacacttgcgctgcgcttgtgtggggagatatgacaaggcctgcctgcacttttgcacccaaactctggacgtcagcagtaattcaaggacggcagaaaaaacagacaaagaagaggaagggaaggttgaagtcaaggaccaacaaagcaagcaggctttagacctccaccatccaaagctcatgcccggcagtggactcgccctcgctccatctacctgcccccgctgcctctttcaggaaggagccccttaggaggacaggcctgcagcatcctggtctcgggaggcttctgtcattgctcacacacagttcagatttccacctctttatagacaagaagtgaatttgcctggggcagaacacccacccaaagagtccccacttaacaataccccccccccacggcaagaatgcccaaatccgaatgaccccagttttcctaatgagtaaaatgatcccagatgtgccccagagcatgacgcctgcagctccggtttcatgcaggaaattggttttggagagttttggcaagttggaaagccacttactggcttttgacatgacttctcttggagaataagtggactccaagctaactctttgcaaatgtaaacacatgtccatcttgtaataaatgcaaaatgcccgtgcagcagaagcatgcgactttcatatccttgcctagaataggctgcatggtgtatgtcagtgagggccacgaggcgtcggctttagacacagatcatagctctacaggagtttatgaatttgaagcttatgggattttggcagagaaattttcagctgtgcttgatacccaccaaaagaatgtatctcgaaagaatgaaggaagaagaaaaaaggatccttgatgtttgtgacaagaaaatgagaaagttagtatctgcaatacagagcttgttcctgttcagtgactgaccctctgtattctgtatagacaccaggccgatacacagtggagttcccaggccttgtttgcaggaagccgactgtaaagacagccccagctcaaggctattaggttgaatatttgctttcatgagtaaatgtggatctttggggaatggcttcaaaataagtcacgaacacaaattctttgtaaattatgtaaattcctgtttatataaattggcaacaacttataccgtctgacagttcaaaatctctttcagctgcgctcttcccaccgagccgagcttactgtgagtgtggagatgttatcccaccatgtaaagtcgcctgcgcaggggagggctgcccatctccccaacccagtcacagagagataggaaacggcatttgagtgggtgtccagggccccgtagagagacatttaagatggtgtatgacagagcattggccttgaccaaatgttaaatcctctgtgtgtatttcataagttattacaggtataaaagtgatgacctatcatgaggaaatgaaagtggctgatttgctggtaggattttgtacagtttagagaagcgattatttattgtgaaactgttctccactccaactcctttatgtggatctgttcaaagtagtcactgtatatacgtatagagaggtagataggtaggtagattttaaattgcattctgaatacaaactcatactccttagagcttgaattacatttttaaaatgcatatgtgctgtttggcaccgtggcaagatggtatcagagagaaacccatcaattgctcaaatactcagaaagtactgtcaaaagcctaataaaaaacctaaagtttgctctgaaaaaaaaaaaaaaaaaaaaaaaaaaaaaaaaaaaaaaaaa

SEQ ID NO: 1295 - protein, 238 aa, Homo sapiens; identical to SEQ ID NO: 1289

SEQ ID NO: 1296 - DNA, 960 bp, Homo sapiens
atgaggtcaggaaatgattgcgggagaagagcattcgtgtacacagaggacacgcaggcctccacgacccgcgtgctgaattcggagacggcagtcccctccaaaggcctggtgtccctgcagctgcccaggctggtggggaacggcagaatcatggaatttcagaggatagaatgtgggagggagcgagggaagaaggcgggcaaggcgctggcatggagcagcatggagctgattgatgagacggtggggagacattttacttgtgcattgaaaagaaaaaccacgaggttacctggtggacccgtttgcggccacagtgccgccgtggggattggaggccagaagggaggcgcgtcggatggggacacaggcgcccttgccaccttggcagtgtgggaaggcagggagatggcaaaggagaagggcctggggcggtgtccggctctgcgagctgaagccaaggctgactccaagatgctctgtgcatctcaaaacccagccctcagagccatgagctgtaccagcacctccatatctgttcccgtcgaaggggagggtatcaccatcgcccgagtcacccacatcacaagcccaggccccatctcggacccctccaccatgttctgccagtgtggtgtccactgctcttcctttgcaccccactgcctcatctcagacctggatgatggccacagccttttagttccagatgccagggtgtgggccgagggggtcacactggtcacgggcaagtccatgtgcagcttcttcagcgagatctcacactccatcacactggaggagctgccatgcagggaccacatcctcaagctctgccaggacatcttcctggcgtgcgagacccatgagctggagctggaggaggagctgtctgccaagctcatcttcctctatcgctcactggagaccatgatcaagtggactcgtgaggagtag

SEQ ID NO: 1297 - protein, 319 aa, Homo sapiens
MRSGNDCGRRAFVYTEDTQASTTRVLNSETAVPSKGLVSLQLPRLVGNGRIMEFQRIECGRERGKKAGKALAWSSMELIDETVGRHFTCALKRKTTRLPGGPVCGHSAAVGIGGQKGGASDGDTGALATLAVWEGREMAKEKGLGRCPALRAEAKADSKMLCASQNPALRAMSCTSTSISVPVEGEGITIARVTHITSPGPISDPSTMFCQCGVHCSSFAPHCLISDLDDGHSLLVPDARVWAEGVTLVTGKSMCSFFSEISHSITLEELPCRDHILKLCQDIFLACETHELELEEELSAKLIFLYRSLETMIKWTREE

SEQ ID NO: 1298 - DNA, 3063 bp, Homo sapiens
cgccggcggggaagatgaccgcgggcgccggcgtgctccttctgctgctctcgctctccggcgcgctccgggcccataatgaggatcttacaactagagagacctgcaaggctgggttctctgaagatgattacacggcattaatctcccaaaatattctagaaggggaaaagctacttcaagtcaagttcagcagctgtgtggggaccaaggggacacaatatgagaccaacagcatggacttcaaagttggggcagatgggacagtcttcgccacccgggagctgcaggtcccctccgagcaggtggcgttcacggtgactgcatgggacagccagacagcagagaaatgggacgccgtggtgcggttgctggtggcccagacctcgtccccgcactctggacacaagccgcagaaaggaaagaaggtcgtggctctggacccctctccgcctccgaaggacaccctgctgccgtggccccagcaccagaacgccaacgggctgaggcggcgcaaacgggactgggtcatcccgcccatcaacgtgcccgagaactcgcgcgggcccttcccgcagcagctcgtgaggatccggtccgacaaagacaatgacatccccatccggtacagcatcacgggagtgggcgccgaccagccccccatggaggtcttcagcattgactccatgtccggccggatgtacgtcacaaggcccatggaccgggaggagcacgcctcttaccacctccgagcccacgctgtggacatgaatggcaacaaggtggagaaccccatcgacctgtacatctacgtcatcgacatgaatgacaaccgccctgagttcatcaaccaggtctacaacggctccgtggacgagggctccaagccaggcacctacgtgatgaccgtcacggccaacgatgctgacgacagcaccacggccaacgggatggtgcggtaccggatcgtgacccagaccccacagagcccgtcccagaatatgttcaccatcaacagcgagactggagatatcgtcacagtggcggctggcctggaccgagagaaagttcagcagtacacagtcatcgttcaggccacagatatggaaggaaatctcaactatggcctctcaaacacagccacagccatcatcacggtgacagatgtgaatgacaacccgccagaatttaccgccagcacgtttgcaggggaggtccccgaaaaccgcgtggagaccgtggtcgcaaacctcacggtgatggaccgagatcagccccactctccaaactggaatgccgtttaccgcatcatcagtggggatccatccgggcacttcagcgtccgcacagaccccgtaaccaacgagggcatggtcaccgtggtgaaggcagtcgactacgagctcaacagagctttcatgctgacagtgatggtgtccaaccaggcgcccctggccagcggaatccagatgtccttccagtccacggcaggggtgaccatctccatcatggacatcaacgaggctccctacttcccctcaaaccacaagctgatccgcctggaggagggcgtgccccccggcaccgtgctgaccacgttttcagctgtggaccctgaccggttcatgcagcaggctgtgagatactcaaagctgtcagacccagcgagctggctgcacatcaatgccaccaacggccagatcaccacggcggcagtgctggaccgtgagtccctctacaccaaaaacaacgtctacgaggccaccttcctggcagctgacaatgggatacccccggccagcggcaccgggaccctccagatctatctcattgacatcaacgacaacgcccctgagctgctgcccaaggaggcgcagatctgcgagaagcccaacctgaacgccatcaacatcacggcggccgacgctgacgtcgaccccaacatcggcccctacgtcttcgagctgccctttgtcccggcggccgtgcggaagaactggaccatcacccgcctgaacggtgactatgcccaactcagcttgcgcatcctgtacctggaggccgggatgtatgacgtccccatcatcgtcacagactctggaaaccctcccctgtccaacacgtccatcatcaaagtcaaggtgtgcccatgtgatgacaacggggactgcaccaccattggcgcagtggcagcggctggtctgggcaccggtgccatcgtggccatcctcatctgcatcctcatcctgctgaccatggtcctgctgtttgtcatgtggatgaagcggcgagagaaggagcgccacacgaagcagctgctcattgaccccgaggacgacgtccgcgacaacatcctcaagtatgacgaggaaggcggtggcgaggaggaccaggactacgacctcagccagctgcagcagccggaagccatggggcacgtgccaagcaaagcccctggcgtgcgtcgcgtggatgagcggccggtgggcgctgagccccagtacccgatcaggcccatggtgccgcacccaggcgacatcggtgacttcatcaatgagggactccgcgctgctgacaacgaccccacggcacccccctatgactccctgctggtcttcgactacgaggggagcggctccaccgcaggctccgtcagctccctgaactcatccagttccggggaccaagactacgattacctcaacgactgggggcccagattcaagaagctggcggacatgtatggaggtggtgaagaggattgactgacctcgcatcttcggaccgaagtgagagccgtgctcggacgccggaggagcaggactgagcagaggcggccggtcttcccgactccctgcggctgtgtccttagtgctgttaggaggccccccaatccccacgttgagctgtctagcatgagcacccacccccacagcgccctgcacccggccgctgcccagcaccgcgctggctggcactgaaggacagcaagaggcactctgtcttcacttgaatttcctagaacagaagcactgtttttaaaaaaaaaaaaaaaaaaagaag

SEQ ID NO: 1299 - protein, 916 aa, Homo sapiens
MTAGAGVLLLLLSLSGALRAHNEDLTTRETCKAGFSEDDYTALISQNILEGEKLLQVKFSSCVGTKGTQYETNSMDFKVGADGTVFATRELQVPSEQVAFTVTAWDSQTAEKWDAVVRLLVAQTSSPHSGHKPQKGKKVVALDPSPPPKDTLLPWPQHQNANGLRRRKRDWVIPPINVPENSRGPFPQQLVRIRSDKDNDIPIRYSITGVGADQPPMEVFSIDSMSGRMYVTRPMDREEHASYHLRAHAVDMNGNKVENPIDLYIYVIDMNDNRPEFINQVYNGSVDEGSKPGTYVMTVTANDADDSTTANGMVRYRIVTQTPQSPSQNMFTINSETGDIVTVAAGLDREKVQQYTVIVQATDMEGNLNYGLSNTATAIITVTDVNDNPPEFTASTFAGEVPENRVETVVANLTVMDRDQPHSPNWNAVYRIISGDPSGHFSVRTDPVTNEGMVTVVKAVDYELNRAFMLTVMVSNQAPLASGIQMSFQSTAGVTISIMDINEAPYFPSNHKLIRLEEGVPPGTVLTTFSAVDPDRFMQQAVRYSKLSDPASWLHINATNGQITTAAVLDRESLYTKNNVYEATFLAADNGIPPASGTGTLQIYLIDINDNAPELLPKEAQICEKPNLNAINITAADADVDPNIGPYVFELPFVPAAVRKNWTITRLNGDYAQLSLRILYLEAGMYDVPIIVTDSGNPPLSNTSIIKVKVCPCDDNGDCTTIGAVAAAGLGTGAIVAILICILILLTMVLLFVMWMKRREKERHTKQLLIDPEDDVRDNILKYDEEGGGEEDQDYDLSQLQQPEAMGHVPSKAPGVRRVDERPVGAEPQYPIRPMVPHPGDIGDFINEGLRAADNDPTAPPYDSLLVFDYEGSGSTAGSVSSLNSSSSGDQDYDYLNDWGPRFKKLADMYGGGEED

SEQ ID NO: 1300 - DNA, 7292 bp, Homo sapiens
aacactgatatttgcatttaatggggaacaaaagatgaagaaggaaaaggaatatattcactaaggattctatctgcttactgctacagacctatgtgttaaggaattcttctcctcctccttgcgtagaagttgatcagcactgtggtcagactgcatttatcttgtcattgccagaagaaatcttggacagaatgtaacagtacgtctctctctgattgcgatggaaggtgataaactgatactcctttattaaagttacatcgcactcaccacagaaaaccattctttaaagtgaatagaaaccaagcccttgtgaacacttctattgaacatgactcatggagaagagcttggctctgatgtgcaccaggattctattgttttaacttacctagaaggattactaatgcatcaggcagcagggggatcaggtactgccgttgacaaaaagtctgctgggcataatgaagaggatcagaactttaacatttctggcagtgcatttcccacctgtcaaagtaatggtccagttctcaatacacatacatatcaggggtctggcatgctgcacctcaaaaaagccagactgttgcagtcttctgaggactggaatgcagcaaagcggaagaggctgtctgattctatcatgaatttaaacgtaaagaaggaagctttgctagctggcatggttgacagtgtgcctaaaggcaaacaggatagcacattactggcctctttgcttcagtcattcagctctaggctgcagactgttgctctgtcacaacaaatcaggcagagcctcaaggagcaaggatatgccctcagtcatgattctttaaaagtggagaaggatttaaggtgctatggtgttgcatcaagtcacttaaaaactttgttgaagaaaagtaaagttaaagatcaaaagcctgatacgaatcttcctgatgtgactaaaaacctcatcagagataggtttgcagagtctcctcatcatgttggacaaagtggaacaaaggtcatgagtgaaccgttgtcatgtgctgcaagattacaggctgttgcaagcatggtggaaaaaagggctagtcctgccacctcacctaaacctagtgttgcttgtagccagttagcattacttctgtcaagcgaagcccatttgcagcagtattctcgagaacacgctttaaaaacgcaaaatgcaaatcaagcagcaagtgaaagacttgctgctatggccagattgcaagaaaatggccagaaggatgttggcagttaccagctcccaaaaggaatgtcaagccatcttaatggtcaggcaagaacatcatcaagcaaactgatggctagcaaaagtagtgctacagtgtttcaaaatccaatgggtatcattccttcttcccctaaaaatgcaggttataagaactcactggaaagaaacaatataaaacaagctgctaacaatagtttgcttttacatcttcttaaaagccagactatacctaagccaatgaatggacacagtcacagtgagagaggaagcatttttgaggaaagtagtacacctacaactattgatgaatattcagataacaatcctagttttacagatgacagcagtggtgatgaaagttcttattccaactgtgttcccatagacttgtcttgcaaacaccgaactgaaaaatcagaatctgaccaacctgtttccctggataacttcactcaatccttgctaaacacttgggatccaaaagtcccagatgtagatatcaaagaagatcaagatacctcaaagaattctaagctaaactcacaccagaaagtaacacttcttcaattgctacttggccataagaatgaagaaaatgtagaaaaaaacaccagccctcagggagtacacaatgatgtgagcaagttcaatacacaaaattatgcaaggacttctgtgatagaaagccccagtacaaatcggactactccagtgagcactccacctttacttacatcaagcaaagcagggtctcccatcaatctctctcaacactctctggtcatcaaatggaattccccaccatatgtctgcagtactcagtctgaaaagctaacaaatactgcatctaaccactcaatggaccttacaaaaagcaaagacccaccaggagagaaaccagcccaaaatgaaggtgcacagaactctgcaacgtttagtgccagtaagctgttacaaaatttagcacaatgtggaatgcagtcatccatgtcagtggaagagcagagacccagcaaacagctgttaactggaaacacagataaaccgataggtatgattgatagattaaatagccctttgctctcaaataaaacaaatgcagttgaagaaaataaagcatttagtagtcaaccaacaggtcctgaaccagggctttctggttctgaaatagaaaatctgcttgaaagacgtactgtcctccagttgctcctggggaaccccaacaaagggaagagtgaaaaaaaagagaaaactcccttaagagatgaaagtactcaggaacactcagagagagctttaagtgaacaaatactgatggtgaaaataaaatctgagccttgtgatgacttacaaattcctaacacaaatgtgcacttgagccatgatgctaagagtgccccattcttgggtatggctcctgctgtgcagagaagcgcacctgccttaccagtgtccgaagactttaaatcggagcctgtttcacctcaggatttttctttctccaagaatggtctgctaagtcgattgctaagacaaaatcaagatagttacctggcagatgattcagacaggagtcacagaaataatgaaatggcacttctagaatcaaagaatctttgcatggtccctaagaaaaggaagctttatactgagccattagaaaatccatttaaaaagatgaaaaacaacattgttgatgctgcaaacaatcacagtgccccagaagtactgtatgggtccttgcttaaccaggaagagctgaaatttagcagaaatgatcttgaatttaaatatcctgctggtcatggctcagccagcgaaagtgaacacaggagttgggccagagagagcaaaagctttaatgttctgaaacagctgcttctctcagaaaactgtgtgcgagatttgtccccgcacagaagtaactctgtggctgacagtaaaaagaaaggacacaaaaataatgtgaccaacagcaaacctgaatttagcatttcttctttaaatggactgatgtacagttccactcagcccagcagttgcatggataacaggacattttcatacccaggtgtagtaaaaactcctgtgagtcctactttccctgagcacttgggctgtgcagggtctagaccagaatctgggcttttgaatgggtgttccatgcccagtgagaaaggacccattaagtgggttatcactgatgcggagaagaatgagtatgaaaaagactctccaagattgaccaaaaccaacccaatactatattacatgcttcaaaaaggaggcaattctgttaccagtcgagaaacacaagacaaggacatttggagggaggcttcatctgctgaaagtgtctcacaggtcacagccaaagaagagttacttcctactgcagaaacgaaagcttctttctttaatttaagaagcccttacaatagccatatgggaaataatgcttctcgcccacacagcgcaaatggagaagtttatggacttctgggaagcgtgctaacgataaagaaagaatcagaataaaatgtacctgccatccagttttggatctttttaaaactaatgagtatgaacttgagatctgtataaataagagcatgatttgaaaaaaagcatggtataattgaaacttttttcattttgaaaagtattggttactggtgatgttgaaatatgcatactaatttttgcttaacattagatgtcatgaggaaactactgaactagcaattggttgtttaacacttctgtatgcatcagataacaactgtgagtagcctatgaatgaaattcttttataaatattaggcataaattaaaatgtaaaactccattcatagtggattaatgcattttgctgcctttattagggtactttattttgcttttcagaagtcagcctacataacacatttttaaagtctaaactgttaaacaactctttaaaggataattatccaataaaaaaaaacctagtgctgattcacagcttattatccaattcaaaaataaattagaaaaatatatgcttacatttttcacttttgctaaaaagaaaaaaaaaaggtgtttatttttaactcttggaagaggttttgtggttcccaatgtgtctgtcccaccctgatccttttcaatatatatttctttaaaccttgtgctacttagtaaaaattgattacaattgagggaagtttgatagatcctttaaaaaaaaggcagatttccattttttgtattttaactactttactaaattaatactcctccttttacagaattagaaaagttaacatttatctttaggtggtttcctgaaaagttgaatatttaagaaattgtttttaacagaagcaaaatggcttttctttggacagttttcaccatctcttgtaaaagttaattctcaccattcctgtggtacctgcgagtgttatgaccaggattccttaaacctgaactcagaccacttgcattagaaccatctggagcacttgttttaaaatgcagattcataggcagcatctcagatctacagaacaagaatctctgctaagtggacctggaatcttccatctgcatcttaacatgctctctaggtgtttcttgtgtttgagaaccatgacttatgactttcctcagaacatgagactgtaaaacaaaaacaaaaaactatgtgatgcctctattttccccaatacagtcacacatcagctcaaaatttgcaatattgtagttcatatattaccgttatgtctttggaaatcgggttcagaacactttttatgacaaaaattgggtggaggggataactttcatatctggctcaacatctcaggaaaatctgtgattatttgtgtgttctaatgagtaacatctacttagttagccttagggatggaaaaacagggccacttaccaaactcaggtgattccaggatggtttggaaacttctcctgaatgcatccttaacctttattaaaaccattgtcctaagaacaatgccaacaaagcttacaacatttagtttaaacccaagaagggcactaaactcagattgactaaataaaaagtacaaagggcacatatacgtgacagaattgtacacaatcactccattggatcttttactttaaagtagtgatgaaaagtacatgttgatactgtcttagaagaaattaatatattagtgaagccacatggggtttcagttgcgaaacaggtctgtttttatgttcagtttgtacaatccacaattcattcaccagatattttgttcttaattgtgaaccaggttagcaaatgacctatcaaaaattattctataatcactactagttaggatattgatttaaaattgttctacttgaagtggtttctaagatttttatattaaaaataggtgtgatttcctaatatgatctaaaaccctaaatggttatttttcctcagaatgatttgtaaatagctactggaaatattatacagtaataggagtgggtattatgcaacatcatggagaagtgaaggcataggcttattctgacataaaattccactggccagttgaatatattctattccatgtccatactatgacaatcttattgtcaacactatataaataagcttttaaacaagtcatttttcttgatcgttgtggaaggtttggagccttagaggtatgtcagaaaaaatatgttggtattctcccttgggtagggggaaatgacctttttacaagagagtgaaatttaggtcagggaaaagaccaagggccagcattgctacttttgtgtgtgtgtgtgtgggttttgttttgtttttttggttggctggttgttttcgttgttgttaacaaaggaatgagaatatgtaatacttaaataaacatgaccacgaagaatgctgttctgatttactagagaatgttcccaatttgaatttagggtgattttaaagaacagtgagaaagggcatacatccacagattcactttgtttatgcatatgtagatacaaggatgcacatatacacattttcaaggactattttagatatctagacaatttcttctaataaagtcatttgtgaaagggtactacagcttattgacatcagtaaggtagcattcattacctgtttattctctgctgcatcttacagaagagtaaactggtgagagtatatattttatatatatatatatatatatatatataatatgtatatatatatatattgacttgttacatgaagatgttaaaatcggtttttaaaggtgatgtaaatagtgatttccttaatgaaaaatacatattttgtattgttctaatgcaacagaaaagccttttaatctctttggttcctgtatattccatgtataagtgtaaatataatcagacaggtttaaaagttgtgcatgtatgtatacagttgcaagtctggacaaatgtatagaataaaccttttatttaagttgtgattacctgctgcatgaaaagtgcatgggggaccctgtgcatctgtgcatttggcaaaatgtcttaacaaatcagatcagatgttcatcctaacatgacagtattccatttctggacatgacgtctgtggtttaagctttgtgaaagaatgtgctttgattcgaagggtcttaaagaatttttttaatcgtcaaccacttttaaacataaagaattcacacaactactttcatgaattttttaatcccattgcaaacattattccaagagtatcccagtattagcaatactggaatataggcacattaccattcatagtaagaattctggtgtttacacaaccaaatttgatgcgatctgctcagtaatataatttgccatttttattagaaatttaatttcttcatgtgatgtcatgaaactgtacatactgcagtgtgaatttttttgttttgttttttaatcttttagtgtttacttcctgcagtgaatttgaataaatgagaaaaaatgcattgtc

SEQ ID NO: 1301 - protein, 1158 aa, Homo sapiens
MTHGEELGSDVHQDSIVLTYLEGLLMHQAAGGSGTAVDKKSAGHNEEDQNFNISGSAFPTCQSNGPVLNTHTYQGSGMLHLKKARLLQSSEDWNAAKRKRLSDSIMNLNVKKEALLAGMVDSVPKGKQDSTLLASLLQSFSSRLQTVALSQQIRQSLKEQGYALSHDSLKVEKDLRCYGVASSHLKTLLKKSKVKDQKPDTNLPDVTKNLIRDRFAESPHHVGQSGTKVMSEPLSCAARLQAVASMVEKRASPATSPKPSVACSQLALLLSSEAHLQQYSREHALKTQNANQAASERLAAMARLQENGQKDVGSYQLPKGMSSHLNGQARTSSSKLMASKSSATVFQNPMGIIPSSPKNAGYKNSLERNNIKQAANNSLLLHLLKSQTIPKPMNGHSHSERGSIFEESSTPTTIDEYSDNNPSFTDDSSGDESSYSNCVPIDLSCKHRTEKSESDQPVSLDNFTQSLLNTWDPKVPDVDIKEDQDTSKNSKLNSHQKVTLLQLLLGHKNEENVEKNTSPQGVHNDVSKFNTQNYARTSVIESPSTNRTTPVSTPPLLTSSKAGSPINLSQHSLVIKWNSPPYVCSTQSEKLTNTASNHSMDLTKSKDPPGEKPAQNEGAQNSATFSASKLLQNLAQCGMQSSMSVEEQRPSKQLLTGNTDKPIGMIDRLNSPLLSNKTNAVEENKAFSSQPTGPEPGLSGSEIENLLERRTVLQLLLGNPNKGKSEKKEKTPLRDESTQEHSERALSEQILMVKIKSEPCDDLQIPNTNVHLSHDAKSAPFLGMAPAVQRSAPALPVSEDFKSEPVSPQDFSFSKNGLLSRLLRQNQDSYLADDSDRSHRNNEMALLESKNLCMVPKKRKLYTEPLENPFKKMKNNIVDAANNHSAPEVLYGSLLNQEELKFSRNDLEFKYPAGHGSASESEHRSWARESKSFNVLKQLLLSENCVRDLSPHRSNSVADSKKKGHKNNVTNSKPEFSISSLNGLMYSSTQPSSCMDNRTFSYPGVVKTPVSPTFPEHLGCAGSRPESGLLNGCSMPSEKGPIKWVITDAEKNEYEKDSPRLTKTNPILYYMLQKGGNSVTSRETQDKDIWREASSAESVSQVTAKEELLPTAETKASFFNLRSPYNSHMGNNASRPHSANGEVYGLLGSVLTIKKESE

SEQ ID NO: 1302 - DNA, 1382 bp, Homo sapiens
gcgggaccggccgcgtctccatggcgacgcgggacgcggcggtggaggcggttgctacccacctgctagaggcgctgcggctgtgatccaggctggggcgagaccatgtcggacctgggctcggaggagttggaggaggagggagagaatgatattggggaatatgaggggggtcggaatgaggcaggcgaaaggcacggacgtgggagggcacggctacccaacggggacacctacgaagggagctacgaattcggtaaaagacatggccaggggatctacaaatttaaaaatggtgctcgatatatcggagaatatgttagaaataaaaagcacggtcaaggcacttttatatatccagatggatccagatatgaaggagagtgggcaaatgacctgcggcacggccatggcgtatactactacatcaataatgacacctacactggagagtggtttgctcatcaaaggcatgggcaaggcacctatttatacgcggagacgggcagtaagtatgttggcacctgggtgaacggacagcaggagggcacggccgagctcattcacctgaaccacaggtaccagggcaagttcttgaacaaaaatcctgttggccctggaaagtatgtatttgatgttgggtgtgaacaacatggtgaatatcgtttaacagatatggaaagaggagaagaggaagaggaggaagaattagtaactgttgttccaaaatggaaagctacccaaatcactgaattggccctgtggacaccaactctccccaaaaagccgacctctacggatggacctggccaagacgctccaggagctgagagtgcaggagaacccggggaggaggcccaggctctgctggagggcttcgagggtgagatggacatgaggcctggagatgaagatgcagacgtcctccgggaagagagccgggagtatgaccaggaggagttccgctatgacatggatgagggaaacattaattctgaagaagaagaaactagacagtcagacctccaggactaagatgaagtgagccgagaggagatcgtatcataagaatgcttctgtcgttagccgggtgcagtgctgtgtgtatctagttccagctacttgagaggctgaggcaggaggattgcttgagtccagaaagtggcagttgcagtgagtggagatcgcgccactgctctccagcctgggtggcagagcgagaccctgtctcaaaaaataaacaaaaacaaaatgcttctgtcagttaacaatctttattagagggtttttagtctttctttctcagctgtatgttaagttgattgacaaatgcaaataaacgtctttattatcctttctttctgaaaaaaaaaaaaaaaaaa

SEQ ID NO: 1303 - protein, 309 aa, Homo sapiens
MSDLGSEELEEEGENDIGEYEGGRNEAGERHGRGRARLPNGDTYEGSYEFGKRHGQGIYKFKNGARYIGEYVRNKKHGQGTFIYPDGSRYEGEWANDLRHGHGVYYYINNDTYTGEWFAHQRHGQGTYLYAETGSKYVGTWVNGQQEGTAELIHLNHRYQGKFLNKNPVGPGKYVFDVGCEQHGEYRLTDMERGEEEEEEELVTVVPKWKATQITELALWTPTLPKKPTSTDGPGQDAPGAESAGEPGEEAQALLEGFEGEMDMRPGDEDADVLREESREYDQEEFRYDMDEGNINSEEEETRQSDLQD

SEQ ID NO: 1304 - DNA, 605 bp, Homo sapiens
atggagacgcggccggtcccgcctccctcccagcccggaagatggggagcggggacaggcgacgcggacgaagcgggaggagccactggcagcctttgccaacgaggggccgcttcggccaatcactgctcgggaagcgagggggcggggactgggcagggcctgagcgggttctgtgcctggctgcccaccggctctctgacctggacctcgccgtcgctggcccctgaaatccatcacttttgtcggctgttctgtgacgccacaacgaggagccacctgggctctgctgacccttcgggattcgcggctagctgtgatgtgtccgccaagatctcttctcttgtctgtaaacaacttcactctcaaggaggcagctctggcctctcagcaggagctggggaggagtgactgaataactataggatttggtcttgatgggagaatcccagaagccaaatccacgcggtgaataagctgctgatcttccagagcacacatcccctagagattcttcccaatgctaatatgaaaggttacaaccataacccatcatcaggcccaaatatattacttactgaataaatacacaagttacaacaaca

SEQ ID NO: 1305 - protein, 136 aa, Homo sapiens
METRPVPPPSQPGRWGAGTGDADEAGGATGSLCQRGAASANHCSGSEGAGTGQGLSGFCAWLPTGSLTWTSPSLAPEIHHFCRLFCDATTRSHLGSADPSGFAASCDVSAKISSLVCKQLHSQGGSSGLSAGAGEE

SEQ ID NO: 1306 - DNA, 3098 bp, Homo sapiens
tgggaagttcgcgcaagtgcggctctgcagggaggagggagggccgaggggaaggccctcgagagagtggagggcaacagtggccacggttcctctgtacttcgtttcttccctttatagaattgagagattgctgagcctaaatacatgttgctgcattgcctccgagaatggccggacctatccccactctcaccaaaacagagtgtgggactcactgctccctcgcctactagagcagagccactgccagaaggaaggggacaagacccagcaggacaccttctttccacgctttccagcctgtgggagcggcaggggcaacagagagaggatctggagccaggattaatgactcatttatgaagcatcttattctgcgaccgaggctcagtggtcagtggcgacgtaaatggctcgactccccgctggcattcgcttcatcatctcattctccagggatcagtggtacagagccttcatttttattttgacatttctgctgtatgcaagttttcacttatctcgaaagcctatcagcatagttaagggtgagctccacaagtactgcactgcttgggatgaagctgacgtcaggttcagcagccagaacaggaagtctgggtccgctgccccccaccagctccctgacaatgagaccgactgtggctgggcaccgtttgataagaacaactatcagcagctgcttggggccctggactactccttcctgtgcgcctatgccgtggggatgtacctcagtggcatcattggggagcgcctgccgattaggtattacctaactttcgggatgctcgccagcggagccttcaccgccctgttcggcttagggtatttctacaacatccacagtttcggattctacgtggtaactcaggtcatcaacgggctggtgcagaccaccggctggcccagcgtcgtcacctgcctcggcaactggtttggaaaaggaaggagaggtttgattatgggggtctggaactcccacacctccgtgggcaacatcttggggtcattgatcgctggctactgggtgtccacatgctggggcctgtccttcgtcgtgcctggagccatcgtggcagccatggggatagtgtgctttctcttcctcattgaacatccgaacgacgtcaggtgctcctccaccctggtgacgcactcaaaaggctatgagaatggtacaaacagattgagactccagaagcaaatcttgaagagcgaaaagaacaagcctctggacccagagatgcagtgcctgctgctctcagatgggaagggctccatccacccgaaccacgtcgtcattctccccggggacggtgggagtggcacggccgccatcagcttcacaggggccttgaaaattccaggcgtgatagagttctcactgtgtctgctgtttgccaagctggtcagctatactttcctcttctggctgcccctgtacatcacgaatgtggatcaccttgatgccaaaaaggcgggggagctctccaccctgtttgacgtgggcggaatctttggtgggatcctggcaggtgtgatctcagaccgactggagaaaagggcctccacctgcggcctgatgctgctgctcgcggcccccacgctctacatcttctccaccgtcagcaagatggggcttgaggccaccatcgccatgctgctgctcagcggagccctggtcagtgggccctacacactcatcaccaccgccgtctccgccgacctggggactcataaaagtctgaaaggcaacgcgcacgccctctccaccgtgacggccatcattgacgggacgggctctgtaggagcagccctgggccccctgctggctgggctcctctccccgtccggctggagcaatgtgttttacatgctgatgtttgcagatgcctgtgccttactgttcctgatccgcctcatacacaaggagctgagctgcccagggtcagctacgggggaccaagttccatttaaggaacagtgacaccccaccccagtcccgtggagggggtctgggcccacccttcacaactgcctttcaaggacagttcagacaaagggccctgcatggaaagagtgacctccctttgccttttgcacacgcacctggaaaagacacagaagccaacctgagaacccctggtgctattttaaaggagacatattgctgaacagcagtgagaaaagtctgcaggaactgctgcctgagccaagccagagaaccgaagacccggccggccctggcctcacaggcgtgtgcccatgcagccacccaaatgcacgcgtgacaacaaggccgggagggtggggggggtgcacaggtagccccgaccctctcaggcattccagccacagaacatcaaagtgagcgagtactgcgctggctgtggcttcagagaacctgtatgtgccacatggaaaaacaggacaccagagcccaccagacagtgccggccagcagagaagcagagagccagcgccacacaacatcaagaaggccgacaaccaggttggaaaccaagacggagctcagacccaccacatcgccccagaggcttttccagcacccatgatgtttcggactgacctaaaaactaattgtcgagaagccaagggtgaggaggcaggaagcacctccggttggaggcacccaggcttgccagccacagagcgccccaaagtcaccgtcatcccagcccctggccttcctgctgccctccggggccatggcactgctgttcagctcaggcacaggggcacagcagaggtttgggaagcggtctccccaccggcactgggattggcgggtccaagcccagcaaccggcttcgctccacaacacacaccacacctgggactgtttttaatacatagcaacagactgggttatttatttaagatgtgtattgtgtcatatgaagtttaagagacataaatggcattttgttatttattaagacaaactccaattgttctctggctgtttttttcagttgtgtctagcaaaatacttatctgccctttgaaataaaatgtttttgtttaaaaaatctcagaacactcaaaaa

SEQ ID NO: 1307 - protein, 533 aa, Homo sapiens
MARLPAGIRFIISFSRDQWYRAFIFILTFLLYASFHLSRKPISIVKGELHKYCTAWDEADVRFSSQNRKSGSAAPHQLPDNETDCGWAPFDKNNYQQLLGALDYSFLCAYAVGMYLSGIIGERLPIRYYLTFGMLASGAFTALFGLGYFYNIHSFGFYVVTQVINGLVQTTGWPSVVTCLGNWFGKGRRGLIMGVWNSHTSVGNILGSLIAGYWVSTCWGLSFVVPGAIVAAMGIVCFLFLIEHPNDVRCSSTLVTHSKGYENGTNRLRLQKQILKSEKNKPLDPEMQCLLLSDGKGSIHPNHVVILPGDGGSGTAAISFTGALKIPGVIEFSLCLLFAKLVSYTFLFWLPLYITNVDHLDAKKAGELSTLFDVGGIFGGILAGVISDRLEKRASTCGLMLLLAAPTLYIFSTVSKMGLEATIAMLLLSGALVSGPYTLITTAVSADLGTHKSLKGNAHALSTVTAIIDGTGSVGAALGPLLAGLLSPSGWSNVFYMLMFADACALLFLIRLIHKELSCPGSATGDQVPFKEQ

SEQ ID NO: 1308 - DNA, 2444 bp, Homo sapiens
agcaggagggtgggaccaagggtgctgctggaccaaggatgggactgggccaagggtggggctgggaagcatcctgttttgcatgtttgatcaggagctgctgccaagttgtgactttcactttcccttttgggttccagggtatatctcagagcctggagaacgtgtctggttattatgcagatgcacggctggaggtgggatccacacagctcagaacagctggatcttgctcacactctttcaagagaagcttccttggacaaaaggaccctgccttggtgtgagagtgagggcagagggagctggagcaagtagaatttctctaaataccagctggctggggcccaggagattaaaaaacaccgggctaggttggtcttggcatttgctgacacgcaaagggattgcagagatccagcccctccaacctccctctgtccacaggtggctcacattcagtcccacaatttgctttctcctcctcaagggttaagaaaaaaaacgaacccttccagtcaggtcagtgactggagagctccatggaaagtctctcagtgacctggctgctggcaccatggactcagaaaagaaacgctttactgaagaggccaccaaatacttccgggagagagtcagcccagtgcatctgcaaatcctgctgactaacaatgaagcctggaagagattcgtgactgcggctgaattgcccagggatgaggcagatgctctctacgaagctctgaagaagcttagaacatatgcagctattgaggacgaatatgtgcagcagaaagatgagcagtttagggaatggtttttgaaagagtttccccaagtcaagaggaagatccaggagtccatagaaaagcttcgtgcccttgcaaatggtattgaagaggtccacagaggctgcaccatctccaatgtggtgtccagctccactggcgctgcctctggcatcatgtcccttgctggtcttgttttggcaccatttacagcagggacgagtctggcccttactgcagctggggtagggctgggagcagcgtctgctgtgactgggatcaccaccagcatcgtggagcactcatacacatcatcagcagaagctgaagccagcaggctgactgcaaccagcattgaccgattgaaggtatttaaggaagttatgcgtgacatcacacccaacttactttcccttcttaataattattacgaagccacacaaaccattgggagtgaaatccgtgccatcaggcaagccagagccagggcccgactccctgtgaccacctggcgaatctcagctggaagtggtggtcaagcagagagaacgattgcaggcaccacccgggcagtgagcagaggagcccggatcctgagtgcgaccacttcaggcatcttccttgcactggatgtggtcaaccttgtatacgagtcaaagcacttgcatgagggggcaaagtctgcatctgctgaggagctgaggcggcaggctcaggagctggaggagaatctaatggagctcactcagatctatcagcgtctgaatccatgccatacccactgaccccagaccagtgcagccagcaggggaggtgagccatacacaggccacgacaaaatgcaggcattttattagggggataaagagggcaaggtaaagtttatggagctgagtgttagtgactttggcatttctgtagctgagcacagcaggggaggggttaatgcagatggcaagtgcaccaaggagaaggcaggaatgctggagcctggaataagggaggagaggggactggagagtgtggggaataggaagaagaaatttcctttagactaacgaatatattggggggaggaatagaggggaggtgtgcaggaaccagcaatgagaaggccaggaaaagaaagagctgaaaatgcagaaagccgaagagttagaacttttggatacagcagaagaaacagcggctccactaccgacctgcccccggttcgatgtccttccaagaatgaagtctttccctggtgatggtcccctgccctgtctttccagcatccactctgtcttgtcctcctggaagtgtatctcagtcagccagtggcttcttgatgatggcggtggaggtggtggttgtagtgtgatggatcccctttaggttatttaggggtatatgtcccctgcttgaaccctgaaggccaggtaatgagccatggccattgtccccagctgaggaccaggtgtctctaaaaacccaaacatcctggagagtatgcgagaacctaccaagaaaaacagtctcattactcatatacagcaggcaaagagacagaaaattaactgaaaagcagtttagagactgggggaggccggatctctagagccatcctgctgagtgccctgtgtgtaagtcctaataaactcacctactcaccaa

SEQ ID NO: 1309 - protein, 331 aa, Homo sapiens
MDSEKKRFTEEATKYFRERVSPVHLQILLTNNEAWKRFVTAAELPRDEADALYEALKKLRTYAAIEDEYVQQKDEQFREWFLKEFPQVKRKIQESIEKLRALANGIEEVHRGCTISNVVSSSTGAASGIMSLAGLVLAPFTAGTSLALTAAGVGLGAASAVTGITTSIVEHSYTSSAEAEASRLTATSIDRLKVFKEVMRDITPNLLSLLNNYYEATQTIGSEIRAIRQARARARLPVTTWRISAGSGGQAERTIAGTTRAVSRGARILSATTSGIFLALDVVNLVYESKHLHEGAKSASAEELRRQAQELEENLMELTQIYQRLNPCHTH

SEQ ID NO: 1310 - DNA, 2328 bp, Homo sapiens
agcaggagggtgggaccaagggtgctgctggaccaaggatgggactgggccaagggtggggctgggaagcatcctgttttgcatgtttgatcaggagctgctgccaagttgtgactttcactttcccttttgggttccagggtatatctcagagcctggagaacgtgtctggttattatgcagatgcacggctggaggtgggatccacacagctcagaacagctggatcttgctcacactctttcaagagaagcttccttggacaaaaggaccctgccttggtgtgagagtgagggcagagggagctggagcaagtagaatttctctaaataccagctggctggggcccaggagattaaaaaacaccgggctagggttaagaaaaaaaacgaacccttccagtcaggtcagtgactggagagctccatggaaagtctctcagtgacctggctgctggcaccatggactcagaaaagaaacgctttactgaagaggccaccaaatacttccgggagagagtcagcccagtgcatctgcaaatcctgctgactaacaatgaagcctggaagagattcgtgactgcggctgaattgcccagggatgaggcagatgctctctacgaagctctgaagaagcttagaacatatgcagctattgaggacgaatatgtgcagcagaaagatgagcagtttagggaatggtttttgaaagagtttccccaagtcaagaggaagatccaggagtccatagaaaagcttcgtgcccttgcaaatggtattgaagaggtccacagaggctgcaccatctccaatgtggtgtccagctccactggcgctgcctctggcatcatgtcccttgctggtcttgttttggcaccatttacagcagggacgagtctggcccttactgcagctggggtagggctgggagcagcgtctgctgtgactgggatcaccaccagcatcgtggagcactcatacacatcatcagcagaagctgaagccagcaggctgactgcaaccagcattgaccgattgaaggtatttaaggaagttatgcgtgacatcacacccaacttactttcccttcttaataattattacgaagccacacaaaccattgggagtgaaatccgtgccatcaggcaagccagagccagggcccgactccctgtgaccacctggcgaatctcagctggaagtggtggtcaagcagagagaacgattgcaggcaccacccgggcagtgagcagaggagcccggatcctgagtgcgaccacttcaggcatcttccttgcactggatgtggtcaaccttgtatacgagtcaaagcacttgcatgagggggcaaagtctgcatctgctgaggagctgaggcggcaggctcaggagctggaggagaatctaatggagctcactcagatctatcagcgtctgaatccatgccatacccactgaccccagaccagtgcagccagcaggggaggtgagccatacacaggccacgacaaaatgcaggcattttattagggggataaagagggcaaggtaaagtttatggagctgagtgttagtgactttggcatttctgtagctgagcacagcaggggaggggttaatgcagatggcaagtgcaccaaggagaaggcaggaatgctggagcctggaataagggaggagaggggactggagagtgtggggaataggaagaagaaatttcctttagactaacgaatatattggggggaggaatagaggggaggtgtgcaggaaccagcaatgagaaggccaggaaaagaaagagctgaaaatgcagaaagccgaagagttagaacttttggatacagcagaagaaacagcggctccactaccgacctgcccccggttcgatgtccttccaagaatgaagtctttccctggtgatggtcccctgccctgtctttccagcatccactctgtcttgtcctcctggaagtgtatctcagtcagccagtggcttcttgatgatggcggtggaggtggtggttgtagtgtgatggatcccctttaggttatttaggggtatatgtcccctgcttgaaccctgaaggccaggtaatgagccatggccattgtccccagctgaggaccaggtgtctctaaaaacccaaacatcctggagagtatgcgagaacctaccaagaaaaacagtctcattactcatatacagcaggcaaagagacagaaaattaactgaaaagcagtttagagactgggggaggccggatctctagagccatcctgctgagtgccctgtgtgtaagtcctaataaactcacctactcaccaa

SEQ ID NO: 1311 - protein, 331 aa, Homo sapiens; identical to SEQ ID NO: 1309

SEQ ID NO: 1312 - DNA, 2215 bp, Homo sapiens
agcaggagggtgggaccaagggtgctgctggaccaaggatgggactgggccaagggtggggctgggaagcatcctgttttgcatgtttgatcaggagctgctgccaagttgtgactttcactttcccttttgggttccagggtatatctcagagcctggagaacgtgtctggttattatgcagatgcacggctggaggtgggatccacacagctcagaacagctggatcttgctcacactctttcaagagaagcttccttgggttaagaaaaaaaacgaacccttccagtcaggtcagtgactggagagctccatggaaagtctctcagtgacctggctgctggcaccatggactcagaaaagaaacgctttactgaagaggccaccaaatacttccgggagagagtcagcccagtgcatctgcaaatcctgctgactaacaatgaagcctggaagagattcgtgactgcggctgaattgcccagggatgaggcagatgctctctacgaagctctgaagaagcttagaacatatgcagctattgaggacgaatatgtgcagcagaaagatgagcagtttagggaatggtttttgaaagagtttccccaagtcaagaggaagatccaggagtccatagaaaagcttcgtgcccttgcaaatggtattgaagaggtccacagaggctgcaccatctccaatgtggtgtccagctccactggcgctgcctctggcatcatgtcccttgctggtcttgttttggcaccatttacagcagggacgagtctggcccttactgcagctggggtagggctgggagcagcgtctgctgtgactgggatcaccaccagcatcgtggagcactcatacacatcatcagcagaagctgaagccagcaggctgactgcaaccagcattgaccgattgaaggtatttaaggaagttatgcgtgacatcacacccaacttactttcccttcttaataattattacgaagccacacaaaccattgggagtgaaatccgtgccatcaggcaagccagagccagggcccgactccctgtgaccacctggcgaatctcagctggaagtggtggtcaagcagagagaacgattgcaggcaccacccgggcagtgagcagaggagcccggatcctgagtgcgaccacttcaggcatcttccttgcactggatgtggtcaaccttgtatacgagtcaaagcacttgcatgagggggcaaagtctgcatctgctgaggagctgaggcggcaggctcaggagctggaggagaatctaatggagctcactcagatctatcagcgtctgaatccatgccatacccactgaccccagaccagtgcagccagcaggggaggtgagccatacacaggccacgacaaaatgcaggcattttattagggggataaagagggcaaggtaaagtttatggagctgagtgttagtgactttggcatttctgtagctgagcacagcaggggaggggttaatgcagatggcaagtgcaccaaggagaaggcaggaatgctggagcctggaataagggaggagaggggactggagagtgtggggaataggaagaagaaatttcctttagactaacgaatatattggggggaggaatagaggggaggtgtgcaggaaccagcaatgagaaggccaggaaaagaaagagctgaaaatgcagaaagccgaagagttagaacttttggatacagcagaagaaacagcggctccactaccgacctgcccccggttcgatgtccttccaagaatgaagtctttccctggtgatggtcccctgccctgtctttccagcatccactctgtcttgtcctcctggaagtgtatctcagtcagccagtggcttcttgatgatggcggtggaggtggtggttgtagtgtgatggatcccctttaggttatttaggggtatatgtcccctgcttgaaccctgaaggccaggtaatgagccatggccattgtccccagctgaggaccaggtgtctctaaaaacccaaacatcctggagagtatgcgagaacctaccaagaaaaacagtctcattactcatatacagcaggcaaagagacagaaaattaactgaaaagcagtttagagactgggggaggccggatctctagagccatcctgctgagtgccctgtgtgtaagtcctaataaactcacctactcaccaa

SEQ ID NO: 1313 - protein, 331 aa, Homo sapiens; identical to SEQ ID NO: 1309

SEQ ID NO: 1314 - DNA, 2118 bp, Homo sapiens
agcaggagggtgggaccaagggtgctgctggaccaaggatgggactgggccaagggtggggctgggaagcatcctgttttgcatgtttgatcaggagctgctgccaagttgtgactttcactttcccttttgggttccagggtatatctcagagcctggagaacgtgtctggttattatgcagatgcacggctggaggtgggatccacacagctcagaacagctggatcttgctcacactctttcaagagaagcttccttgaaaagaaacgctttactgaagaggccaccaaatacttccgggagagagtcagcccagtgcatctgcaaatcctgctgactaacaatgaagcctggaagagattcgtgactgcggctgaattgcccagggatgaggcagatgctctctacgaagctctgaagaagcttagaacatatgcagctattgaggacgaatatgtgcagcagaaagatgagcagtttagggaatggtttttgaaagagtttccccaagtcaagaggaagatccaggagtccatagaaaagcttcgtgcccttgcaaatggtattgaagaggtccacagaggctgcaccatctccaatgtggtgtccagctccactggcgctgcctctggcatcatgtcccttgctggtcttgttttggcaccatttacagcagggacgagtctggcccttactgcagctggggtagggctgggagcagcgtctgctgtgactgggatcaccaccagcatcgtggagcactcatacacatcatcagcagaagctgaagccagcaggctgactgcaaccagcattgaccgattgaaggtatttaaggaagttatgcgtgacatcacacccaacttactttcccttcttaataattattacgaagccacacaaaccattgggagtgaaatccgtgccatcaggcaagccagagccagggcccgactccctgtgaccacctggcgaatctcagctggaagtggtggtcaagcagagagaacgattgcaggcaccacccgggcagtgagcagaggagcccggatcctgagtgcgaccacttcaggcatcttccttgcactggatgtggtcaaccttgtatacgagtcaaagcacttgcatgagggggcaaagtctgcatctgctgaggagctgaggcggcaggctcaggagctggaggagaatctaatggagctcactcagatctatcagcgtctgaatccatgccatacccactgaccccagaccagtgcagccagcaggggaggtgagccatacacaggccacgacaaaatgcaggcattttattagggggataaagagggcaaggtaaagtttatggagctgagtgttagtgactttggcatttctgtagctgagcacagcaggggaggggttaatgcagatggcaagtgcaccaaggagaaggcaggaatgctggagcctggaataagggaggagaggggactggagagtgtggggaataggaagaagaaatttcctttagactaacgaatatattggggggaggaatagaggggaggtgtgcaggaaccagcaatgagaaggccaggaaaagaaagagctgaaaatgcagaaagccgaagagttagaacttttggatacagcagaagaaacagcggctccactaccgacctgcccccggttcgatgtccttccaagaatgaagtctttccctggtgatggtcccctgccctgtctttccagcatccactctgtcttgtcctcctggaagtgtatctcagtcagccagtggcttcttgatgatggcggtggaggtggtggttgtagtgtgatggatcccctttaggttatttaggggtatatgtcccctgcttgaaccctgaaggccaggtaatgagccatggccattgtccccagctgaggaccaggtgtctctaaaaacccaaacatcctggagagtatgcgagaacctaccaagaaaaacagtctcattactcatatacagcaggcaaagagacagaaaattaactgaaaagcagtttagagactgggggaggccggatctctagagccatcctgctgagtgccctgtgtgtaagtcctaataaactcacctactcaccaa

SEQ ID NO: 1315 - protein, 402 aa, Homo sapiens
MGLGQGWGWEASCFACLIRSCCQVVTFTFPFGFQGISQSLENVSGYYADARLEVGSTQLRTAGSCSHSFKRSFLEKKRFTEEATKYFRERVSPVHLQILLTNNEAWKRFVTAAELPRDEADALYEALKKLRTYAAIEDEYVQQKDEQFREWFLKEFPQVKRKIQESIEKLRALANGIEEVHRGCTISNVVSSSTGAASGIMSLAGLVLAPFTAGTSLALTAAGVGLGAASAVTGITTSIVEHSYTSSAEAEASRLTATSIDRLKVFKEVMRDITPNLLSLLNNYYEATQTIGSEIRAIRQARARARLPVTTWRISAGSGGQAERTIAGTTRAVSRGARILSATTSGIFLALDVVNLVYESKHLHEGAKSASAEELRRQAQELEENLMELTQIYQRLNPCHTH

SEQ ID NO: 1316 - DNA, 3627 bp, Homo sapiens
actctggggaaaggagggtacaaccacatgtaaattttattataatgatggtataatgaacttggggtgacctgagggcatgtttttgtgttactgggcatgtgcccctttaggagacttccacctgtgccttactttctctttctttgggatgtgctggccacagactttaccaaaaactccatccattaggatggcattaggacggttctggggctaaacttaggtgggccaggggctgtttcactgtcagcctttctactctcttttcttacccactcctagctgctaatgtctatttaactacctaatatttccccctttagagaaaaaaagccaaatttttgggtagatcggtgacaattaatctggctacttcctgctgacaagaggcagtggtaataattgggttctcttttttgctctcttgtagctggtaggttgggcagagaaaagtggtggccatccaaggggcccacgtagatatcagacatggttgagacctcgcggtaaccttgtgtagaatcatttggagttttatggattctaggtgggaagaaacaaaacaaccttgtaaatcaaatgagcatcgtttgaaagctataagttgtataaagctgttttaggaccaagaaagggggctaaccaggaaaaccaggaccagttgttaaatttccaccagtcaaagcctcctgaaactctgttttccattaacttgttggccctgtctgtaatttttttaagttggtttgcactttacctgattggttgatgaaaacagcaatgtttatcaagtgttgcacaagctcccccttgattggctgtgagcaaattaaaagctcatcaatttcataagactatgcttgctaatgaagcaatttgttctgaaagggtattgacctggttagttagattaataatttgttgagtaatttttaagaagagtttctgggcagtaaaaatggagttaaggaggtcctccagttcccgtgccaataccagccagaacgccaattatagtcagtgctgttaaaactcctctttcagttttaccagattgagcgtgtatagggaggggaatgctatcgataagagtgagtttggggatgatgtaaactagggccaaatccccgtttaattagcagacaagcagagatatgccttgtttctatacaaaaatgtgatttgtcatgttaagacaaatatcaacagtgatactaaagtagggtttttccatgctgtgtaagtctgctttaataccctcagaagtggaagtcaaggctagttcatgtaatgggggaacacaggcagtacttgacagaatgaaagaggaatcaaaagcccaattagaggaaggagtgatgggatcccaaccaatattgtgaaattatggggagctgcagttttttgcaatgattttgcccgaagttgtgagactgaaaccagaagttgttatgtttaaaatgatattctggtgtgggtctggggaaaagggtagatccagaatagctggcttctttccacatagtggttctgttggggggcttgggaaatgaataaaacacaaagaagaattagaatatcaggtgaaggtagcaggtgctcctggcagaagaacccacataaggaagtgtccagaagccacacagggtatatctcagagcctggagaacgtgtctggttattatgcagatgcacggctggaggtgggatccacacagctcagaacagctggatcttgctcacactctttcaagagaagcttccttgaaaagaaacgctttactgaagaggccaccaaatacttccgggagagagtcagcccagtgcatctgcaaatcctgctgactaacaatgaagcctggaagagattcgtgactgcggctgaattgcccagggatgaggcagatgctctctacgaagctctgaagaagcttagaacatatgcagctattgaggacgaatatgtgcagcagaaagatgagcagtttagggaatggtttttgaaagagtttccccaagtcaagaggaagatccaggagtccatagaaaagcttcgtgcccttgcaaatggtattgaagaggtccacagaggctgcaccatctccaatgtggtgtccagctccactggcgctgcctctggcatcatgtcccttgctggtcttgttttggcaccatttacagcagggacgagtctggcccttactgcagctggggtagggctgggagcagcgtctgctgtgactgggatcaccaccagcatcgtggagcactcatacacatcatcagcagaagctgaagccagcaggctgactgcaaccagcattgaccgattgaaggtatttaaggaagttatgcgtgacatcacacccaacttactttcccttcttaataattattacgaagccacacaaaccattgggagtgaaatccgtgccatcaggcaagccagagccagggcccgactccctgtgaccacctggcgaatctcagctggaagtggtggtcaagcagagagaacgattgcaggcaccacccgggcagtgagcagaggagcccggatcctgagtgcgaccacttcaggcatcttccttgcactggatgtggtcaaccttgtatacgagtcaaagcacttgcatgagggggcaaagtctgcatctgctgaggagctgaggcggcaggctcaggagctggaggagaatctaatggagctcactcagatctatcagcgtctgaatccatgccatacccactgaccccagaccagtgcagccagcaggggaggtgagccatacacaggccacgacaaaatgcaggcattttattagggggataaagagggcaaggtaaagtttatggagctgagtgttagtgactttggcatttctgtagctgagcacagcaggggaggggttaatgcagatggcaagtgcaccaaggagaaggcaggaatgctggagcctggaataagggaggagaggggactggagagtgtggggaataggaagaagaaatttcctttagactaacgaatatattggggggaggaatagaggggaggtgtgcaggaaccagcaatgagaaggccaggaaaagaaagagctgaaaatgcagaaagccgaagagttagaacttttggatacagcagaagaaacagcggctccactaccgacctgcccccggttcgatgtccttccaagaatgaagtctttccctggtgatggtcccctgccctgtctttccagcatccactctgtcttgtcctcctggaagtgtatctcagtcagccagtggcttcttgatgatggcggtggaggtggtggttgtagtgtgatggatcccctttaggttatttaggggtatatgtcccctgcttgaaccctgaaggccaggtaatgagccatggccattgtccccagctgaggaccaggtgtctctaaaaacccaaacatcctggagagtatgcgagaacctaccaagaaaaacagtctcattactcatatacagcaggcaaagagacagaaaattaactgaaaagcagtttagagactgggggaggccggatctctagagccatcctgctgagtgccctgtgtgtaagtcctaataaactcacctactcaccaa

SEQ ID NO: 1317 - protein, 202 aa, Homo sapiens
MSLAGLVLAPFTAGTSLALTAAGVGLGAASAVTGITTSIVEHSYTSSAEAEASRLTATSIDRLKVFKEVMRDITPNLLSLLNNYYEATQTIGSEIRAIRQARARARLPVTTWRISAGSGGQAERTIAGTTRAVSRGARILSATTSGIFLALDVVNLVYESKHLHEGAKSASAEELRRQAQELEENLMELTQIYQRLNPCHTH

SEQ ID NO: 1318 - DNA, 3564 bp, Homo sapiens
actctggggaaaggagggtacaaccacatgtaaattttattataatgatggtataatgaacttggggtgacctgagggcatgtttttgtgttactgggcatgtgcccctttaggagacttccacctgtgccttactttctctttctttgggatgtgctggccacagactttaccaaaaactccatccattaggatggcattaggacggttctggggctaaacttaggtgggccaggggctgtttcactgtcagcctttctactctcttttcttacccactcctagctgctaatgtctatttaactacctaatatttccccctttagagaaaaaaagccaaatttttgggtagatcggtgacaattaatctggctacttcctgctgacaagaggcagtggtaataattgggttctcttttttgctctcttgtagctggtaggttgggcagagaaaagtggtggccatccaaggggcccacgtagatatcagacatggttgagacctcgcggtaaccttgtgtagaatcatttggagttttatggattctaggtgggaagaaacaaaacaaccttgtaaatcaaatgagcatcgtttgaaagctataagttgtataaagctgttttaggaccaagaaagggggctaaccaggaaaaccaggaccagttgttaaatttccaccagtcaaagcctcctgaaactctgttttccattaacttgttggccctgtctgtaatttttttaagttggtttgcactttacctgattggttgatgaaaacagcaatgtttatcaagtgttgcacaagctcccccttgattggctgtgagcaaattaaaagctcatcaatttcataagactatgcttgctaatgaagcaatttgttctgaaagggtattgacctggttagttagattaataatttgttgagtaatttttaagaagagtttctgggcagtaaaaatggagttaaggaggtcctccagttcccgtgccaataccagccagaacgccaattatagtcagtgctgttaaaactcctctttcagttttaccagattgagcgtgtatagggaggggaatgctatcgataagagtgagtttggggatgatgtaaactagggccaaatccccgtttaattagcagacaagcagagatatgccttgtttctatacaaaaatgtgatttgtcatgttaagacaaatatcaacagtgatactaaagtagggtttttccatgctgtgtaagtctgctttaataccctcagaagtggaagtcaaggctagttcatgtaatgggggaacacaggcagtacttgacagaatgaaagaggaatcaaaagcccaattagaggaaggagtgatgggatcccaaccaatattgtgaaattatggggagctgcagttttttgcaatgattttgcccgaagttgtgagactgaaaccagaagttgttatgtttaaaatgatattctggtgtgggtctggggaaaagggtagatccagaatagctggcttctttccacatagtggttctgttggggggcttgggaaatgaataaaacacaaagaagaattagaatatcagggtatatctcagagcctggagaacgtgtctggttattatgcagatgcacggctggaggtgggatccacacagctcagaacagctggatcttgctcacactctttcaagagaagcttccttgaaaagaaacgctttactgaagaggccaccaaatacttccgggagagagtcagcccagtgcatctgcaaatcctgctgactaacaatgaagcctggaagagattcgtgactgcggctgaattgcccagggatgaggcagatgctctctacgaagctctgaagaagcttagaacatatgcagctattgaggacgaatatgtgcagcagaaagatgagcagtttagggaatggtttttgaaagagtttccccaagtcaagaggaagatccaggagtccatagaaaagcttcgtgcccttgcaaatggtattgaagaggtccacagaggctgcaccatctccaatgtggtgtccagctccactggcgctgcctctggcatcatgtcccttgctggtcttgttttggcaccatttacagcagggacgagtctggcccttactgcagctggggtagggctgggagcagcgtctgctgtgactgggatcaccaccagcatcgtggagcactcatacacatcatcagcagaagctgaagccagcaggctgactgcaaccagcattgaccgattgaaggtatttaaggaagttatgcgtgacatcacacccaacttactttcccttcttaataattattacgaagccacacaaaccattgggagtgaaatccgtgccatcaggcaagccagagccagggcccgactccctgtgaccacctggcgaatctcagctggaagtggtggtcaagcagagagaacgattgcaggcaccacccgggcagtgagcagaggagcccggatcctgagtgcgaccacttcaggcatcttccttgcactggatgtggtcaaccttgtatacgagtcaaagcacttgcatgagggggcaaagtctgcatctgctgaggagctgaggcggcaggctcaggagctggaggagaatctaatggagctcactcagatctatcagcgtctgaatccatgccatacccactgaccccagaccagtgcagccagcaggggaggtgagccatacacaggccacgacaaaatgcaggcattttattagggggataaagagggcaaggtaaagtttatggagctgagtgttagtgactttggcatttctgtagctgagcacagcaggggaggggttaatgcagatggcaagtgcaccaaggagaaggcaggaatgctggagcctggaataagggaggagaggggactggagagtgtggggaataggaagaagaaatttcctttagactaacgaatatattggggggaggaatagaggggaggtgtgcaggaaccagcaatgagaaggccaggaaaagaaagagctgaaaatgcagaaagccgaagagttagaacttttggatacagcagaagaaacagcggctccactaccgacctgcccccggttcgatgtccttccaagaatgaagtctttccctggtgatggtcccctgccctgtctttccagcatccactctgtcttgtcctcctggaagtgtatctcagtcagccagtggcttcttgatgatggcggtggaggtggtggttgtagtgtgatggatcccctttaggttatttaggggtatatgtcccctgcttgaaccctgaaggccaggtaatgagccatggccattgtccccagctgaggaccaggtgtctctaaaaacccaaacatcctggagagtatgcgagaacctaccaagaaaaacagtctcattactcatatacagcaggcaaagagacagaaaattaactgaaaagcagtttagagactgggggaggccggatctctagagccatcctgctgagtgccctgtgtgtaagtcctaataaactcacctactcaccaa

SEQ ID NO: 1319 - protein, 202 aa, Homo sapiens; identical to SEQ ID NO: 1317

SEQ ID NO: 1320 - DNA, 3373 bp, Homo sapiens
ggtggcaacttctcctcctgcggccgggagcggcctgcctgcctccctgcgcacccgcagcctcccccgctgcctccctagggctcccctccggccgccagcgcccatttttcattccctagatagagatactttgcgcgcacacacatacatacgcgcgcaaaaaggaaaaaaaaaaaaaaaagcccaccctccagcctcgctgcaaagagaaaaccggagcagccgcagctcgcagctcgcagctcgcagcccgcagcccgcagaggacgcccagagcggcgagcaggcgggcagacggaccgacggactcgcgccgcgtccacctgtcggccgggcccagccgagcgcgcagcgggcacgccgcgcgcgcggagcagccgtgcccgccgcccgggcccgccgccagggcgcacacgctcccgcccccctacccggcccgggcgggagtttgcacctctccctgcccgggtgctcgagctgccgttgcaaagccaactttggaaaaagttttttgggggagacttgggccttgaggtgcccagctccgcgctttccgattttgggggcctttccagaaaatgttgcaaaaaagctaagccggcgggcagaggaaaacgcctgtagccggcgagtgaagacgaaccatcgactgccgtgttccttttcctcttggaggttggagtcccctgggcgcccccacacggctagacgcctcggctggttcgcgacgcagccccccggccgtggatgctgcactcgggctcgggatccgcccaggtagccggcctcggacccaggtcctgcgcccaggtcctcccctgccccccagcgacggagccggggccgggggcggcggcgccgggggcatgcgggtgagccgcggctgcagaggcctgagcgcctgatcgccgcggacctgagccgagcccacccccctccccagccccccaccctggccgcgggggcggcgcgctcgatctacgcgtccggggccccgcggggccgggcccggagtcggcatgaatcgctgctgggcgctcttcctgtctctctgctgctacctgcgtctggtcagcgccgagggggaccccattcccgaggagctttatgagatgctgagtgaccactcgatccgctcctttgatgatctccaacgcctgctgcacggagaccccggagaggaagatggggccgagttggacctgaacatgacccgctcccactctggaggcgagctggagagcttggctcgtggaagaaggagcctgggttccctgaccattgctgagccggccatgatcgccgagtgcaagacgcgcaccgaggtgttcgagatctcccggcgcctcatagaccgcaccaacgccaacttcctggtgtggccgccctgtgtggaggtgcagcgctgctccggctgctgcaacaaccgcaacgtgcagtgccgccccacccaggtgcagctgcgacctgtccaggtgagaaagatcgagattgtgcggaagaagccaatctttaagaaggccacggtgacgctggaagaccacctggcatgcaagtgtgagacagtggcagctgcacggcctgtgacccgaagcccggggggttcccaggagcagcgagccaaaacgccccaaactcgggtgaccattcggacggtgcgagtccgccggccccccaagggcaagcaccggaaattcaagcacacgcatgacaagacggcactgaaggagacccttggagcctaggggcatcggcaggagagtgtgtgggcagggttatttaatatggtatttgctgtattgcccccatggggtccttggagtgataatattgtttccctcgtccgtctgtctcgatgcctgattcggacggccaatggtgcttcccccacccctccacgtgtccgtccacccttccatcagcgggtctcctcccagcggcctccggtcttgcccagcagctcaaagaagaaaaagaaggactgaactccatcgccatcttcttcccttaactccaagaacttgggataagagtgtgagagagactgatggggtcgctctttgggggaaacgggttccttcccctgcacctggcctgggccacacctgagcgctgtggactgtcctgaggagccctgaggacctctcagcatagcctgcctgatccctgaacccctggccagctctgaggggaggcacctccaggcaggccaggctgcctcggactccatggctaagaccacagacgggcacacagactggagaaaacccctcccacggtgcccaaacaccagtcacctcgtctccctggtgcctctgtgcacagtggcttcttttcgttttcgttttgaagacgtggactcctcttggtgggtgtggccagcacaccaagtggctgggtgccctctcaggtgggttagagatggagtttgctgttgaggtggtgtagatggtgacctgggtatcccctgcctcctgccaccccttcctccccatactccactctgattcacctcttcctctggttcctttcatctctctacctccaccctgcattttcctcttgtcctggcccttcagtctgctccaccaaggggctcttgaaccccttattaaggccccagatgaccccagtcactcctctctagggcagaagactagaggccagggcagcaagggacctgctcatcatattccaacccagccacgactgccatgtaaggttgtgcagggtgtgtactgcacaaggacattgtatgcagggagcactgttcacatcatagataaagctgatttgtatatttattatgacaatttctggcagatgtaggtaaagaggaaaaggatccttttcctaattcacacaaagactccttgtggactggctgtgcccctgatgcagcctgtggctggagtggccaaataggagggagactgtggtaggggcagggaggcaacactgctgtccacatgacctccatttcccaaagtcctctgctccagcaactgcccttccaggtgggtgtgggacacctgggagaaggtctccaagggagggtgcagccctcttgcccgcacccctccctgcttgcacacttccccatctttgatccttctgagctccacctctggtggctcctcctaggaaaccagctcgtgggctgggaatgggggagagaagggaaaagatccccaagaccccctggggtgggatctgagctcccacctcccttcccacctactgcactttcccccttcccgccttccaaaacctgcttccttcagtttgtaaagtcggtgattatatttttgggggctttccttttattttttaaatgtaaaatttatttatattccgtatttaaagttgt

SEQ ID NO: 1321 - protein, 241 aa, Homo sapiens
MNRCWALFLSLCCYLRLVSAEGDPIPEELYEMLSDHSIRSFDDLQRLLHGDPGEEDGAELDLNMTRSHSGGELESLARGRRSLGSLTIAEPAMIAECKTRTEVFEISRRLIDRTNANFLVWPPCVEVQRCSGCCNNRNVQCRPTQVQLRPVQVRKIEIVRKKPIFKKATVTLEDHLACKCETVAAARPVTRSPGGSQEQRAKTPQTRVTIRTVRVRRPPKGKHRKFKHTHDKTALKETLGA

SEQ ID NO: 1322 - DNA, 2378 bp, Homo sapiens
gtgtgtgtgtgtgtgcgcgcgcatctgagagagagagagagagagagagactgactgagcaggaatggtgagatgtttatcatgggcctcggggaccccattcccgaggagctttatgagatgctgagtgaccactcgatccgctcctttgatgatctccaacgcctgctgcacggagaccccggagaggaagatggggccgagttggacctgaacatgacccgctcccactctggaggcgagctggagagcttggctcgtggaagaaggagcctgggttccctgaccattgctgagccggccatgatcgccgagtgcaagacgcgcaccgaggtgttcgagatctcccggcgcctcatagaccgcaccaacgccaacttcctggtgtggccgccctgtgtggaggtgcagcgctgctccggctgctgcaacaaccgcaacgtgcagtgccgccccacccaggtgcagctgcgacctgtccaggtgagaaagatcgagattgtgcggaagaagccaatctttaagaaggccacggtgacgctggaagaccacctggcatgcaagtgtgagacagtggcagctgcacggcctgtgacccgaagcccggggggttcccaggagcagcgagccaaaacgccccaaactcgggtgaccattcggacggtgcgagtccgccggccccccaagggcaagcaccggaaattcaagcacacgcatgacaagacggcactgaaggagacccttggagcctaggggcatcggcaggagagtgtgtgggcagggttatttaatatggtatttgctgtattgcccccatggggtccttggagtgataatattgtttccctcgtccgtctgtctcgatgcctgattcggacggccaatggtgcttcccccacccctccacgtgtccgtccacccttccatcagcgggtctcctcccagcggcctccggtcttgcccagcagctcaaagaagaaaaagaaggactgaactccatcgccatcttcttcccttaactccaagaacttgggataagagtgtgagagagactgatggggtcgctctttgggggaaacgggttccttcccctgcacctggcctgggccacacctgagcgctgtggactgtcctgaggagccctgaggacctctcagcatagcctgcctgatccctgaacccctggccagctctgaggggaggcacctccaggcaggccaggctgcctcggactccatggctaagaccacagacgggcacacagactggagaaaacccctcccacggtgcccaaacaccagtcacctcgtctccctggtgcctctgtgcacagtggcttcttttcgttttcgttttgaagacgtggactcctcttggtgggtgtggccagcacaccaagtggctgggtgccctctcaggtgggttagagatggagtttgctgttgaggtggtgtagatggtgacctgggtatcccctgcctcctgccaccccttcctccccatactccactctgattcacctcttcctctggttcctttcatctctctacctccaccctgcattttcctcttgtcctggcccttcagtctgctccaccaaggggctcttgaaccccttattaaggccccagatgaccccagtcactcctctctagggcagaagactagaggccagggcagcaagggacctgctcatcatattccaacccagccacgactgccatgtaaggttgtgcagggtgtgtactgcacaaggacattgtatgcagggagcactgttcacatcatagataaagctgatttgtatatttattatgacaatttctggcagatgtaggtaaagaggaaaaggatccttttcctaattcacacaaagactccttgtggactggctgtgcccctgatgcagcctgtggctggagtggccaaataggagggagactgtggtaggggcagggaggcaacactgctgtccacatgacctccatttcccaaagtcctctgctccagcaactgcccttccaggtgggtgtgggacacctgggagaaggtctccaagggagggtgcagccctcttgcccgcacccctccctgcttgcacacttccccatctttgatccttctgagctccacctctggtggctcctcctaggaaaccagctcgtgggctgggaatgggggagagaagggaaaagatccccaagaccccctggggtgggatctgagctcccacctcccttcccacctactgcactttcccccttcccgccttccaaaacctgcttccttcagtttgtaaagtcggtgattatatttttgggggctttccttttattttttaaatgtaaaatttatttatattccgtatttaaagttgt

SEQ ID NO: 1323 - protein, 226 aa, Homo sapiens
MFIMGLGDPIPEELYEMLSDHSIRSFDDLQRLLHGDPGEEDGAELDLNMTRSHSGGELESLARGRRSLGSLTIAEPAMIAECKTRTEVFEISRRLIDRTNANFLVWPPCVEVQRCSGCCNNRNVQCRPTQVQLRPVQVRKIEIVRKKPIFKKATVTLEDHLACKCETVAAARPVTRSPGGSQEQRAKTPQTRVTIRTVRVRRPPKGKHRKFKHTHDKTALKETLGA

SEQ ID NO: 1324 - DNA, 1348 bp, Homo sapiens
ccagatttggctttatatagcggacccgtaaggccgaccggcctctaccggcgggatttgatggcgtgatgtctcacagaaagttctccgctcccagacatgggtccctcggcttcctgcctcggaagcgcagcagcaggcatcgtgggaaggtgaagagcttccctaaggatgacccgtccaagccggtccacctcacagccttcctgggatacaaggctggcatgactcacatcgtgcgggaagtcgacaggccgggatccaaggtgaacaagaaggaggtggtggaggctgtgaccattgtagagacaccacccatggtggttgtgggcattgtgggctacgtggaaacccctcgaggcctccggaccttcaagactgtctttgctgagcacatcagtgatgaatgcaagaggcgtttctataagaattggcataaatctaagaagaaggcctttaccaagtactgcaagaaatggcaggatgaggatggcaagaagcagctggagaaggacttcagcagcatgaagaagtactgccaagtcatccgtgtcattgcccacacccagatgcgcctgcttcctctgcgccagaagaaggcccacctgatggagatccaggtgaacggaggcactgtggccgagaagctggactgggcccgcgagaggcttgagcagcaggtacctgtgaaccaagtgtttgggcaggatgagatgatcgacgtcatcggggtgaccaagggcaaaggctacaaaggggtcaccagtcgttggcacaccaagaagctgccccgcaagacccaccgaggcctgcgcaaggtggcctgtattggggcatggcatcctgctcgtgtagccttctctgtggcacgcgctgggcagaaaggctaccatcaccgcactgagatcaacaagaagatttataagattggccagggctaccttatcaaggacggcaagctgatcaagaacaatgcctccactgactatgacctatctgacaagagcatcaaccctctgggtggctttgtccactatggtgaagtgaccaatgactttgtcatgctgaaaggctgtgtggtgggaaccaagaagcgggtgctcaccctccgcaagtccttgctggtgcagacgaagcggcgggctctggagaagattgaccttaagttcattgacaccacctccaagtttggccatggccgcttccagaccatggaggagaagaaagcattcatgggaccactgaagaaagaccgaattgcaaaggaagaaggagcttaatgccaggaacagattttgcagttggtggggtctcaataaaagttattttccactgacaaaaaaaaaaa

SEQ ID NO: 1325 - protein, 403 aa, Homo sapiens
MSHRKFSAPRHGSLGFLPRKRSSRHRGKVKSFPKDDPSKPVHLTAFLGYKAGMTHIVREVDRPGSKVNKKEVVEAVTIVETPPMVVVGIVGYVETPRGLRTFKTVFAEHISDECKRRFYKNWHKSKKKAFTKYCKKWQDEDGKKQLEKDFSSMKKYCQVIRVIAHTQMRLLPLRQKKAHLMEIQVNGGTVAEKLDWARERLEQQVPVNQVFGQDEMIDVIGVTKGKGYKGVTSRWHTKKLPRKTHRGLRKVACIGAWHPARVAFSVARAGQKGYHHRTEINKKIYKIGQGYLIKDGKLIKNNASTDYDLSDKSINPLGGFVHYGEVTNDFVMLKGCVVGTKKRVLTLRKSLLVQTKRRALEKIDLKFIDTTSKFGHGRFQTMEEKKAFMGPLKKDRIAKEEGA

SEQ ID NO: 1326 - DNA, 1201 bp, Homo sapiens
ccagatttggctttatatagcggacccgtaaggccgaccggcctctaccggcgggatttgatggcgtgatgtctcacagaaagttctccgctcccagacatgggtccctcggcttcctgcctcggaagcgcagcagcaggcatcgtgggaaggtgaagagcttccctaaggatgacccgtccaagccggtccacctcacagccttcctgggatacaaggctggcatgactcacatcgtgcgggaagtcgacaggccgggatccaaggtgaacaagaaggaggtggtggaggctgtgaccattgtagagacaccacccatggtggttgtgggcattgtgggctacgtggaaacccctcgaggcctccggaccttcaagactgtctttgctgagcacatcagtgatgaatgcaagaggcgtttctataagaattggcataaatctaagaagaaggcccacctgatggagatccaggtgaacggaggcactgtggccgagaagctggactgggcccgcgagaggcttgagcagcaggtacctgtgaaccaagtgtttgggcaggatgagatgatcgacgtcatcggggtgaccaagggcaaaggctacaaaggggtcaccagtcgttggcacaccaagaagctgccccgcaagacccaccgaggcctgcgcaaggtggcctgtattggggcatggcatcctgctcgtgtagccttctctgtggcacgcgctgggcagaaaggctaccatcaccgcactgagatcaacaagaagatttataagattggccagggctaccttatcaaggacggcaagctgatcaagaacaatgcctccactgactatgacctatctgacaagagcatcaaccctctgggtggctttgtccactatggtgaagtgaccaatgactttgtcatgctgaaaggctgtgtggtgggaaccaagaagcgggtgctcaccctccgcaagtccttgctggtgcagacgaagcggcgggctctggagaagattgaccttaagttcattgacaccacctccaagtttggccatggccgcttccagaccatggaggagaagaaagcattcatgggaccactgaagaaagaccgaattgcaaaggaagaaggagcttaatgccaggaacagattttgcagttggtggggtctcaataaaagttattttccactgacaaaaaaaaaaa

SEQ ID NO: 1327 - protein, 354 aa, Homo sapiens
MSHRKFSAPRHGSLGFLPRKRSSRHRGKVKSFPKDDPSKPVHLTAFLGYKAGMTHIVREVDRPGSKVNKKEVVEAVTIVETPPMVVVGIVGYVETPRGLRTFKTVFAEHISDECKRRFYKNWHKSKKKAHLMEIQVNGGTVAEKLDWARERLEQQVPVNQVFGQDEMIDVIGVTKGKGYKGVTSRWHTKKLPRKTHRGLRKVACIGAWHPARVAFSVARAGQKGYHHRTEINKKIYKIGQGYLIKDGKLIKNNASTDYDLSDKSINPLGGFVHYGEVTNDFVMLKGCVVGTKKRVLTLRKSLLVQTKRRALEKIDLKFIDTTSKFGHGRFQTMEEKKAFMGPLKKDRIAKEEGA

SEQ ID NO: 1328 - DNA, 93 bp, Homo sapiens
gctgttcagtgatgaggcctggaatgtgcgctgggcacagcgcccgagacagactgcggaaccgttccttgttgccttccttctgagaacagc

SEQ ID NO: 1329 - DNA, 95 bp, Homo sapiens
gctgttcgttgatgaggctcagagtgagcgctgggtacagcgcccgaatcggacagtgtagaaccattctctactgccttccttctgagaacagc

SEQ ID NO: 1330 - DNA, 55 bp, Homo sapiens
ggggtgatgaaggcctgcacctggtcccctccccaactctgctctgctcctgaag

SEQ ID NO: 1331 - DNA, 62 bp, Homo sapiens
cacagatgatgaacttattgacgggcggacagaaactgtgtgctgattgtcacgttctgatt

SEQ ID NO: 1332 - DNA, 4068 bp, Homo sapiens
ggcagagcgcggcgcggggccggcggcgaaggtccggggtggaatcgacgtcgctgcggctgccgacgacccacacccggccggccgcctccgcagacccaccttggccgcgcggcagggggcgcgcagagccccgagggagcgagtccccgcgcgtggcagctcggcggcttctcccttcgggaggtccggctcccggctctccggacccgcctggcgtcctcgcctgcggcggggcggacgacagcggcgcccaggaatggcttcggcgggcagcggcatggaggaggtgcgcgtgtcggtgctgacccccttgaagctggtcgggctggtgtgcatcttcctggcgctgtgtctggacctgggggcggtgctgagcccggcctgggtcacagctgaccaccagtactacctgtcgttgtgggagtcctgccgcaaacccgccagcttggacatctggcactgcgagtccacgctcagcagcgattggcagattgctactctggctttactcctgggcggcgctgccatcattctcattgcattcctggtgggtttgatttctatctgcgtgggatctcgaaggcgtttctatagacctgttgcggtcatgctttttgcagcagttgttttacaggtttgcagcctggtcctttacccaatcaagttcattgaaactgtgagcttgaaaatttaccatgagttcaactggggttatggcctggcctggggtgcaactatattttcgtttgggggtgccatcctttattgcctgaaccctaagaactatgaagactactactagaaccaatagtctcaaagtaaaaacaaccaccaccatccaacaaaaggattacgtctgcatcttttctaacttactattttctaaaacacttgtggagcatcaagcagtttgctcagttgatttaatcttttttgccttttggctgtcaacatcataaccagcttttacatccattttagaaatctgcacaaattaagagagctgattagacataggcaaatgctgcaaacttccaatatgttcatatcgtttttcttgacaaatgaagggtctatatgacagcaaccattgtgagaaactagttggaatgagatttgcctcaatctcctattgcctgcaggggagcagttggcataagcaacatttagaagttcctttgcgctgacaaggattccactgttagagcccttaccgcctgcttatcctacccaatgactacattggctgttggttatttgcttgagtgagcccttgaaaaatgaactgcccttcagcatctaatgggagttgtgaatgtaactggttaatgatacacattccaccttcaggaacactctttttaatgggaggttatgctttggcaatcagcgtctccctgggaagagagtcaagacttggagacatgtgcttctcattatgtggttagaaattggtgcctcagccctatctagactggggaaaaattgaggatctctgtttttcctggggcaaacagaaagaaatctgcatgagttgcttttgtaccctttaaatcatttgccaaacattgcagcaaacaagtgtgcgtatgtaacaagcttcactgtttttatagaaggtgaaccattagtataaatggtaataagttgttccctaaccctccacatacatttgcctatcacacgtaaaattaatatttactctagtgaagtggtttgagcactaaccttgtacacattgttaagaggcttagattggtattcatacttatttaccatacaaaagtatggtaccttaaagcttttgctctatgttctttactgtttcactggaaagtgtcaatagagttgcctaagaataaaaattgaaatggtgttaatctgaaaattaatgattctctgtaagcactgtagttgaaaagagagtagcaattaggatgatcattttgtgtaaaattcattaaaatagaaggctgctattttttgcaagtattttaaatgtcttcatttttttaagaaaggaatagcgatagatttatataaatatctaaatgtctcagtagaggagtagaattcatctggttatcacctggtcctctgaagttaactgatgggctaaccgatttgtgcacacacttaggatggatttatgttaagggaattacttactgactgttcaatggaaggaagtattaataatagggaataagtttgcaactaatctcatgctgcaaacttgtgttaattctgtttaatatacaaatttggatagcttaattataaacatatttttatatcaaatatacagttctaatataaaagttataaataattatttttgttaacaaagacactaaaacagtatgttctggttttggccctcttgcagaaagaagcattagaaaaattactttaaaagtagctatatgttactgtattgcaaaatctgttaagagcaggaccacatcgatagtatttaataatttgttttacctcccaaaacacagttcttctttcagcttgtcttaagaatggttgccaaaaacaacagccaaaaaaaaaaaacctattttattatccaaatgctagaaaacacacatgaattttctataaaatcacgaatatgaagtaccaggtttagtcttactttagcaatgatagacaaaagcgaataaatacatcacagacagaaacctttataaaaatatatgattctataaagaatcattagaaattatgagtggaaattctccagaaagatagtattatagagtcttttgaagcaattttttgagaaatagtaaaatctggggcagagtgtcttgcagttaattgcatattgtcagagcagcatgagaaatatgatatttggatagggatttcagcaactaaacattctctgttctgagatctctttattcctgaataatgaaagaatagtactttggtgctgacaccaatgaggcacttctcttggtcctagtagaggatgcagtgtactgttaaaccaatatcatcacatctcgagtcttatcaagttttcattctctgtcaatatgacaagctcaaagtgacagaatatgttataggttgaagcacacatatttgcagtttactgaaaagtagatttcttatgtgacttttttcccttctcagcaaagagccctacactagatttctaccatcactaatatttggaagtatttcattactaacaatctcagtacaacatgaaaattgttgcttctcatctaaaatacaattttgtctatcagaataaacacaagtgaaattttcacctacattaacattatgtctttgcagctttaggtttgttagatgtgttcttaagcataatttttagccacaaacccattgttagatagatatctatggatatagatctacatctatagatatagatatacacacatatatatactcacacacatatagcataaaatactcagcagggctagttattccgatttcttgcacaattatttagctttttgtaagttcaacatgtaaattttaaagacataaatatagagagacttatgtgtttgaatataaatgatatatatggattagcatgtacctgtatattattaaacatgcaatgaactgactggtaagtgacgtctaattgtatggctagcaatgtaatttattcagactgtatttttgtacagagcagtgcactctaacctatgcctctgtgtcctctttaatgcctaaagctgtgcctagaaatttcatctgtcttaaaagtaaaatatacttcatgctgtttatgctattagtttctgtactgctattctatatttattatttttaaatatatgacatgtttactacttaaacatgaattcatggtatcctggttattttttttaagtcatctgggggaaaacctgtttatcactccagtgattttgagtttgcagtttcacaatcagttcttcatttcatgatttttgtagttgacatgaagtcatctatgtggaaaaaaataaaaataaaagtgatttcacggatgtggtttgaaaaaaaaaaaaaaaa

SEQ ID NO: 1333 - protein, 181 aa, Homo sapiens
MASAGSGMEEVRVSVLTPLKLVGLVCIFLALCLDLGAVLSPAWVTADHQYYLSLWESCRKPASLDIWHCESTLSSDWQIATLALLLGGAAIILIAFLVGLISICVGSRRRFYRPVAVMLFAAVVLQVCSLVLYPIKFIETVSLKIYHEFNWGYGLAWGATIFSFGGAILYCLNPKNYEDYY

SEQ ID NO: 1334 - DNA, 1813 bp, Homo sapiens
cccctcccgcgcgcccgcccgccgcctgccgccgccgccgccgccgccggagctctgtagtatggcatcgaggagaatggagaccaaacctgtgataacctgtctcaaaaccctcctcatcatctactccttcgtcttctggatcactggggtgatcctgctggctgttggagtctggggcaaacttactctgggcacctatatctcccttattgccgagaactccacaaatgctccctatgtgctcatcggaactggcaccactattgttgtctttggcctgtttggatgctttgctacatgtcgtggtagcccatggatgctgaaactgtatgccatgtttctgtccctggtgttcctggctgagctcgtagctggcatttcagggtttgtgtttcgtcatgagatcaaggacaccttcctgaggacttacacggacgctatgcagacttacaatggcaatgatgagaggagccgggcagtggaccatgtgcagcgcagcctgagctgctgtggtgtgcagaactacaccaactggagcaccagcccctacttcctggagcatggcatcccccccagctgctgcatgaacgaaactgattgtaatccccaggatctacacaatctgactgtggccgccaccaaagttaaccagaagggttgttatgatctggtaactagtttcatggagactaacatgggaatcatcgctggagtggcgtttggaatcgcattctcccagttaattggcatgctgctggcctgctgtctgtcccggttcatcacggccaatcagtatgagatggtgtaaggagaagtctttcaagaatgacggaataagagacctgttttaaaaaggaactgcagcaatctttgaaagacttccaaagaatgttagagcacagtacataatacacttgccctgctccctctaccccttaccccacaacgtgcaactgacactcccacccagtctctgctccacctttcagcccacgtcacgtgtagtgtccattttgtgaagccctgttgtgccacagagtgtagccaggtccccctgcagctagtcctagtgaacctcaccccgaggccctgcatgggccagcccctccatctgtacttggtccaactgcaactcatcatcggtgactggttatcacaccatcgctggcccctttgggccctgcatgtagtgtgggaggctcctgttagctcctcactgtggtaaatgccacacacctttaagtagataagcagacgatagttatctgttcttttgacttaatctcatttggtttgattttccctctactaaggctttcctaccttcttcaggctgcctaagacatgtaacgaaacacttcaataattgtccatgaggagaaaaaaagcatgtgtcatgcatgaaggaaactgaacttgaggtggcctccttgcttgttacatacctgggtatgtgtaggcagtttagtgcatctttgcctctcagttgaaacctgtataaccctgttacaaagctgtgttgttgcttcttgtgaaggccatgatattttgtttttccccaattaattgctattgtgttattttactacttctctctgtattttttcttgcattgacattatagacattgaggacctcatccaaacaatttaaaaatgagtgtgaagggggaacaagtcaaaatatttttaaaagatcttcaaaaataatgcctctgtctagcatgccaacaagaatgcattgatattgtgaacatttgtgatatatgtattaataaatagagcaattacaagcaaaaaaaaaaaaaaaa

SEQ ID NO: 1335 - protein, 249 aa, Homo sapiens
MASRRMETKPVITCLKTLLIIYSFVFWITGVILLAVGVWGKLTLGTYISLIAENSTNAPYVLIGTGTTIVVFGLFGCFATCRGSPWMLKLYAMFLSLVFLAELVAGISGFVFRHEIKDTFLRTYTDAMQTYNGNDERSRAVDHVQRSLSCCGVQNYTNWSTSPYFLEHGIPPSCCMNETDCNPQDLHNLTVAATKVNQKGCYDLVTSFMETNMGIIAGVAFGIAFSQLIGMLLACCLSRFITANQYEMV

SEQ ID NO: 1336 - DNA, 2454 bp, Homo sapiens
ggctcactctgcaaccaaggcacgtgcattctggtcatcccacgcggggagcgcgcgcaaggcccgcccagcccccacatgccagccccaccctccagtcggtccggacgccgacgcctttttgaccctcgctgtgcccggccctcctcatctggcctgcccagggcttggtgctggcggggtccagctgctccaatccctcctcctctgctctgccctgccctgccctggcctgccccggcgccctccctcagcccgggtatcaggcgagaggcggagctggcccggcgcgccccgcccccgctgtagaaagggccgggcgagtgttactcgcggtcatcccggcctgggccttttatctcggtgctgccgggggaggcgggaggaggagacaccaggggtggccctgagcgccggcgacacctttcctggactataaattgagcacctgggatgggtagggggccaacgcagtcaccgccgtccgcagtcacagtccagccactgaccgcagcagcgcccttgcgtagcagccgcttgcagcgagaacactgaattgccaacgagcaggagagtctcaaggcgcaagaggaggccagggctcgacccacagagcaccctcagccatcgcgagtttccgggcgccaaagccaggagaagccgcccatcccgcagggccggtctgccagcgagacgagagttggcgagggcggaggagtgccgggaatcccgccacaccggctatagccaggcccccagcgcgggccttggagagcgcgtgaaggcgggcatccccttgacccggccgaccatccccgtgcccctgcgtccctgcgctccaacgtccgcgcggccaccatgatgcaaatctgcgacacctacaaccagaagcactcgctctttaacgccatgaatcgcttcattggcgccgtgaacaacatggaccagacggtgatggtgcccagcttgctgcgcgacgtgcccctggctgaccccgggttagacaacgatgttggcgtggaggtaggcggcagtggcggctgcctggaggagcgcacgcccccagtccccgactcgggaagcgccaatggcagctttttcgcgccctctcgggacatgtacagccactacgtgcttctcaagtccatccgcaacgacatcgagtggggggtcctgcaccagccgcctccaccggctgggagcgaggagggcagtgcctggaagtccaaggacatcctggtggacctgggccacttggagggtgcggacgccggcgaagaagacctggaacagcagttccactaccacctgcgcgggctgcacactgtgctctcgaaactcacgcgcaaagccaacatcctcactaacagatacaagcaggagatcggcttcggcaattggggccactgaggcgtggcgcccgtggctgcccagcaccttcttcgacccatctcaccctctctcattcctcaaagctttttttttttttcctggctggggggcgggaagggcagactgcaaactggggggctgcgtacgtgcaggaggcgcggtggggctgcgtggaggagggggccacgtgtgagagagaagaaaatggtggccggagatgggagggcccaaggaacctcctgggagggggcctgcattctatgttggtgggaatgggactgggctgacgccctgcattcagcctgtgcctttcctggggtttcttttctgttcttttcggaggagagggcccgagaaggggccataccagggcgcggcgctgggttgccacacttgggaaagcagcccggagctgggtgctggggaaggcggggcgcgtagcctcccgccgccctgcggttgggccggtggaggcccaggcgttgctaggattgcatcagttttcctgtttgcactatttctttttgtaacattggccctgtgtgaagtatttcgaatctcctccttgctctgaaacttcagcgattccattgtgataagcgcacaaacagcactgtctgtcggtaatcggtactactttattaatgattttctgttacactgtatagtagtcctatggcacccccaccccatccctttcgtgccactcccgtccccacccccaccccagtgtgtataagctggcatttcgccagcttgtacgtagcttgccactcagtgaaaataataacattattatgagaaagtggacttaaccgaaatggaaccaactgacattctatcgtgttgtacatagaatgatgaagggttccactgttgttgtatgtcttaaatttatttaaaactttttttaatccagatgtagactatattctaaaaaataaaaaagcaaatgtgtcaactaaattggacaagcgtctggtcctcattaatctgccaatgaatggtttcgtcattaaataaaaatcaatttaattgatttactagcaaaaaaaaaaaaaa

SEQ ID NO: 1337 - protein, 183 aa, Homo sapiens
MMQICDTYNQKHSLFNAMNRFIGAVNNMDQTVMVPSLLRDVPLADPGLDNDVGVEVGGSGGCLEERTPPVPDSGSANGSFFAPSRDMYSHYVLLKSIRNDIEWGVLHQPPPPAGSEEGSAWKSKDILVDLGHLEGADAGEEDLEQQFHYHLRGLHTVLSKLTRKANILTNRYKQEIGFGNWGH

SEQ ID NO: 1338 - DNA, 3346 bp, Homo sapiens
gagtagacagcacagcggcagcggagggagtctatgcgagctggacagcagtgggaggtttgtgaggctcgcactggccgcagaccctcgggctcgatcgcccgggagccaggactcggcgacgcgaggctgccgggctacccggccgaggcttcgggggcgcaaactaatgggactggctcgctcggcagcatctccccgctcttctaagtacactgagcagggcccgcgctgaagtagaagctgtccgggggcgcgtagcccggagtcccagtgtggcccggaggaacggagcccgtgccagggcggcccagtcgggagcccggggaccgagcttgtgctgtggggaaacccccacttcttccaagggacagcgatcccgggacggtcgaggcgtcggggcggtcaccgagacctctgcgggaagaccccgtcggggagagggcgcgcagccccgaagcgtctcgggaagtcgagcggaatcgggcgggatcacccgggggcgcagagcccccgtcgcgcctcgtgcggcagcggagagcccaggagaacgagccctcgggggccgaagcccatgcccgggttgggggcggctgcccagtgagtcctcctggccggccgggcggagaagagcgacaccgaagccggcgggaggggagcacttcaaggccggcggctgcggaggatgggcgcctgagcggctccgagcgcagcgcggcagaggaaggcgaggcgagctttggtgaggaggcgccaagggatcccgaagtgcagtctgcccccgggaagatggctcggcctgggcagcgttggctcggcaagtggcttgtggcgatggtcgtgtgggcgctgtgccggctcgccacaccgctggccaagaacctggagcccgtatcctggagctccctcaaccccaagttcctgagtgggaagggcttggtgatctatccgaaaattggagacaagctggacatcatctgcccccgagcagaagcagggcggccctatgagtactacaagctgtacctggtgcggcctgagcaggcagctgcctgtagcacagttctcgaccccaacgtgttggtcacctgcaataggccagagcaggaaatacgctttaccatcaagttccaggagttcagccccaactacatgggcctggagttcaagaagcaccatgattactacattacctcaacatccaatggaagcctggaggggctggaaaaccgggagggcggtgtgtgccgcacacgcaccatgaagatcatcatgaaggttgggcaagatcccaatgctgtgacgcctgagcagctgactaccagcaggcccagcaaggaggcagacaacactgtcaagatggccacacaggcccctggtagtcggggctccctgggtgactctgatggcaagcatgagactgtgaaccaggaagagaagagtggcccaggtgcaagtgggggcagcagcggggaccctgatggcttcttcaactccaaggtggcattgttcgcggctgtcggtgccggttgcgtcatcttcctgctcatcatcatcttcctgacggtcctactactgaagctacgcaagcggcaccgcaagcacacacagcagcgggcggctgccctctcgctcagtaccctggccagtcccaaggggggcagtggcacagcgggcaccgagcccagcgacatcatcattcccttacggactacagagaacaactactgcccccactatgagaaggtgagtggggactacgggcaccctgtctacatcgtccaagagatgccgccccagagcccggcgaacatctactacaaggtctgagtgcccggcacggcctcaggcccccgagggacagtcggcctggaccggacctctcctttcgcccccacaccccctccccttgccagctgtgcccacctttgtatttagttttgtagtttcttggcttttataatccccctttttccctgccccctgggcttcggaggggggtgcttgtgcccctaacccccatgctcttgtgccttccccctctggccaggcctctgggctccgtgggggcgccccttcttggaaggcagggctggacactgatggacagcaggcagggagacagtcccctggccctgcccctccctcgccccccttgccaccttcccaggactgcttgtccgctatcatcactgtttttaatgcttttgtgttcattttttagctgtcaactcattttcatctgttttttgaagaaaaatggaaaaatgtaaaaggcagcccctccccaggctttgtgagcctggcccaagccagtacaagagggcctggggcacgatgtggtcagccaggaagcataggatgccatttcttttatagattccttggtatttctggtggggtaaggggcaggccagggctgttcacgcccatgagggaagaggaaagtgccactgggcaaggtgtcccaccctcccctcctgaccctcctacgaggcttatcctggcaatggggtagtcactgccacccttccacacacacacacacacacacacacacaaaaaaaaatcccttccttgtgggattcttgggcatctcctgcctccctcactctcacggtaattaatgtcttaattggctgttgcctggggaacaggagagctgctgcaggcagatgacctcatggggggtggagggaggtgaggtgcccaggtggctatttgccctgcagagctgggagtttcacccccaccccccaccctgttctctccttacctttggcatcctttggcctggtggggaaacagaggcccagggtggagacctaagcgggtataagaccaggtggcctgctccttttctgggccctagcacaggtgggtaacccccacccaacccagctcctgctgctgtcccagtcttgggctggggcctggaaagaggaagaggctgcctggggctgggccagcccgctgtgcactttgaccccagttccttgccagcacggctgctaacagactgccacttgagtgcgccttgcaggcactcccagagcagccatggaaggagctggccctcacaccatccacctccacactgcctcctggccagctgcccaccccagtgccaggtgggagagggagcagaacagccagccccttccaggtggcagtcggaagggtttttgtttttgtttctgttgccatttgtgtaaatactagtctttttggaaaaaaaataatgtaaagatgttttgtataaactctgaattattttcttgttgcttttttcttagaaaaaaatgagaactaaaaaaaaaaaattaaccacatggaaaaaaaaaaa

SEQ ID NO: 1339 - protein, 346 aa, Homo sapiens
MARPGQRWLGKWLVAMVVWALCRLATPLAKNLEPVSWSSLNPKFLSGKGLVIYPKIGDKLDIICPRAEAGRPYEYYKLYLVRPEQAAACSTVLDPNVLVTCNRPEQEIRFTIKFQEFSPNYMGLEFKKHHDYYITSTSNGSLEGLENREGGVCRTRTMKIIMKVGQDPNAVTPEQLTTSRPSKEADNTVKMATQAPGSRGSLGDSDGKHETVNQEEKSGPGASGGSSGDPDGFFNSKVALFAAVGAGCVIFLLIIIFLTVLLLKLRKRHRKHTQQRAAALSLSTLASPKGGSGTAGTEPSDIIIPLRTTENNYCPHYEKVSGDYGHPVYIVQEMPPQSPANIYYKV

SEQ ID NO: 1340 - DNA, 3151 bp, Homo sapiens
gtcctcgtgcgctgtggacggaggttgtggagagagcagggcggcattggtggctgcggctgaggcttgagccagagatttaaaaatggacaatgatgattttttttccatggactttaaagatggagtctgtctctgttgtccaggctggagtgcagtggcatgatctcggctcactgcaacctccgcctcctgtgttcaagcgattcttctgcctcagcctcccaagtagctgggactacagaagttgttgaaaacctggttacaaatgataattcacctaacataccagaggcaattgatagactcttcagcgacatagcaaatatcaacagggagtctatggctgaaataacagacattcagattgaagaaatggcagtaaacctatggaactgggcacttaccataggaggaggttggcttgtaaatgaagagcagaaaattagattacattatgttgcttgcaagttgctgagtatgtgtgaagcctcatttgcctcagaacaaagtattcaacgactgattatgatgaatatgagaataggaaaagaatggttggatgctggaaattttctaatcgctgatgaatgttttcaagctgctgtggccagtctggagcaattatacgtcaaattaattcaaaggagctcccctgaggctgacttgaccatggagaagattactgttgagagtgaccacttcagagtgctttcttaccaagcagagtcagcagttgctcaaggggattttcaaagagcatctatgtgtgtactgcaatgtaaagatatgttgatgaggctcccccagatgacttcaagtcttcatcatctctgttacaactttggagtagaaacccagaagaataataaatatgaagaaagttctttctggcttagccaaagctatgatattgggaagatggataagaaatctactgggccagaaatgctggctaaagttctacggctattagccacgaattatttggattgggatgacaccaaatattatgataaggctctcaatgctgtaaacctagcaaacaaggaacatttaagttctcctgggcttttcttaaaaatgaaaatcctcttgaaaggcgaaacatctaatgaagaactccttgaagctgtcatggaaatactacatcttgacatgcccttagacttctgtctgaacattgctaaactgctgatggatcatgaaagagaatctgttgggtttcatttcctgacgattattcatgaacgttttaagtcatcggaaaatattggaaaagttctgatactccatactgacatgcttttacaaaggaaggaagaacttcttgccaaggagaagattgaagaaatctttttagctcaccaaacaggaagacaactgacagcagaatcaatgaactggttacacaacattctgtggagacaagctgccagtagttttgaggtacaaaattacactgatgccctacaatggtactattattctctgaggttttattcaactgatgaaatggatctggacttcaccaagctgcagaggaacatggcttgctgttacctgaatttgcaacaacttgataaggccaaagaggcagtggcagaagctgaacgacatgaccctaggaacgttttcactcaattttatatattcaagattgcagtcatagagggcaactctgaaagagctttgcaggcaataattactttagagaatatattaacagatgaagagtcagaagataatgatctagttgcagagagaggttcacctaccatgcttctaagtttagctgcccagtttgctctagagaatggacaacaaattgtggcagaaaaagctttggaatatttagctcaacattcagaagaccaggaacaagttcttacagctgtaaagtgtttgcttcgttttcttcttccaaaaattgctgaaatgccggaatctgaagataagaagaaagaaatggatcgacttttgacttgcctgaatagagcctttgtgaaactttctcagccttttggtgaagaagccttaagtttggagtcaagagctaatgaagctcagtggtttcgaaaaacagcttggaacttggctgtgcaatgtgacaaagatccagtgatgatgagagagttttttatactttcttataagatgtcccagttttgtccttctgatcaagtaattctgattgcacggaaaacatgtttacttatggcagttgcagttgatctagagcaagggagaaaagcttcaacagcttttgaacagaccatgttcctgagtcgtgcacttgaggagatccagacatgcaatgacatccataatttcctgaaacaaacagggaccttctcaaatgattcatgtgagaaattgcttctgctgtacgagtttgaagttagagccaaattgaatgatccattactggaaagcttcctggaatcagtgtgggagttgcctcatttagaaactaaaacttttgaaacaattgcaataatagcaatggaaaagcctgcacactatcctttgattgctctcaaggccttgaaaaaggctttattgctctacaaaaaggaagaaccaattgatatatcacaatacagcaaatgtatgcacaacttggttaacctctcagtgccagatggggcgtcgaatgtagagctctgtcccctggaagaagtttggggctattttgaagatgctctgagccacattagccgcactaaagactacccagaaatggagattctctggctgatggtcaagtcctggaataccggagtacttatgtttagcaggagcaagtatgcatctgctgaaaagtggtgtggcctggccttgcgtttccttaaccaccttacctccttcaaggaaagctatgaaactcagatgaatatgctgtatagtcagcttgtggaagcattgagtaacaacaagggcccagtttttcatgaacatggctactggagcaagtcagattaggcaagctcatggccacatgaagaagatacattgtcccgagatgctgactgtttaaatttttgccagagtttctcttgagcttttgtttctgtttgctcagaccctgttttcatgttgttgaataaactttctaaaataaaagcatgctgaatttaaaaaaaaaaaa

SEQ ID NO: 1341 - protein, 940 aa, Homo sapiens
MISAHCNLRLLCSSDSSASASQVAGTTEVVENLVTNDNSPNIPEAIDRLFSDIANINRESMAEITDIQIEEMAVNLWNWALTIGGGWLVNEEQKIRLHYVACKLLSMCEASFASEQSIQRLIMMNMRIGKEWLDAGNFLIADECFQAAVASLEQLYVKLIQRSSPEADLTMEKITVESDHFRVLSYQAESAVAQGDFQRASMCVLQCKDMLMRLPQMTSSLHHLCYNFGVETQKNNKYEESSFWLSQSYDIGKMDKKSTGPEMLAKVLRLLATNYLDWDDTKYYDKALNAVNLANKEHLSSPGLFLKMKILLKGETSNEELLEAVMEILHLDMPLDFCLNIAKLLMDHERESVGFHFLTIIHERFKSSENIGKVLILHTDMLLQRKEELLAKEKIEEIFLAHQTGRQLTAESMNWLHNILWRQAASSFEVQNYTDALQWYYYSLRFYSTDEMDLDFTKLQRNMACCYLNLQQLDKAKEAVAEAERHDPRNVFTQFYIFKIAVIEGNSERALQAIITLENILTDEESEDNDLVAERGSPTMLLSLAAQFALENGQQIVAEKALEYLAQHSEDQEQVLTAVKCLLRFLLPKIAEMPESEDKKKEMDRLLTCLNRAFVKLSQPFGEEALSLESRANEAQWFRKTAWNLAVQCDKDPVMMREFFILSYKMSQFCPSDQVILIARKTCLLMAVAVDLEQGRKASTAFEQTMFLSRALEEIQTCNDIHNFLKQTGTFSNDSCEKLLLLYEFEVRAKLNDPLLESFLESVWELPHLETKTFETIAIIAMEKPAHYPLIALKALKKALLLYKKEEPIDISQYSKCMHNLVNLSVPDGASNVELCPLEEVWGYFEDALSHISRTKDYPEMEILWLMVKSWNTGVLMFSRSKYASAEKWCGLALRFLNHLTSFKESYETQMNMLYSQLVEALSNNKGPVFHEHGYWSKSD

SEQ ID NO: 1342 - DNA, 3029 bp, Homo sapiens
gtcctcgtgcgctgtggacggaggttgtggagagagcagggcggcattggtggctgcggctgaggcttgagccagagatttaaaaatggacaatgatgattttttttccatggactttaaagaagttgttgaaaacctggttacaaatgataattcacctaacataccagaggcaattgatagactcttcagcgacatagcaaatatcaacagggagtctatggctgaaataacagacattcagattgaagaaatggcagtaaacctatggaactgggcacttaccataggaggaggttggcttgtaaatgaagagcagaaaattagattacattatgttgcttgcaagttgctgagtatgtgtgaagcctcatttgcctcagaacaaagtattcaacgactgattatgatgaatatgagaataggaaaagaatggttggatgctggaaattttctaatcgctgatgaatgttttcaagctgctgtggccagtctggagcaattatacgtcaaattaattcaaaggagctcccctgaggctgacttgaccatggagaagattactgttgagagtgaccacttcagagtgctttcttaccaagcagagtcagcagttgctcaaggggattttcaaagagcatctatgtgtgtactgcaatgtaaagatatgttgatgaggctcccccagatgacttcaagtcttcatcatctctgttacaactttggagtagaaacccagaagaataataaatatgaagaaagttctttctggcttagccaaagctatgatattgggaagatggataagaaatctactgggccagaaatgctggctaaagttctacggctattagccacgaattatttggattgggatgacaccaaatattatgataaggctctcaatgctgtaaacctagcaaacaaggaacatttaagttctcctgggcttttcttaaaaatgaaaatcctcttgaaaggcgaaacatctaatgaagaactccttgaagctgtcatggaaatactacatcttgacatgcccttagacttctgtctgaacattgctaaactgctgatggatcatgaaagagaatctgttgggtttcatttcctgacgattattcatgaacgttttaagtcatcggaaaatattggaaaagttctgatactccatactgacatgcttttacaaaggaaggaagaacttcttgccaaggagaagattgaagaaatctttttagctcaccaaacaggaagacaactgacagcagaatcaatgaactggttacacaacattctgtggagacaagctgccagtagttttgaggtacaaaattacactgatgccctacaatggtactattattctctgaggttttattcaactgatgaaatggatctggacttcaccaagctgcagaggaacatggcttgctgttacctgaatttgcaacaacttgataaggccaaagaggcagtggcagaagctgaacgacatgaccctaggaacgttttcactcaattttatatattcaagattgcagtcatagagggcaactctgaaagagctttgcaggcaataattactttagagaatatattaacagatgaagagtcagaagataatgatctagttgcagagagaggttcacctaccatgcttctaagtttagctgcccagtttgctctagagaatggacaacaaattgtggcagaaaaagctttggaatatttagctcaacattcagaagaccaggaacaagttcttacagctgtaaagtgtttgcttcgttttcttcttccaaaaattgctgaaatgccggaatctgaagataagaagaaagaaatggatcgacttttgacttgcctgaatagagcctttgtgaaactttctcagccttttggtgaagaagccttaagtttggagtcaagagctaatgaagctcagtggtttcgaaaaacagcttggaacttggctgtgcaatgtgacaaagatccagtgatgatgagagagttttttatactttcttataagatgtcccagttttgtccttctgatcaagtaattctgattgcacggaaaacatgtttacttatggcagttgcagttgatctagagcaagggagaaaagcttcaacagcttttgaacagaccatgttcctgagtcgtgcacttgaggagatccagacatgcaatgacatccataatttcctgaaacaaacagggaccttctcaaatgattcatgtgagaaattgcttctgctgtacgagtttgaagttagagccaaattgaatgatccattactggaaagcttcctggaatcagtgtgggagttgcctcatttagaaactaaaacttttgaaacaattgcaataatagcaatggaaaagcctgcacactatcctttgattgctctcaaggccttgaaaaaggctttattgctctacaaaaaggaagaaccaattgatatatcacaatacagcaaatgtatgcacaacttggttaacctctcagtgccagatggggcgtcgaatgtagagctctgtcccctggaagaagtttggggctattttgaagatgctctgagccacattagccgcactaaagactacccagaaatggagattctctggctgatggtcaagtcctggaataccggagtacttatgtttagcaggagcaagtatgcatctgctgaaaagtggtgtggcctggccttgcgtttccttaaccaccttacctccttcaaggaaagctatgaaactcagatgaatatgctgtatagtcagcttgtggaagcattgagtaacaacaagggcccagtttttcatgaacatggctactggagcaagtcagattaggcaagctcatggccacatgaagaagatacattgtcccgagatgctgactgtttaaatttttgccagagtttctcttgagcttttgtttctgtttgctcagaccctgttttcatgttgttgaataaactttctaaaataaaagcatgctgaatttaaaaaaaaaaaa

SEQ ID NO: 1343 - protein, 925 aa, Homo sapiens
MDNDDFFSMDFKEVVENLVTNDNSPNIPEAIDRLFSDIANINRESMAEITDIQIEEMAVNLWNWALTIGGGWLVNEEQKIRLHYVACKLLSMCEASFASEQSIQRLIMMNMRIGKEWLDAGNFLIADECFQAAVASLEQLYVKLIQRSSPEADLTMEKITVESDHFRVLSYQAESAVAQGDFQRASMCVLQCKDMLMRLPQMTSSLHHLCYNFGVETQKNNKYEESSFWLSQSYDIGKMDKKSTGPEMLAKVLRLLATNYLDWDDTKYYDKALNAVNLANKEHLSSPGLFLKMKILLKGETSNEELLEAVMEILHLDMPLDFCLNIAKLLMDHERESVGFHFLTIIHERFKSSENIGKVLILHTDMLLQRKEELLAKEKIEEIFLAHQTGRQLTAESMNWLHNILWRQAASSFEVQNYTDALQWYYYSLRFYSTDEMDLDFTKLQRNMACCYLNLQQLDKAKEAVAEAERHDPRNVFTQFYIFKIAVIEGNSERALQAIITLENILTDEESEDNDLVAERGSPTMLLSLAAQFALENGQQIVAEKALEYLAQHSEDQEQVLTAVKCLLRFLLPKIAEMPESEDKKKEMDRLLTCLNRAFVKLSQPFGEEALSLESRANEAQWFRKTAWNLAVQCDKDPVMMREFFILSYKMSQFCPSDQVILIARKTCLLMAVAVDLEQGRKASTAFEQTMFLSRALEEIQTCNDIHNFLKQTGTFSNDSCEKLLLLYEFEVRAKLNDPLLESFLESVWELPHLETKTFETIAIIAMEKPAHYPLIALKALKKALLLYKKEEPIDISQYSKCMHNLVNLSVPDGASNVELCPLEEVWGYFEDALSHISRTKDYPEMEILWLMVKSWNTGVLMFSRSKYASAEKWCGLALRFLNHLTSFKESYETQMNMLYSQLVEALSNNKGPVFHEHGYWSKSD

SEQ ID NO: 1344 - DNA, 3521 bp, Homo sapiens
aggaagcgggaagttacttagcacggttccgggtttctcgcgccccgcctgtcccccctccctatcactgctactggctcttggtccctccgttggactgtcctgcggagagaaaccccagcccatcggtctgcgctgggaccgcccgccgcgcatctgcccttcttcgctgactccgccccgcatctggccagacccgcctcgcgtcagagctgacccactcactgcgcgtttgccagtcagtctctccggacctgcctcgagcctcaggctgctgaaatcaccgcgcctcactcgcctcgacagtgattctgagtctgcttttagcttccttttgcctgccttggctttttctgttcgtgaacagctgtttggcccatagcttagagaaagcagccttttttctcttcaaagagaacctcctcccagtgctcagagagatggggagcggggagcctaatcctgctggcaagaaaaagaagtatctcaaggccgctctgtacgtgggtgacttggacccagatgtcaccgaggacatgctctataagaagttcaggcctgctggccctctgcgattcacccgaatctgccgtgatccggtgacccgcagccccctgggctatgggtatgttaacttccgctttcccgcggatgcagagtgggccttgaacaccatgaattttgatttgattaatggaaaaccattccgccttatgtggtctcagccagatgaccgcttaagaaagtctggagtgggaaatatattcatcaaaaacctggacaaatccatagacaatagggccctgttttacttattttctgcttttgggaacattctgtcctgcaaagtcgtatgcgatgacaacggctctaagggttatgcctatgttcactttgacagcctggccgctgccaatagagccatctggcacatgaatggagtgcggctcaacaaccgccaggtgtatgttggcagattcaaattcccagaagagcgggcggctgaggtcagaaccagggatagagcaactttcaccaatgttttcgttaaaaacattggagacgacatagatgacgaaaaactgaaggaacttttctgtgaatatgggccaactgagagtgttaaagtaataagagatgccagtgggaaatctaaaggctttggatttgtgagatatgagacacacgaggctgcccaaaaggctgtgctagacttgcatggaaagtccatcgatggaaaagtcctctatgtagggcgagcacagaagaaaattgaacgcctggctgagttgaggcggagatttgaacggctgaggttaaaagaaaaaagtcggcccccaggggtgcctatctatattaagaacttggatgagacaatcaatgatgaaaaactgaaggaggaattttcttcctttgggtcaattagtcgggccaaagtgatgatggaagtggggcaaggcaaaggatttggtgtggtctgcttttcctcttttgaagaggctaccaaagcagtggatgagatgaatggccgcatagtgggctccaagcccctgcatgtcaccctgggccaggccaggcgcaggtgctgagaataagaatgctcagtttgtttcagccttagttggtgcctccttagtttgggctcctttgtgataaggggttattttatgctaattcacaagttttttttgaagtgaattcttttgaaaaaaaaatgcaaaactagaaaactttattcattttagaatagaacataatttctaactgtaaaattgtcattttgtactttttttgatgtaatatccttagaaatctgtagaataaagtgtattcctccacttttttttcctgaacagtcaaggtgaggcaattgattgagtatatttcccttcttatttcagtaatactctattttttttcatgaaaatgtcaacatggttcttctgaatctatcacagtgaaaagttctaacttgtttttgagaagtcagtacagcaggggaaaacatatgtgatgcaattaacatctgcataatttcacttaaaattattatgcaaaaatgaatgttttttcaaaaaatgtgaaatgtattttattttctttatttgtattcttgtttcattttttaatatgttgtgaacatgctacagatttgatagtacttttgactaaatgttgggagtggtcgtattaacttcttgcccaaagaagtaagcatattggtgttttctcaattagtcactgagaaaattaacactttaggcagtggctatttaaagtaggaattgcatcttaaaaacctttcctaagagatttggtatgtgaggatactttcagtaccactcctaccattcatttttctaaattccttagtacatatacttggatcatgttaaattaacaagaaagatgaataactgcgctgaattgcctttacctataaataatttaatattttaccttcgggttttatcaactgtcaatataaaaggcagtactccacagaatgatgttgaaaaacttcttcgaagaacaccttctattaaacttgttatctcttgtaaattattgtgtgtgtccttttgataatattcacaggtgtttcaaaggtaaggaataggttgtctcttggattaagtcatatgcctccagccattatatgagaactgtgaaaccaatatggttttctttatgtcttggctgcttgaaaattaaaaaaaaaaaaggtttgttcaatattgccgttacatttattagcctgtaatttctaaattggagattctctacatttcacttgcagtttcctgttctcctcattgcctgccttccattcatattacacttatttttctattttttgtattacctttttaaaaatatataccagttcaagtccttttaggaagaagaaaatacctaatttatgtaaaatttaaataattacttttttataatatgattcacttatgccacagattcaacattagaatatgttttatctctactgtcagttttattaccttatatacaaatcttcattttcatacatagtacaatgtaaatatataactttgttaacacttttgttagctctttgaccataaaataatgacaataagctgtttctatgtatttgtttatctacaaattacaggtttatccatttgcaaatattttcaaaatggaaatcactgtttatattgattataaacataagacatgctcattgtaaaaaatgtacacaaggcagaaggaagtaaaatttccacagttcagaaataccacaattaatattttcaatgtgtaaatatcttttcatattttttcctacgtatacacaaacattttgaccaaaaatccacactatatgtactgttctgtatttttaattttaaactgaacaataatcatcttttcctgacaataaatatcaatctctatcatcaaaaaaaaaaaaaaaaaaaaaaaaaaaaaaaaaaaaaaaaaaaaaaaaaaaaaaaaaaaaaaaaaaaaaaaaaaaa

SEQ ID NO: 1345 - protein, 382 aa, Homo sapiens
MGSGEPNPAGKKKKYLKAALYVGDLDPDVTEDMLYKKFRPAGPLRFTRICRDPVTRSPLGYGYVNFRFPADAEWALNTMNFDLINGKPFRLMWSQPDDRLRKSGVGNIFIKNLDKSIDNRALFYLFSAFGNILSCKVVCDDNGSKGYAYVHFDSLAAANRAIWHMNGVRLNNRQVYVGRFKFPEERAAEVRTRDRATFTNVFVKNIGDDIDDEKLKELFCEYGPTESVKVIRDASGKSKGFGFVRYETHEAAQKAVLDLHGKSIDGKVLYVGRAQKKIERLAELRRRFERLRLKEKSRPPGVPIYIKNLDETINDEKLKEEFSSFGSISRAKVMMEVGQGKGFGVVCFSSFEEATKAVDEMNGRIVGSKPLHVTLGQARRRC

SEQ ID NO: 1346 - DNA, 1040 bp, Homo sapiens
gctttctgcgctacctacagaggggtccatatggcgttgttctggattcccatcgtaacttaaagggaaactttcgcaatgtccggagcgcttgatatcctgcaaatgaaggaggaggatgtccttaagttccttgcagcaggaacctatttaggtggcaccaatcttgacttccagatggaacagtacatctataaaaggaaaagtgatggcatctacatcataaatctgaagcggacctgggagaagcttctgctggcagctcgtgccattgttgccattgaaaaccctgctgatgtcagtgttatatcttccaggaatactggccagagggccgtgctgaagtttgctgctgccactggagccactccaattgctggctgcttcactcctggaactgtccgtcgctaaccagatccaggcagccttctgggacccacggcttcttgtggttactgaccccagggctgaccaccagcctctcatggaggcatcttctgttaacctacctaccattgctctgtgtaacacagattctcctctgtgctatgtggacattgccatcccatgcaacaacaagggagctcactcagtgggtttgatgtggtggatgctggctcgggaagttctgcgcatgcgtggcaccatttcccatgaacacccatgggaggtcatgcctgatctctacttctacagggatcctgaagagattgaaaaagaagagcaggctgctgctgaaaaggtaatgaccaaggaggaatttcagggtgaatggactgctccagctcctgagttcactgctactcagcttgaggttgcagactggtctgaaggtgtgcgggtgccctctgtgcctattcagcagttccctgttgaagactggagcgctcagcctgccacggaagactggtctgcagctcccactgctcaggccactgaacgggtaggagcaaccactgaatggtcttaagctgttcttgcatgggctcttaagcaacatggaaaaatggttgatggaaaataaacatcagtttcttaaa

SEQ ID NO: 1347 - DNA, 9629 bp, Homo sapiens
agtagtttgcggcatccggaggagcagcagcagcagtagcggcggcggctggcgcagcgcggagacggacgagcgggcacagacggcagcacagctcccgtgcaccatgcctggcttgcccgggaggcactggcacccgcgtccctagcccggcgctggcccttggcgcgttgcgctccgcagcattccggctgagcgatttcatccgaaatcctaaacctcctaccccaaacccattgcctcctgcttgctcatactccacactcacactccccacaccacacactcactcttcctctctctctcacacattcacacacagcccgagacagacagagaaagcgagacagacctcccgagtgcgcgagcgcccgggaggaagggagcccaacgcagcgcggccagcgcctctccgggaagatgaaatcaagacgctcctgcaagtaaacttcggcggcgacaaaatcgtcgactgtggcagctgctgaggcggaccccagcgacgtgcaactgagctaggagggcttcctcccgcggcggcggcggcggcggcggcggcggcggaccttggagcgacaccccagcccaaacggagagaagagaagcacccggtacccacggcggcggccccgcctctcctggccggtactgttgttgcctccccttccctcttccccattccccgccacccccggccattagaaagaccggggctttgattttcttggacaaattgccatctccccgtttccacaaacttgacgtggagggtcggactgcgttgttaactttgatttcctagacgaaaacgcccgcagaccctcaactgctctgtggggggaactccgctcccacctcggatcctggacagacgcgcccccaagcccttcgaagccagccttagcgcgagggagcgcgctcaagctctggcagcctctctcccctcccccttcctctgctggccccgggaccgccatccgactcaaccctataaccgggtgcccgcggcgcttgccagtaactgactcccgtctgcgacaccccctttctcccgaacaggcctcgaagaggccagtgtggcccccccagaccccggagggcgcattccaagcgggtactctctccgcagtgaactgggagcgctggggggaggtctttgcgcatgccaggtgcacagacagcgagttcgccagcctcagtgccggtgcaccgcggcgggccgggcagtgcctgaaaggctgcgcctcctccgccctctttaccttcgcctcaagtactgtccggactcagcggtgcgtcctccaggccgcgcagacgccgcccgacccgcagccctgggcggctgccgacagtcgcgcccggctaactttgaaggggtaaaactgagtagccgggctggagggagggggctcggggccgcgcggcgctcccttggcccctcggagcccccggggcccccgcgagcccccgccgcgtccgccgcaacctcagcattggagccgccgcgggtgtcccccgcgcgccgccgggccgccctgggcgggacttctcccgcggcctccggggccacggggcgcgcgcaacaggcggcccgagccggcgggaagctggagcgccgacggcgtcggtctcggaggggtgtggagaggcgaggccaggcagagccccgtgcagccatggagtcgctcctgctgccggtgctgctgctgctggccatactgtggacgcaggctgccgccctcattaatctcaagtactcggtagaagaggagcagcgcgccgggacggtgattgccaacgtggccaaagacgcgcgagaggcgggcttcgcgctggacccccggcaggcttcagcctttcgcgtggtgtccaactcggctccacacctagtggacatcaatcccagctctggcctgctggtcaccaagcagaagattgaccgtgatctgctgtgccgccagagccccaagtgcatcatctcgctcgaggtcatgtccagctcaatggaaatctgcgtgataaaggtggagatcaaggacctgaacgacaatgcgcccagtttcccggcagcacagatcgagctggagatctcggaggcagccagccctggcacgcgcatcccgctggacagcgcttacgatccagactcaggaagctttggcgtgcagacttacgagctcacgcccaacgagctgttcggcctggagatcaagacgcgcggcgacggctcccgctttgccgaactcgtggtggaaaagagcctggaccgcgagacgcagtcgcactacagcttccgaatcactgcgctagacggtggcgacccgccgcgcctgggcaccgttggccttagtatcaaggtgaccgactccaatgacaacaacccggtgtttagcgagtccacctacgcggtgagcgtgccagaaaactcgcctcccaacacacccgtcatccgcctcaacgccagcgatccagacgagggcaccaacggccaggtggtctactccttctatggctacgtcaacgaccgcacgcgcgagctctttcagatcgacccgcacagtggcctggtcactgtcactggcgctttagactacgaagaggggcacgtgtacgaactggacgtgcaggctaaggacttggggcccaattccatcccggcacactgcaaggtcaccgtcagcgtgctggacaccaatgacaatccgccggtcatcaacctgctgtcagtcaacagtgagcttgtggaggtcagcgagagcgcccccccgggctacgtgatcgccttggtgcgggtgtctgatcgcgactcaggcctcaatggacgtgtgcagtgccgtttgctgggcaatgtgccctttcgactgcaggaatatgagagcttctccactattctggtggacggacggctggaccgcgagcagcacgaccaatacaacctcacaattcaggcacgcgacggcggcgtgcccatgctgcagagtgccaagtcctttaccgtgctcatcactgacgaaaatgacaaccacccgcacttttccaagccctactaccaggtcattgtgcaggagaacaacacgcctggcgcctatctgctctctgtgtctgctcgcgaccccgacctgggtctcaacggcagtgtctcctaccagatcgtgccgtcgcaggtgcgggacatgcctgtcttcacctatgtctccatcaatcccaactcaggcgacatctacgcgctgcgatcctttaaccacgagcagaccaaggcgttcgaattcaaggtgctggccaaggacggcggccttccctcactgcaaagcaacgctacggtgcgggtcatcatcctcgacgtcaacgacaacaccccggtcatcacagccccacctctgattaacggcactgccgaggtctacataccccgcaactctggcataggctacctggtgactgttgtcaaggcagaagactacgatgagggcgaaaatggccgagtcacctacgacatgaccgagggcgaccgcggcttctttgaaatagaccaggtcaatggcgaagtcagaaccacccgcaccttcggggagagctccaagtcctcctatgagcttatcgtggtggctcacgaccacggcaagacatctctctctgcctctgctctcgtcctaatctacttgtcccctgctctcgatgcccaagagtcaatgggctctgtgaacttgtccttgattttcattattgccctgggctccattgcgggcatcctctttgtaactatgatcttcgtggcaatcaagtgcaagcgagacaacaaagagatccggacctacaactgcagaattgctgagtactcctatgggcatcaaaagaaatcaagcaagaagaaaaaaatcagtaagaatgacatccgcctggtaccccgggatgtggaggagacagacaagatgaacgttgtcagttgctcttccctgacctcctccctcaactattttgactaccaccagcagacgctgcccctgggctgccgccgctctgagagcactttcctgaatgtggagaaccagaatacccgcaacaccagtgctaaccacatctaccatcactctttcaacagccaggggccccagcagcctgacctgattatcaacggtgtgcctctgcctgagactgaaaactattcttttgactccaactacgtgaatagccgagcccatttaatcaagagctccaccttcaaggacttagagggcaacagcctgaaggatagtggacatgaggagagtgaccaaactgacagtgagcatgatgtccagcggagcctgtattgtgatactgctgtcaacgatgtgctgaacaccagtgtgacctccatgggatctcagatgcctgatcatgatcagaatgaaggatttcattgccgggaagaatgccggattcttggccactctgacaggtgctggatgccccggaaccccatgcccatccgttccaagtcccctgagcatgtgaggaacatcatcgcgctgtctattgaagctactgctgctgatgtcgaggcttatgacgactgcggccccaccaaacggactttcgcaacctttgggaaagatgtcagcgaccacccggctgaggagaggcctaccctgaaaggcaagaggactgtcgatgtgaccatctgcagccccaaggtcaacagcgttatccgggaggcaggcaatggctgtgaggcgattagccctgtcacctcccccctccacctcaagagctctctgcccaccaagccttccgtgtcttacaccattgccctggctcccccagcccgtgatctggagcagtatgtcaacaatgtcaacaatggccctactcgtccctctgaagctgagccccgtggagctgatagcgagaaagtcatgcatgaggtcagccccattctgaaggaaggtcgcaacaaagagtcccctggtgtgaagcgtctgaaggatatcgttctctaaaccagtctccaggaagaagagaaagaaaccacactggctagtgaagaagcaggagcttcttgttttaattgctcaccaatggttggttcttgagtggctatatttcagagcttttcctaaatgtattgtttataggtgattatcattctgtgacagtcccttgtttcaacaggcagcaggggtgttcagttggagcaaattagctttggcttgagttgttcatggggccttgatgttggggaaacagagacaaattcagttgtgaaaagtattatgtattaagtgtttgaatttatatatttttctatgtcaaaattataatataaattaccattgtttgtggaggattacatttaaaaaagcaaaaagtgaaaaaaaaaagctctggacacctttaataagctcgccactgttttttgtagtgtagacaagttaatggtcatttattgtgtactattcattgattcagtgatgtgaaattgagcccccaaaaggttgtttctgaagctcgagtacttcccaatgccgctactttgctgtggacacccctgctttaaaaacccttttgctagctgtgctattgttgtatttgatattgcaaattgctatgtgtgtggtgatggcaaaaggcttttaaaagttggtgttttctttttcttaaaaaaataataaaactacagacaaaaacaaagtgcaaacaactgagacagcaaatgaatgagcaacaccatgcatatagattgagtacttggagaatactcacgttttttaactcatgtagtgattgctcaccactttgcaaagtatttttcctgcctttcagtggtctgcccaggtccatgatagatcattgcagaaagtcatttttggataggctgctatctaatttgcagttgtcagaaatactgtgctgaaagttttatgacatccatcttttaaattttcaggccctgaacaggaaagttgctcctgaagttatgtttccaggcttagaaattccctctctccaatcatctaaaattgaagatgactgaatctattttaagatctaaattagcatctcttcagacacacacttcctgattcagtgtttcccaatcatgattagaattagactgcaaagcacgtcatgggctgggattgagaactccatgttgctctgtatcttaggcttatatacgtagggatagagtaagcagtacaaagtgtatattttggaaaagacaggtaacaggtaacagcatcgctaatccaattactgtgccttctaaacggagacactcagacacttgaactcatctttttatgactaatagttttttgattaaaaatgtgaacaagaaaatactaaaataaaaatcctttcgatttagccaactctttttgctgtaggctaggaatacaccctttttaaattaacacactgtagatcctttttttctgttttaacattcctctaactcccccatttatcttttgtctattaatattcactagccaacatagtatttttgcagcctaagagttcattatttaaaaataaactaaagaaatatgtcacctttgttctgccttggtcttaagagagttgtttctagagaaacaagttttatggttctgttttcatttgtttcattttttgaaattcaggaatacacagagagaaggcctagaggttagagcactagaatgcaaaagaggatttattttcttaagtttaggtagataagtcagctcttttgaatgttttacttatttttgcctgagttcctagctttacgcattactaggaatattttcttttacaggagggagaagggttttgagggagggggtgggtaaggcagtagggatggggttaggtaggggagaacatttctgaaaaagaacttataatgaagctacaaatccatccttatttcttattcagtgctgaatactacctcatgcaaaatattggtgtggctgcaaatttccctctgaagctgacacaattaaggatgaattaccataacatcttcatttttcctcatttcattgcctctcatacagttttctccctctgatttatttcattttggtagtggattttgaattaagtatttatttctctttgcaagtgactatttgattaacacattaaaaattttttaaaaatttcccctttaagttatgatggctgcctatagaatttagactgtttctcaccctgatccatcctgatattatgttattagctacgatttcaaggtcactttgaagtcagacttcacagttttctacaggtgtatttcttgctatgctcagtgggaaccagggagcagaaaagattgtggaaagtgggaacattaattgtcacgtggctgttgagccagagaggccactggctgccatgcctcttaccagccaagttttaaatggttagagtggcattggcattgattttgcttttctcttgggttttcttcatttcttttcataattcatcttcaagctatagatccatccttcttccctatccaaatactttgttctcagtgggcagtcagatttttttggcttccaaacctcactgagcatgttcagagaattcctctcattaaggaaatatttttccccacaattgtctgatgtatgagtcctctcagaagcacaagtgcatactaggaaggctttgtaaactggttttgtaggcaggctgtacctgcaaataggcattctgagcaaggatcctaaatttccctttggctcatgtcccccccgccccaccccaccttctcctttttggcatgtctggtgaaaagctacaaggttcacagggccaaatattctcccttttgttctctaaacatgttgcacacataaactcaagggagtgatttcggttcctaagtcctagggagttctattccatttattctgatgtcccttttaaggaggagttggtgttgaagtgtgacatgctttaatgataactgctttggcaattccccagacaggtatacttcttcatccaaaattgcacctaaggtgttcatttagacaaaattgttcgcttagtgatccactgatctctaatcagaaatatttttaaaaaatacaatttagatctctgaaaattggaaccactcaagagtatcatcttgatagtgttacttcagcatatgactgactgattttatgaagggagtttagctgacttttccctgtagccctatcatattaaaaacaaaaagtggtccacttgaagcagcaaggacaaagggcagtttagggagaggcagggtgaaggggatagctcgattgggcatccagagtggaaaaggattattattgtacataatagcagttctggctggaattccaatccactttctggggatcattttgatgttgaatgttcccccaaagcattctgacaagtttggtccacttggctctttaccccgggtaataagacccttattgactttgaaaaactggcataaatgagcttaagaaatccattgtatacagtcctagtgtttgccttcttggtaaaattacatttaaggatgtcatttcatgagtcaaattgtatctgctgacactgaagtgtattgagatgttgttctttagtttaagtatgtaacaaagtaatattcaaaggggatgtttgggggtggggctgggaccgggtggctttatattgataatgaaatattccagagcaaaacacattgtcctaatgaagttgttgcagctctcttcgttttcttgtgccgctggaattggcttgtgggtcacttgttgtgcaaaagtgaattaatttcaaataggaatcatattgcttttgtgaaacaaagaaaatttaccaccttgtctgatacatagattggaaggcgctcttggtaaagaataacccacaaacacctgatcttgattggaaagcattgtaggtcattagggaaaactgatgatgctgactgttgctccagctgtgttggcaattcaagatgaccttgttactaactgaaagttgctgtcaaccttagcaaacaaaccagctaacaccattacagcactggttaagtagatttttactggcactggctggcgttcagctgaggaaggctaggatacagactttaatgaccaagagccagactagctcgagctagaaatcagcaacaaatacctccttgtgctatttgaatgctaaggtattagttgcaataggcttacgccttcgctcctctagtgaggggaatgagcctgatgacactattactgtttacctgtcaaaccagggtggaaatttagagggatgcaagtacagtatgtctcattaagcagtctctgttgctgattatatgaagataaaattgttgtatatgctgatctgtatgttatgtacattttcacagtgattgaatcattgtaaaaagaaaaaagacaaaaaagaatcaccactgtctattttatgaagatgataaagcagctttattaaattattacagttatgtttcaaatggtgttatctgccacattgtttccttttatctggtggttctctgtttccccctttaaatgtgttttctctgcttcaaaaatttaatgcattttagtattaaaggctattatggaaaaagtaaaaaaaaaaaaaaaaaa

SEQ ID NO: 1348 - protein, 1100 aa, Homo sapiens
MESLLLPVLLLLAILWTQAAALINLKYSVEEEQRAGTVIANVAKDAREAGFALDPRQASAFRVVSNSAPHLVDINPSSGLLVTKQKIDRDLLCRQSPKCIISLEVMSSSMEICVIKVEIKDLNDNAPSFPAAQIELEISEAASPGTRIPLDSAYDPDSGSFGVQTYELTPNELFGLEIKTRGDGSRFAELVVEKSLDRETQSHYSFRITALDGGDPPRLGTVGLSIKVTDSNDNNPVFSESTYAVSVPENSPPNTPVIRLNASDPDEGTNGQVVYSFYGYVNDRTRELFQIDPHSGLVTVTGALDYEEGHVYELDVQAKDLGPNSIPAHCKVTVSVLDTNDNPPVINLLSVNSELVEVSESAPPGYVIALVRVSDRDSGLNGRVQCRLLGNVPFRLQEYESFSTILVDGRLDREQHDQYNLTIQARDGGVPMLQSAKSFTVLITDENDNHPHFSKPYYQVIVQENNTPGAYLLSVSARDPDLGLNGSVSYQIVPSQVRDMPVFTYVSINPNSGDIYALRSFNHEQTKAFEFKVLAKDGGLPSLQSNATVRVIILDVNDNTPVITAPPLINGTAEVYIPRNSGIGYLVTVVKAEDYDEGENGRVTYDMTEGDRGFFEIDQVNGEVRTTRTFGESSKSSYELIVVAHDHGKTSLSASALVLIYLSPALDAQESMGSVNLSLIFIIALGSIAGILFVTMIFVAIKCKRDNKEIRTYNCRIAEYSYGHQKKSSKKKKISKNDIRLVPRDVEETDKMNVVSCSSLTSSLNYFDYHQQTLPLGCRRSESTFLNVENQNTRNTSANHIYHHSFNSQGPQQPDLIINGVPLPETENYSFDSNYVNSRAHLIKSSTFKDLEGNSLKDSGHEESDQTDSEHDVQRSLYCDTAVNDVLNTSVTSMGSQMPDHDQNEGFHCREECRILGHSDRCWMPRNPMPIRSKSPEHVRNIIALSIEATAADVEAYDDCGPTKRTFATFGKDVSDHPAEERPTLKGKRTVDVTICSPKVNSVIREAGNGCEAISPVTSPLHLKSSLPTKPSVSYTIALAPPARDLEQYVNNVNNGPTRPSEAEPRGADSEKVMHEVSPILKEGRNKESPGVKRLKDIVL

SEQ ID NO: 1349 - DNA, 3568 bp, Homo sapiens
atagttttcaggttaagaaagccagaatctttgttcagccacactgactgaacagacttttagtggggttacctggctaacagcagcagcggcaacggcagcagcagcagcagcagcagcagcagcagcagcagggctcctgggataactcaggcatagttcaacactatgggtcctcctctgaagctcttcaaaaaccagaaataccaggaactgaagcaggaatgcatcaaagacagcagacttttctgtgatccaacatttctgcctgagaatgattctcttttctacaaccgactgcttcctggaaaggtggtgtggaaacgtccccaggacatctgtgatgacccccatctgattgtgggcaacattagcaaccaccagctgacccaagggagactggggcacaagccaatggtttctgcattttcctgtttggctgttcaggagtctcattggacaaagacaattcccaaccataaggaacaggaatgggaccctcaaaaaacagaaaaatacgctgggatatttcactttcgtttctggcattttggagaatggactgaagtggtgattgatgacttgttgcccaccattaacggagatctggtcttctctttctccacttccatgaatgagttttggaatgctctgctggaaaaagcttatgcaaagctgctaggctgttatgaggccctggatggtttgaccatcactgatattattgtggacttcacgggcacattggctgaaactgttgacatgcagaaaggaagatacactgagcttgttgaggagaagtacaagctattcggagaactgtacaaaacatttaccaaaggtggtctgatctgctgttccattgagtctcccaatcaggaggagcaagaagttgaaactgattggggtctgctgaagggccatacctataccatgactgatattcgcaaaattcgtcttggagagagacttgtggaagtcttcagtgctgagaaggtgtatatggttcgcctgagaaaccccttgggaagacaggaatggagtggcccctggagtgaaatttctgaagagtggcagcaactgactgcatcagatcgcaagaacctggggcttgttatgtctgatgatggagagttttggatgagcttggaggacttttgccgcaactttcacaaactgaatgtctgccgcaatgtgaacaaccctatttttggccgaaaggagctggaatcggtgttgggatgctggactgtggatgatgatcccctgatgaaccgctcaggaggctgctataacaaccgtgataccttcctgcagaatccccagtacatcttcactgtgcctgaggatgggcacaaggtcattatgtcactgcagcagaaggacctgcgcacttaccgccgaatgggaagacctgacaattacatcattggctttgagctcttcaaggtggagatgaaccgcaaattccgcctccaccacctctacatccaggagcgtgctgggacttccacctatattgacacccgcacagtgtttctgagcaagtacctgaagaagggcaactatgtgcttgtcccaaccatgttccagcatggtcgcaccagcgagtttctcctgagaatcttctctgaagtgcctgtccagctcagggaactgactctggacatgcccaaaatgtcctgctggaacctggctcgtggctacccgaaagtagttactcagatcactgttcacagtgctgaggacctggagaagaagtatgccaatgaaactgtaaacccatatttggtcatcaaatgtggaaaggaggaagtccgttctcctgtccagaagaatacagttcatgccatttttgacacccaggccattttctacagaaggaccactgacattcctattatagtacaggtctggaacagccgaaaattctgtgatcagttcttggggcaggttactctggatgctgaccccagcgactgccgtgatctgaagtctctgtacctgcgtaagaagggtggtccaactgccaaagtcaagcaaggccacatcagcttcaaggttatttccagcgatgatctcactgagctctaaatctgcaatcccagagaatcctgacaaagcgtgccacccttttattttccgtcaggtgccaggtcttagttaagattcacaatctttagaaagaatgagattcacaataattaactcttcctctcttctgataaattccccatacctcccaatccaagtagcatctgtagctacataacctatatacctccagcagctggacatggggaggcgacagtcctatctagacatcatacacatttgccaagaaaggatctctggggcttccgggggtgagattcaagcaggacaataacaagaggctggacaccctacagatgtctttgatgttttcagttgtttgatatatctcccctgtagggcatgttgaggaaggaggagggctgatcaaggccaagctggtctagcctgacatcctagctcctgactgaacactatagacttcccagcagcatttcacccagcagccagagccggctttaagtccccaacccttacagacaccactgccaccaccaccaaccacgaccaccaccaccaccaccactcaccaccatcatcacctccggaaagtgtagtcctgccctaacccaagtcacccccgacagtaaattttaccttcatgttgagaaagcttcctggtgcttaatcaagagctggagttcaatgagtcctagacagtgagaggggcctgagcttcagctcaatggaagcctgctgtgtgccacaagacggaaaagtggaagaagctgcagtgggagacaaagcctcggtcccccacccatccacacacacctacactcacacacgcgcacatgggcgcgcacgaactaccattcaggcagtcagtgggcaagaggaaagataagtaagtaccatacacacctaaaagatgagagaattcatccagacatattacagccagtttggggcccctgactgcaatgtgaaacctctcgctgctgctaggtttacaaacaagcccattgtcctgtgcctcctaatatcatttgtactgaagaccccatctggggacttgagactttggtcccagcccagactcctcagacttttctctcagttgggatgcttcactcgctgggggtgtttgtttgccctctcatttttcagtacttctacagaattttctctagagtcagtcattatgaaatgtacttccctccatcttaacctatcaactttctgcccctccttcaaggcccagtataaatgccacctcctccatgaagccttccctaattccaccccaaacccccaccttcaacaatatttcaacgcttctgcaatgatgaaaaagaaacatagttgtagtacttagcctacctagaccagcaagcattcatttttagctcgctcattttttaccatgttttccagtctgtttaacttctgcagtgccttcactacactgccttacataaaccaaatcacaataaagttcatattcagtaca

SEQ ID NO: 1350 - protein, 641 aa, Homo sapiens
MGPPLKLFKNQKYQELKQECIKDSRLFCDPTFLPENDSLFYNRLLPGKVVWKRPQDICDDPHLIVGNISNHQLTQGRLGHKPMVSAFSCLAVQESHWTKTIPNHKEQEWDPQKTEKYAGIFHFRFWHFGEWTEVVIDDLLPTINGDLVFSFSTSMNEFWNALLEKAYAKLLGCYEALDGLTITDIIVDFTGTLAETVDMQKGRYTELVEEKYKLFGELYKTFTKGGLICCSIESPNQEEQEVETDWGLLKGHTYTMTDIRKIRLGERLVEVFSAEKVYMVRLRNPLGRQEWSGPWSEISEEWQQLTASDRKNLGLVMSDDGEFWMSLEDFCRNFHKLNVCRNVNNPIFGRKELESVLGCWTVDDDPLMNRSGGCYNNRDTFLQNPQYIFTVPEDGHKVIMSLQQKDLRTYRRMGRPDNYIIGFELFKVEMNRKFRLHHLYIQERAGTSTYIDTRTVFLSKYLKKGNYVLVPTMFQHGRTSEFLLRIFSEVPVQLRELTLDMPKMSCWNLARGYPKVVTQITVHSAEDLEKKYANETVNPYLVIKCGKEEVRSPVQKNTVHAIFDTQAIFYRRTTDIPIIVQVWNSRKFCDQFLGQVTLDADPSDCRDLKSLYLRKKGGPTAKVKQGHISFKVISSDDLTEL

SEQ ID NO: 1351 - DNA, 9406 bp, Homo sapiens
cttatttcttatgaatgtcggatagctgcaccagcttggtggggaaagggtttgatgaatagcacaaagacactggctgttccctggaggctgtccctttaaaggagaatcttagtttattctggggggaggggatgcacacattagagtaggaaagagggcttggaataaaatgaaaacactcccccttcatagtcattgtactgaaatgcaaagactgcttcctaagctggagatgctaaccttgggtagctccttctgttctcttcaaggggaattttgtcaggctatggattcatttacaactgttagtcatgtgggcatgtgtgaggaaacagatgccagttttaatgtatttagcccgaagttccaatttgataggagccactgtcagtctctgaggttccaccaaaatatggaacttgattttggacactttgacgaaagagataagacatccaggaacatgcgaggctcccggatgaatgggttgcctagccccactcacagcgcccactgtagcttctaccgaaccagaaccttgcaggcactgagtaatgagaagaaagccaagaaggtacgtttctaccgcaatggggaccgctacttcaaggggattgtgtacgctgtgtcctctgaccgttttcgcagctttgacgccttgctggctgacctgacgcgatctctgtctgacaacatcaacctgcctcagggagtgcgttacatttacaccattgatggatccaggaagatcggaagcatggatgaactggaggaaggggaaagctatgtctgttcctcagacaacttctttaaaaaggtggagtacaccaagaatgtcaatcccaactggtctgtcaacgtaaaaacatctgccaatatgaaagccccccagtccttggctagcagcaacagtgcacaggccagggagaacaaggactttgtgcgccccaagctggttaccatcatccgcagtggggtgaagcctcggaaggctgtgcgtgtgcttctgaacaagaagacagcccactcttttgagcaagtcctcactgatatcacagaagccatcaaactggagaccggggttgtcaaaaaactctacactctggatggaaaacaggtaacttgtctccatgatttctttggtgatgatgatgtgtttattgcctgtggtcctgaaaaatttcgctatgctcaggatgatttttctctggatgaaaatgaatgccgagtcatgaagggaaacccatcagccacagctggcccaaaggcatccccaacacctcagaagacttcagccaagagccctggtcctatgcgccgaagcaagtctccagctgactcagcaaacggaacctccagcagccagctctctacccccaagtctaagcagtctcccatctctacgcccaccagtcctggcagcctccggaagcacaaggacctgtacctgcctctgtccttggatgactcggactcgcttggtgattccatgtaaaggaggggagagtgctcagagtccagagtacaaatccaagcctatcattgtagtagggtacttctgctcaagtgtccaacagggctattggtgctttcaagtttttattttgttgttgttgttattttgaaaaacacattgtaatatgttgggtttattttcctgtgatttctcctctgggccactgatccacagttaccaattatgagagatagattgataaccatcctttggggcagcattccagggatgcaaaatgtgctagtccatgacctttcaatggaaagcttaggtgcctgcgttatatttgccctgtctaattttgcccatacagtcttccttctgtagagggctgtttacatatacagcacttaaaatgtttgtgtgggaaaaaaaaaactcattggcagatccaagaatgacaaacacaagtgccccttttctctggatctcaagaatggtggaggaccctggaaggacagcaaggcagctccccagcctcactcttcactcctgattgaggcccgggtttgttgtccagcaccaattctggctgtcaatggggagaaataaaccaacaacttataattgtgacaccagatgcttaggatcctggtgctgggttagctaagagaatagacagaattggaaaatactgcagacatttccgaagagtttataaagcacagtgaattcctggtcaatctctccactgaggcaatttggaatcaataagcaattgataatagtttggagtaagggacttcatatacctgattcctctagaaggctgtctaacataccacatgattacatgaactgtatggtatccatctatctctgttctattgaatgccttgttaacagccaacactgaaaacactgtgagaatttgttttcaggtctgacacctttcagtctctttttatagcaagaaatcaatatcctttttataaaaattcatgtctgtatttcaggagcaaactcttcaggctccttttttataaactggtgatttttcttttgtctaaaaaacacatgaagaaaatttaccaaaaaaaaaaaaaaaagcagaagaataatgtagtttagaaattatgctgtcactgccaaacagtaacctccaggagaaaacaagatgaatagcagaggccaattcaatagaatcagttttttgatagctttttaacagttatgcttgcattaataatttcaatgtggaccagacattctaattatattttaaatgaaatgttacagcatattttaagcaactctttttatctataatcctaatatttcatactgaagacacagaaatctttcacttgtctttaacattagaaaggatttctctttactaaggactgatcatttgaaatagttttcagtcttttgagatacaggtttataacactgcttttttttttctgtaatcatagcccataatggcaaagacaactaaatttaagtgaaggtcatgcatgccaattctgtgtttgcttttagcagatatgaagatttccttatttctttgtaattgtgcagatattttgaaaggcacagcattcgaagccaagctgctgtttggctactgaatggcttgcagttgttcctccactctaaatggaatgagcttgctgtgtgtgtgtgtggtggtggtgggagggggtggtgcatgtgtgtgtgtgtgtgtgcatctgcagctgcttcaaaattaggaaatactacaggacacccctgtaatggattggtggcaactgggtggcactgctgatgtgcactgtgtaggggggaacccagtggtggtggggtagctcagatgcccctagacaagcttcagatgtctgtagctaccagaaacattttcggttcaggaaaagtgagatgatggtagtactggtttctggtgaaattgaagaaccccaaatgatgaggatctctttttgccccctctcctttttttgtagacccattcaaaaccattaataagcccattttactaagcccctatttctttctagaagctcagggttttcttagtgcctcccagaacattttgtagttaattgggaaaaagtgatacttggattagggggtgtgggcataaagaatggtgggaggcctgattttaaacttcaggccagaacccccaatgactccacccatagtctcactttaggtctcatttagtccatcacctttattttaagttgaggaagtggaggctggtaaagagcaggaccagaggaagaatccagatttccttatgcttgggcctcacactagctctctgagtatttccttgattgcggtatatgtactactagaaaataccaaatggatatattttctttaggataacctttgaaccaacaatcttcaataacaatagtacatcttccatcttacttttaatcgagtataaggaaatgtttctttatggccattttggagggagcaggggatgaggcttggcatagtccaaaatttaagtctccaataattaattgcattttaaattggcccactttcaaggcaattttttttgtgtgtctgtaactgagctcctccacccctgtcattcacttccaattttacccaatccaattttagcactcaagttccattgtgttaatttctgcacggtcaacaaacatcaagtcagcaagcatttgccaccactccctatacttctccctccttcttacacacacacacacacacacacacacaatccatctcttgcttgttcctacctcctgatttttcttccctacagaaatagaaatagggacaaagaaggggaaaatgtatatattggggctgggctgaacaactaacttcataagtagtattaactaggggtaaattgagagaaaagctccttttctcttcactgttttggaaaggatagccattagcatgactgctttgtgtccttatggactttagtattagcctagattgaattatagcgttttctagctggaaggaaccttaagatcacatcatctactcctctactccaaatttctcattcttcaggccaggaaaccgagacacagaggtaaagtaatttccccaaggtcacacagctggctggggcaggattgggtttacaacccacatctcctggctcttattccagggccttttcccactaagtagtattgccttccattaggctcctgagagttatttctcagggtcatgttgcatcttggagccacatgctgctgccctgatctcagtgggaaatccacccagcaacctaatacagccccttttccctgcattcacctggttcccatccacatgggttgcagatgtccttgaagagagtgaggcattgagggccaataggagcaatggggtccctggccttgtccatctgattcaggagatcactgctccatcgtgaggagccctctgaatagccccccactgaatgcttgccttgcccaaatggaatggaggaagattgattttctccatcagttcaccttgtgtcatctcataatggttggtctttccaggctgagggaaatgtttcttgtttccagagtagaaaaagaaagagtggaacaatagctttgttcatcctaactttctgagatggcttttcaacattttaaaaaaactagtgtggctaccattcactggcaatgatttcttttagaatatgggagtaagatgagctagagaaaataacctggtctcactgtggttgccctcatccacaatgtccccaaagccatcctgctctgatgaggacaatttccaggtataagcaaggggctttgtgacaaaaatgtaccctggctgatgttaaacattggctcctgtgtttgcaccaaaatagcaagctgtgtgctctatacactcttcccatcgtcttgtgtacactgctcctgtggccttccacagcagaaaccagggcaaaagggtccaaacacatggttttccttgctgcaaggctcttcctgggaactaagggggtatttattagttcagttctaagagacctccttctgggcttaccccactcctcaggtacttctctctccttcctccttctcctccacagtcacaagtaaccaaggaacctgaaagtggatgtgtagctatttgaagaaggcaaggaaccctgagattcttctttgaatcctctagtccaagtcttagaccagtgattggtgcttaccttgaacaaaattttgtctgtgttcctaatcccttcaatactctgggtacaatgctcccaatcaccctgcacatttgattctaaatggcttttattttttaaaaatccatatccctaggacaagagaacaggatgcctatatccccaaaatgagctccaggacactgatgggaatgatcccaaagatcaccccacctcagaaacgtctgtgccaagagacttccccagatagaaacactgggacagtggtttgaacgacttcttttatggttgtccagtttgctatggaaataaaaggcattgattttttaaaaagatgattggaacctgtctttggccacatagggccacttggatccatttccaggccttactcatatattgccttcactgaagggctttggctttaagtcccagactggtctcccaagtgaaccataagtgttttggagctcatctggggtgaggcatgagaatgttgccccatctatcccttcaggaaaaggtgccttccctccctttctcctaaagcctggtccccagaaattgtttttgtctccaaaagtctagtatggtctttatacacccagactcttagtgttgcgtcctgccttgtttccttgttaaggatctatgcagacctcccgctttggcttagctagcgtgacattggctatcatttgacaagactaacttttttttttttttttttttgactgagtctccctctgtcacctaggctggagtgcagtggcacaatcttggctcgctgcaaccttcacccttcacctcccaggtcgaagcgattctcctgcctcagtctcccgagtagctgggattacaggcgtgcgccaccaaatctggctatttttttattattattatttttagtagagatggggtttcaccatgttggccagactggtcttgaactcttggcctcaaattatctgcccacctcggcctcccaaagtgctgggattacaggcatgagccaccatgcccagctgacaagactaattttttatcccttggtttattggcttcaacatcttctggaatcagaggtgattttttcttaccttggatgcctgagactaggggagtatagaattccaattggtaattaaggcatctttctgctcctgatcagaagggcaggttagttgggagaggtcagatggcacaacagaagtcaccttgtaagtaaggcaaagacttgaaggcattagcgtttctcattactaggtcaataacctgagggaatcaatggctttttgccgctctacctcttgtgtatctctttgacttttctttctctgtctagtttcctctgttctcagtttatattctatgttatcagtctctctttccacagtacaaacatccatcctttctcctgtgcaattctgtctctccctcttattatctttatttgtactttttccttcctccctgtctaggcattgggcatgtgcctcttcttagcctgtgattttgccttgggactgatgataaattatttccagattcaatcagccctggtcctaccccagtccaatcagaagtatgttggtgggaatcaacctgatcctggccctttcttcttctccattttcattcgtaatccccctcagcagatctttacaagcagtttccttatagctcatgtatctttaggtctttgccttccaagcactgtacagaatactttgtggttcctttttagtctgacattttgtggagcagtgaagcgtgctcagagacataatcagctgaagagaaaaaatccacccatggatttatatcagctaaatactaataattgattttgtttgatgtgcccataatttttaaagctgcaatataatataatgagggaccacaggtaatttctcctgtcatttgttttggctggatgggggtgggggagtaattgcttaaagttttaccattacacattaaactctctataataatcttgtttggggcttgctaactgttgagctgttttaactaaactggtaggcaatcggagttgatttaaatgaaaagataatttaacaaatctatactataaaaagagacatttgcttaattgacatgtattttttccttctgagtcacctaaacatttactcttgacaccaactgttcatgatactgaatagacagtccatataagagaaattagtggacctaaagaagccagattgtaggtgttaatttattaaacagagtgcaaagcccttggaaatgtcactgcttggcaataccatatggaatgccaaaatttacaatgacttttctttataagttatccaaaagggatttgaacaagtaagaggttatgccaaaatgtctccaatgtatggtcctgtaatatattgcagcttgaagccaatgatcccttatgacttgtatacaactaatgcatgttttattgaattttgcatttcccacgtgtggtaagttctttaaaatgtttttgatcacctttttgtgccattaaacttgtacagaaaatgtttttatggccattttcaaagggagaaagtttaaaatggaaacagcccaccctttctgccctatagctgtagttagaattgagtacctgtagcaaaacagctgtaattggtggttgtagtgttagaggtgttagcttgctagtgactagctttggagagtaaatgcatggtattgtacatcacatttcttaactcgttttaacctctgaaaagaatatattcttctttgtagtccttcttcccacccccttgccctctccctctccctgctcccagttgtcttacagttgtaaatatctgatttgaggcccaataactcttgccaagtaaagtcagcaaacaacaaacaaaccaaaatgtggggaaaaggcatttctcaaccatctctcagcagttattgatcatttcttaaggaacagcattgtgatcaaagactcaactttacgtaaaaatcagtggtaaattggggttgtatttggccatttgattacatttcaggattgaatagttttcagaatcacatgtaatccaaagacagtaggtagtgatgtcccttatccctgcagctgttttaagatagagacctcagaagactctgcttgaccgatgaccaataattatttgaaaaaaaaagaaaaaatgagagaaataaaacagatatttaagaactttagccacctatttagaatagttatagccagaaaaaaaaacaagggcatgagttcaaatgcattactatcagtgtcctaggcaatacctaacctactctgaaattgtgattcaaaagcagtatttcaagaggcattctccttttttggtttgctgaccccacttggactggtaggtttggtgaggcccccataaaccagctggagcagacccttttcatctcctgtgcctgtaacacccctcttcccccaccccctccgcaattcaatgagggctttcttgggtcagaggacttcaaggttgtctagagaagtttgccatgtgtgtaaggtgctgtgaactgtgagtgctgaagattcgcagcattcaataccaggcagccaaagagctgctcttgcaattattttggctctcaagctctgttcttcatcgcattctcatttctgtgtacatttgcaagatgtgtgtaatgtcattttccaaaaataaaatttgatttcaata

SEQ ID NO: 1352 - protein, 441 aa, Homo sapiens
MKTLPLHSHCTEMQRLLPKLEMLTLGSSFCSLQGEFCQAMDSFTTVSHVGMCEETDASFNVFSPKFQFDRSHCQSLRFHQNMELDFGHFDERDKTSRNMRGSRMNGLPSPTHSAHCSFYRTRTLQALSNEKKAKKVRFYRNGDRYFKGIVYAVSSDRFRSFDALLADLTRSLSDNINLPQGVRYIYTIDGSRKIGSMDELEEGESYVCSSDNFFKKVEYTKNVNPNWSVNVKTSANMKAPQSLASSNSAQARENKDFVRPKLVTIIRSGVKPRKAVRVLLNKKTAHSFEQVLTDITEAIKLETGVVKKLYTLDGKQVTCLHDFFGDDDVFIACGPEKFRYAQDDFSLDENECRVMKGNPSATAGPKASPTPQKTSAKSPGPMRRSKSPADSANGTSSSQLSTPKSKQSPISTPTSPGSLRKHKDLYLPLSLDDSDSLGDSM

SEQ ID NO: 1353 - DNA, 9122 bp, Homo sapiens
cacaaggcaaagcctgctctctctgtctctctgtctcctcttctccttttttgccttattctatccgattttttccctaagcttctacctgggattttcctttggaaaagtctctgaggttccaccaaaatatggaacttgattttggacactttgacgaaagagataagacatccaggaacatgcgaggctcccggatgaatgggttgcctagccccactcacagcgcccactgtagcttctaccgaaccagaaccttgcaggcactgagtaatgagaagaaagccaagaaggtacgtttctaccgcaatggggaccgctacttcaaggggattgtgtacgctgtgtcctctgaccgttttcgcagctttgacgccttgctggctgacctgacgcgatctctgtctgacaacatcaacctgcctcagggagtgcgttacatttacaccattgatggatccaggaagatcggaagcatggatgaactggaggaaggggaaagctatgtctgttcctcagacaacttctttaaaaaggtggagtacaccaagaatgtcaatcccaactggtctgtcaacgtaaaaacatctgccaatatgaaagccccccagtccttggctagcagcaacagtgcacaggccagggagaacaaggactttgtgcgccccaagctggttaccatcatccgcagtggggtgaagcctcggaaggctgtgcgtgtgcttctgaacaagaagacagcccactcttttgagcaagtcctcactgatatcacagaagccatcaaactggagaccggggttgtcaaaaaactctacactctggatggaaaacaggtaacttgtctccatgatttctttggtgatgatgatgtgtttattgcctgtggtcctgaaaaatttcgctatgctcaggatgatttttctctggatgaaaatgaatgccgagtcatgaagggaaacccatcagccacagctggcccaaaggcatccccaacacctcagaagacttcagccaagagccctggtcctatgcgccgaagcaagtctccagctgactcagcaaacggaacctccagcagccagctctctacccccaagtctaagcagtctcccatctctacgcccaccagtcctggcagcctccggaagcacaaggacctgtacctgcctctgtccttggatgactcggactcgcttggtgattccatgtaaaggaggggagagtgctcagagtccagagtacaaatccaagcctatcattgtagtagggtacttctgctcaagtgtccaacagggctattggtgctttcaagtttttattttgttgttgttgttattttgaaaaacacattgtaatatgttgggtttattttcctgtgatttctcctctgggccactgatccacagttaccaattatgagagatagattgataaccatcctttggggcagcattccagggatgcaaaatgtgctagtccatgacctttcaatggaaagcttaggtgcctgcgttatatttgccctgtctaattttgcccatacagtcttccttctgtagagggctgtttacatatacagcacttaaaatgtttgtgtgggaaaaaaaaaactcattggcagatccaagaatgacaaacacaagtgccccttttctctggatctcaagaatggtggaggaccctggaaggacagcaaggcagctccccagcctcactcttcactcctgattgaggcccgggtttgttgtccagcaccaattctggctgtcaatggggagaaataaaccaacaacttataattgtgacaccagatgcttaggatcctggtgctgggttagctaagagaatagacagaattggaaaatactgcagacatttccgaagagtttataaagcacagtgaattcctggtcaatctctccactgaggcaatttggaatcaataagcaattgataatagtttggagtaagggacttcatatacctgattcctctagaaggctgtctaacataccacatgattacatgaactgtatggtatccatctatctctgttctattgaatgccttgttaacagccaacactgaaaacactgtgagaatttgttttcaggtctgacacctttcagtctctttttatagcaagaaatcaatatcctttttataaaaattcatgtctgtatttcaggagcaaactcttcaggctccttttttataaactggtgatttttcttttgtctaaaaaacacatgaagaaaatttaccaaaaaaaaaaaaaaaagcagaagaataatgtagtttagaaattatgctgtcactgccaaacagtaacctccaggagaaaacaagatgaatagcagaggccaattcaatagaatcagttttttgatagctttttaacagttatgcttgcattaataatttcaatgtggaccagacattctaattatattttaaatgaaatgttacagcatattttaagcaactctttttatctataatcctaatatttcatactgaagacacagaaatctttcacttgtctttaacattagaaaggatttctctttactaaggactgatcatttgaaatagttttcagtcttttgagatacaggtttataacactgcttttttttttctgtaatcatagcccataatggcaaagacaactaaatttaagtgaaggtcatgcatgccaattctgtgtttgcttttagcagatatgaagatttccttatttctttgtaattgtgcagatattttgaaaggcacagcattcgaagccaagctgctgtttggctactgaatggcttgcagttgttcctccactctaaatggaatgagcttgctgtgtgtgtgtgtggtggtggtgggagggggtggtgcatgtgtgtgtgtgtgtgtgcatctgcagctgcttcaaaattaggaaatactacaggacacccctgtaatggattggtggcaactgggtggcactgctgatgtgcactgtgtaggggggaacccagtggtggtggggtagctcagatgcccctagacaagcttcagatgtctgtagctaccagaaacattttcggttcaggaaaagtgagatgatggtagtactggtttctggtgaaattgaagaaccccaaatgatgaggatctctttttgccccctctcctttttttgtagacccattcaaaaccattaataagcccattttactaagcccctatttctttctagaagctcagggttttcttagtgcctcccagaacattttgtagttaattgggaaaaagtgatacttggattagggggtgtgggcataaagaatggtgggaggcctgattttaaacttcaggccagaacccccaatgactccacccatagtctcactttaggtctcatttagtccatcacctttattttaagttgaggaagtggaggctggtaaagagcaggaccagaggaagaatccagatttccttatgcttgggcctcacactagctctctgagtatttccttgattgcggtatatgtactactagaaaataccaaatggatatattttctttaggataacctttgaaccaacaatcttcaataacaatagtacatcttccatcttacttttaatcgagtataaggaaatgtttctttatggccattttggagggagcaggggatgaggcttggcatagtccaaaatttaagtctccaataattaattgcattttaaattggcccactttcaaggcaattttttttgtgtgtctgtaactgagctcctccacccctgtcattcacttccaattttacccaatccaattttagcactcaagttccattgtgttaatttctgcacggtcaacaaacatcaagtcagcaagcatttgccaccactccctatacttctccctccttcttacacacacacacacacacacacacacaatccatctcttgcttgttcctacctcctgatttttcttccctacagaaatagaaatagggacaaagaaggggaaaatgtatatattggggctgggctgaacaactaacttcataagtagtattaactaggggtaaattgagagaaaagctccttttctcttcactgttttggaaaggatagccattagcatgactgctttgtgtccttatggactttagtattagcctagattgaattatagcgttttctagctggaaggaaccttaagatcacatcatctactcctctactccaaatttctcattcttcaggccaggaaaccgagacacagaggtaaagtaatttccccaaggtcacacagctggctggggcaggattgggtttacaacccacatctcctggctcttattccagggccttttcccactaagtagtattgccttccattaggctcctgagagttatttctcagggtcatgttgcatcttggagccacatgctgctgccctgatctcagtgggaaatccacccagcaacctaatacagccccttttccctgcattcacctggttcccatccacatgggttgcagatgtccttgaagagagtgaggcattgagggccaataggagcaatggggtccctggccttgtccatctgattcaggagatcactgctccatcgtgaggagccctctgaatagccccccactgaatgcttgccttgcccaaatggaatggaggaagattgattttctccatcagttcaccttgtgtcatctcataatggttggtctttccaggctgagggaaatgtttcttgtttccagagtagaaaaagaaagagtggaacaatagctttgttcatcctaactttctgagatggcttttcaacattttaaaaaaactagtgtggctaccattcactggcaatgatttcttttagaatatgggagtaagatgagctagagaaaataacctggtctcactgtggttgccctcatccacaatgtccccaaagccatcctgctctgatgaggacaatttccaggtataagcaaggggctttgtgacaaaaatgtaccctggctgatgttaaacattggctcctgtgtttgcaccaaaatagcaagctgtgtgctctatacactcttcccatcgtcttgtgtacactgctcctgtggccttccacagcagaaaccagggcaaaagggtccaaacacatggttttccttgctgcaaggctcttcctgggaactaagggggtatttattagttcagttctaagagacctccttctgggcttaccccactcctcaggtacttctctctccttcctccttctcctccacagtcacaagtaaccaaggaacctgaaagtggatgtgtagctatttgaagaaggcaaggaaccctgagattcttctttgaatcctctagtccaagtcttagaccagtgattggtgcttaccttgaacaaaattttgtctgtgttcctaatcccttcaatactctgggtacaatgctcccaatcaccctgcacatttgattctaaatggcttttattttttaaaaatccatatccctaggacaagagaacaggatgcctatatccccaaaatgagctccaggacactgatgggaatgatcccaaagatcaccccacctcagaaacgtctgtgccaagagacttccccagatagaaacactgggacagtggtttgaacgacttcttttatggttgtccagtttgctatggaaataaaaggcattgattttttaaaaagatgattggaacctgtctttggccacatagggccacttggatccatttccaggccttactcatatattgccttcactgaagggctttggctttaagtcccagactggtctcccaagtgaaccataagtgttttggagctcatctggggtgaggcatgagaatgttgccccatctatcccttcaggaaaaggtgccttccctccctttctcctaaagcctggtccccagaaattgtttttgtctccaaaagtctagtatggtctttatacacccagactcttagtgttgcgtcctgccttgtttccttgttaaggatctatgcagacctcccgctttggcttagctagcgtgacattggctatcatttgacaagactaacttttttttttttttttttttgactgagtctccctctgtcacctaggctggagtgcagtggcacaatcttggctcgctgcaaccttcacccttcacctcccaggtcgaagcgattctcctgcctcagtctcccgagtagctgggattacaggcgtgcgccaccaaatctggctatttttttattattattatttttagtagagatggggtttcaccatgttggccagactggtcttgaactcttggcctcaaattatctgcccacctcggcctcccaaagtgctgggattacaggcatgagccaccatgcccagctgacaagactaattttttatcccttggtttattggcttcaacatcttctggaatcagaggtgattttttcttaccttggatgcctgagactaggggagtatagaattccaattggtaattaaggcatctttctgctcctgatcagaagggcaggttagttgggagaggtcagatggcacaacagaagtcaccttgtaagtaaggcaaagacttgaaggcattagcgtttctcattactaggtcaataacctgagggaatcaatggctttttgccgctctacctcttgtgtatctctttgacttttctttctctgtctagtttcctctgttctcagtttatattctatgttatcagtctctctttccacagtacaaacatccatcctttctcctgtgcaattctgtctctccctcttattatctttatttgtactttttccttcctccctgtctaggcattgggcatgtgcctcttcttagcctgtgattttgccttgggactgatgataaattatttccagattcaatcagccctggtcctaccccagtccaatcagaagtatgttggtgggaatcaacctgatcctggccctttcttcttctccattttcattcgtaatccccctcagcagatctttacaagcagtttccttatagctcatgtatctttaggtctttgccttccaagcactgtacagaatactttgtggttcctttttagtctgacattttgtggagcagtgaagcgtgctcagagacataatcagctgaagagaaaaaatccacccatggatttatatcagctaaatactaataattgattttgtttgatgtgcccataatttttaaagctgcaatataatataatgagggaccacaggtaatttctcctgtcatttgttttggctggatgggggtgggggagtaattgcttaaagttttaccattacacattaaactctctataataatcttgtttggggcttgctaactgttgagctgttttaactaaactggtaggcaatcggagttgatttaaatgaaaagataatttaacaaatctatactataaaaagagacatttgcttaattgacatgtattttttccttctgagtcacctaaacatttactcttgacaccaactgttcatgatactgaatagacagtccatataagagaaattagtggacctaaagaagccagattgtaggtgttaatttattaaacagagtgcaaagcccttggaaatgtcactgcttggcaataccatatggaatgccaaaatttacaatgacttttctttataagttatccaaaagggatttgaacaagtaagaggttatgccaaaatgtctccaatgtatggtcctgtaatatattgcagcttgaagccaatgatcccttatgacttgtatacaactaatgcatgttttattgaattttgcatttcccacgtgtggtaagttctttaaaatgtttttgatcacctttttgtgccattaaacttgtacagaaaatgtttttatggccattttcaaagggagaaagtttaaaatggaaacagcccaccctttctgccctatagctgtagttagaattgagtacctgtagcaaaacagctgtaattggtggttgtagtgttagaggtgttagcttgctagtgactagctttggagagtaaatgcatggtattgtacatcacatttcttaactcgttttaacctctgaaaagaatatattcttctttgtagtccttcttcccacccccttgccctctccctctccctgctcccagttgtcttacagttgtaaatatctgatttgaggcccaataactcttgccaagtaaagtcagcaaacaacaaacaaaccaaaatgtggggaaaaggcatttctcaaccatctctcagcagttattgatcatttcttaaggaacagcattgtgatcaaagactcaactttacgtaaaaatcagtggtaaattggggttgtatttggccatttgattacatttcaggattgaatagttttcagaatcacatgtaatccaaagacagtaggtagtgatgtcccttatccctgcagctgttttaagatagagacctcagaagactctgcttgaccgatgaccaataattatttgaaaaaaaaagaaaaaatgagagaaataaaacagatatttaagaactttagccacctatttagaatagttatagccagaaaaaaaaacaagggcatgagttcaaatgcattactatcagtgtcctaggcaatacctaacctactctgaaattgtgattcaaaagcagtatttcaagaggcattctccttttttggtttgctgaccccacttggactggtaggtttggtgaggcccccataaaccagctggagcagacccttttcatctcctgtgcctgtaacacccctcttcccccaccccctccgcaattcaatgagggctttcttgggtcagaggacttcaaggttgtctagagaagtttgccatgtgtgtaaggtgctgtgaactgtgagtgctgaagattcgcagcattcaataccaggcagccaaagagctgctcttgcaattattttggctctcaagctctgttcttcatcgcattctcatttctgtgtacatttgcaagatgtgtgtaatgtcattttccaaaaataaaatttgatttcaata

SEQ ID NO: 1354 - protein, 360 aa, Homo sapiens
MELDFGHFDERDKTSRNMRGSRMNGLPSPTHSAHCSFYRTRTLQALSNEKKAKKVRFYRNGDRYFKGIVYAVSSDRFRSFDALLADLTRSLSDNINLPQGVRYIYTIDGSRKIGSMDELEEGESYVCSSDNFFKKVEYTKNVNPNWSVNVKTSANMKAPQSLASSNSAQARENKDFVRPKLVTIIRSGVKPRKAVRVLLNKKTAHSFEQVLTDITEAIKLETGVVKKLYTLDGKQVTCLHDFFGDDDVFIACGPEKFRYAQDDFSLDENECRVMKGNPSATAGPKASPTPQKTSAKSPGPMRRSKSPADSANGTSSSQLSTPKSKQSPISTPTSPGSLRKHKDLYLPLSLDDSDSLGDSM

SEQ ID NO: 1355 - DNA, 9069 bp, Homo sapiens
tttctttctctcagcatctccacccaaccagcagaaaaccggtctctgaggttccaccaaaatatggaacttgattttggacactttgacgaaagagataagacatccaggaacatgcgaggctcccggatgaatgggttgcctagccccactcacagcgcccactgtagcttctaccgaaccagaaccttgcaggcactgagtaatgagaagaaagccaagaaggtacgtttctaccgcaatggggaccgctacttcaaggggattgtgtacgctgtgtcctctgaccgttttcgcagctttgacgccttgctggctgacctgacgcgatctctgtctgacaacatcaacctgcctcagggagtgcgttacatttacaccattgatggatccaggaagatcggaagcatggatgaactggaggaaggggaaagctatgtctgttcctcagacaacttctttaaaaaggtggagtacaccaagaatgtcaatcccaactggtctgtcaacgtaaaaacatctgccaatatgaaagccccccagtccttggctagcagcaacagtgcacaggccagggagaacaaggactttgtgcgccccaagctggttaccatcatccgcagtggggtgaagcctcggaaggctgtgcgtgtgcttctgaacaagaagacagcccactcttttgagcaagtcctcactgatatcacagaagccatcaaactggagaccggggttgtcaaaaaactctacactctggatggaaaacaggtaacttgtctccatgatttctttggtgatgatgatgtgtttattgcctgtggtcctgaaaaatttcgctatgctcaggatgatttttctctggatgaaaatgaatgccgagtcatgaagggaaacccatcagccacagctggcccaaaggcatccccaacacctcagaagacttcagccaagagccctggtcctatgcgccgaagcaagtctccagctgactcaggtaacgaccaagacgcaaacggaacctccagcagccagctctctacccccaagtctaagcagtctcccatctctacgcccaccagtcctggcagcctccggaagcacaaggacctgtacctgcctctgtccttggatgactcggactcgcttggtgattccatgtaaaggaggggagagtgctcagagtccagagtacaaatccaagcctatcattgtagtagggtacttctgctcaagtgtccaacagggctattggtgctttcaagtttttattttgttgttgttgttattttgaaaaacacattgtaatatgttgggtttattttcctgtgatttctcctctgggccactgatccacagttaccaattatgagagatagattgataaccatcctttggggcagcattccagggatgcaaaatgtgctagtccatgacctttcaatggaaagcttaggtgcctgcgttatatttgccctgtctaattttgcccatacagtcttccttctgtagagggctgtttacatatacagcacttaaaatgtttgtgtgggaaaaaaaaaactcattggcagatccaagaatgacaaacacaagtgccccttttctctggatctcaagaatggtggaggaccctggaaggacagcaaggcagctccccagcctcactcttcactcctgattgaggcccgggtttgttgtccagcaccaattctggctgtcaatggggagaaataaaccaacaacttataattgtgacaccagatgcttaggatcctggtgctgggttagctaagagaatagacagaattggaaaatactgcagacatttccgaagagtttataaagcacagtgaattcctggtcaatctctccactgaggcaatttggaatcaataagcaattgataatagtttggagtaagggacttcatatacctgattcctctagaaggctgtctaacataccacatgattacatgaactgtatggtatccatctatctctgttctattgaatgccttgttaacagccaacactgaaaacactgtgagaatttgttttcaggtctgacacctttcagtctctttttatagcaagaaatcaatatcctttttataaaaattcatgtctgtatttcaggagcaaactcttcaggctccttttttataaactggtgatttttcttttgtctaaaaaacacatgaagaaaatttaccaaaaaaaaaaaaaaaagcagaagaataatgtagtttagaaattatgctgtcactgccaaacagtaacctccaggagaaaacaagatgaatagcagaggccaattcaatagaatcagttttttgatagctttttaacagttatgcttgcattaataatttcaatgtggaccagacattctaattatattttaaatgaaatgttacagcatattttaagcaactctttttatctataatcctaatatttcatactgaagacacagaaatctttcacttgtctttaacattagaaaggatttctctttactaaggactgatcatttgaaatagttttcagtcttttgagatacaggtttataacactgcttttttttttctgtaatcatagcccataatggcaaagacaactaaatttaagtgaaggtcatgcatgccaattctgtgtttgcttttagcagatatgaagatttccttatttctttgtaattgtgcagatattttgaaaggcacagcattcgaagccaagctgctgtttggctactgaatggcttgcagttgttcctccactctaaatggaatgagcttgctgtgtgtgtgtgtggtggtggtgggagggggtggtgcatgtgtgtgtgtgtgtgtgcatctgcagctgcttcaaaattaggaaatactacaggacacccctgtaatggattggtggcaactgggtggcactgctgatgtgcactgtgtaggggggaacccagtggtggtggggtagctcagatgcccctagacaagcttcagatgtctgtagctaccagaaacattttcggttcaggaaaagtgagatgatggtagtactggtttctggtgaaattgaagaaccccaaatgatgaggatctctttttgccccctctcctttttttgtagacccattcaaaaccattaataagcccattttactaagcccctatttctttctagaagctcagggttttcttagtgcctcccagaacattttgtagttaattgggaaaaagtgatacttggattagggggtgtgggcataaagaatggtgggaggcctgattttaaacttcaggccagaacccccaatgactccacccatagtctcactttaggtctcatttagtccatcacctttattttaagttgaggaagtggaggctggtaaagagcaggaccagaggaagaatccagatttccttatgcttgggcctcacactagctctctgagtatttccttgattgcggtatatgtactactagaaaataccaaatggatatattttctttaggataacctttgaaccaacaatcttcaataacaatagtacatcttccatcttacttttaatcgagtataaggaaatgtttctttatggccattttggagggagcaggggatgaggcttggcatagtccaaaatttaagtctccaataattaattgcattttaaattggcccactttcaaggcaattttttttgtgtgtctgtaactgagctcctccacccctgtcattcacttccaattttacccaatccaattttagcactcaagttccattgtgttaatttctgcacggtcaacaaacatcaagtcagcaagcatttgccaccactccctatacttctccctccttcttacacacacacacacacacacacacacaatccatctcttgcttgttcctacctcctgatttttcttccctacagaaatagaaatagggacaaagaaggggaaaatgtatatattggggctgggctgaacaactaacttcataagtagtattaactaggggtaaattgagagaaaagctccttttctcttcactgttttggaaaggatagccattagcatgactgctttgtgtccttatggactttagtattagcctagattgaattatagcgttttctagctggaaggaaccttaagatcacatcatctactcctctactccaaatttctcattcttcaggccaggaaaccgagacacagaggtaaagtaatttccccaaggtcacacagctggctggggcaggattgggtttacaacccacatctcctggctcttattccagggccttttcccactaagtagtattgccttccattaggctcctgagagttatttctcagggtcatgttgcatcttggagccacatgctgctgccctgatctcagtgggaaatccacccagcaacctaatacagccccttttccctgcattcacctggttcccatccacatgggttgcagatgtccttgaagagagtgaggcattgagggccaataggagcaatggggtccctggccttgtccatctgattcaggagatcactgctccatcgtgaggagccctctgaatagccccccactgaatgcttgccttgcccaaatggaatggaggaagattgattttctccatcagttcaccttgtgtcatctcataatggttggtctttccaggctgagggaaatgtttcttgtttccagagtagaaaaagaaagagtggaacaatagctttgttcatcctaactttctgagatggcttttcaacattttaaaaaaactagtgtggctaccattcactggcaatgatttcttttagaatatgggagtaagatgagctagagaaaataacctggtctcactgtggttgccctcatccacaatgtccccaaagccatcctgctctgatgaggacaatttccaggtataagcaaggggctttgtgacaaaaatgtaccctggctgatgttaaacattggctcctgtgtttgcaccaaaatagcaagctgtgtgctctatacactcttcccatcgtcttgtgtacactgctcctgtggccttccacagcagaaaccagggcaaaagggtccaaacacatggttttccttgctgcaaggctcttcctgggaactaagggggtatttattagttcagttctaagagacctccttctgggcttaccccactcctcaggtacttctctctccttcctccttctcctccacagtcacaagtaaccaaggaacctgaaagtggatgtgtagctatttgaagaaggcaaggaaccctgagattcttctttgaatcctctagtccaagtcttagaccagtgattggtgcttaccttgaacaaaattttgtctgtgttcctaatcccttcaatactctgggtacaatgctcccaatcaccctgcacatttgattctaaatggcttttattttttaaaaatccatatccctaggacaagagaacaggatgcctatatccccaaaatgagctccaggacactgatgggaatgatcccaaagatcaccccacctcagaaacgtctgtgccaagagacttccccagatagaaacactgggacagtggtttgaacgacttcttttatggttgtccagtttgctatggaaataaaaggcattgattttttaaaaagatgattggaacctgtctttggccacatagggccacttggatccatttccaggccttactcatatattgccttcactgaagggctttggctttaagtcccagactggtctcccaagtgaaccataagtgttttggagctcatctggggtgaggcatgagaatgttgccccatctatcccttcaggaaaaggtgccttccctccctttctcctaaagcctggtccccagaaattgtttttgtctccaaaagtctagtatggtctttatacacccagactcttagtgttgcgtcctgccttgtttccttgttaaggatctatgcagacctcccgctttggcttagctagcgtgacattggctatcatttgacaagactaacttttttttttttttttttttgactgagtctccctctgtcacctaggctggagtgcagtggcacaatcttggctcgctgcaaccttcacccttcacctcccaggtcgaagcgattctcctgcctcagtctcccgagtagctgggattacaggcgtgcgccaccaaatctggctatttttttattattattatttttagtagagatggggtttcaccatgttggccagactggtcttgaactcttggcctcaaattatctgcccacctcggcctcccaaagtgctgggattacaggcatgagccaccatgcccagctgacaagactaattttttatcccttggtttattggcttcaacatcttctggaatcagaggtgattttttcttaccttggatgcctgagactaggggagtatagaattccaattggtaattaaggcatctttctgctcctgatcagaagggcaggttagttgggagaggtcagatggcacaacagaagtcaccttgtaagtaaggcaaagacttgaaggcattagcgtttctcattactaggtcaataacctgagggaatcaatggctttttgccgctctacctcttgtgtatctctttgacttttctttctctgtctagtttcctctgttctcagtttatattctatgttatcagtctctctttccacagtacaaacatccatcctttctcctgtgcaattctgtctctccctcttattatctttatttgtactttttccttcctccctgtctaggcattgggcatgtgcctcttcttagcctgtgattttgccttgggactgatgataaattatttccagattcaatcagccctggtcctaccccagtccaatcagaagtatgttggtgggaatcaacctgatcctggccctttcttcttctccattttcattcgtaatccccctcagcagatctttacaagcagtttccttatagctcatgtatctttaggtctttgccttccaagcactgtacagaatactttgtggttcctttttagtctgacattttgtggagcagtgaagcgtgctcagagacataatcagctgaagagaaaaaatccacccatggatttatatcagctaaatactaataattgattttgtttgatgtgcccataatttttaaagctgcaatataatataatgagggaccacaggtaatttctcctgtcatttgttttggctggatgggggtgggggagtaattgcttaaagttttaccattacacattaaactctctataataatcttgtttggggcttgctaactgttgagctgttttaactaaactggtaggcaatcggagttgatttaaatgaaaagataatttaacaaatctatactataaaaagagacatttgcttaattgacatgtattttttccttctgagtcacctaaacatttactcttgacaccaactgttcatgatactgaatagacagtccatataagagaaattagtggacctaaagaagccagattgtaggtgttaatttattaaacagagtgcaaagcccttggaaatgtcactgcttggcaataccatatggaatgccaaaatttacaatgacttttctttataagttatccaaaagggatttgaacaagtaagaggttatgccaaaatgtctccaatgtatggtcctgtaatatattgcagcttgaagccaatgatcccttatgacttgtatacaactaatgcatgttttattgaattttgcatttcccacgtgtggtaagttctttaaaatgtttttgatcacctttttgtgccattaaacttgtacagaaaatgtttttatggccattttcaaagggagaaagtttaaaatggaaacagcccaccctttctgccctatagctgtagttagaattgagtacctgtagcaaaacagctgtaattggtggttgtagtgttagaggtgttagcttgctagtgactagctttggagagtaaatgcatggtattgtacatcacatttcttaactcgttttaacctctgaaaagaatatattcttctttgtagtccttcttcccacccccttgccctctccctctccctgctcccagttgtcttacagttgtaaatatctgatttgaggcccaataactcttgccaagtaaagtcagcaaacaacaaacaaaccaaaatgtggggaaaaggcatttctcaaccatctctcagcagttattgatcatttcttaaggaacagcattgtgatcaaagactcaactttacgtaaaaatcagtggtaaattggggttgtatttggccatttgattacatttcaggattgaatagttttcagaatcacatgtaatccaaagacagtaggtagtgatgtcccttatccctgcagctgttttaagatagagacctcagaagactctgcttgaccgatgaccaataattatttgaaaaaaaaagaaaaaatgagagaaataaaacagatatttaagaactttagccacctatttagaatagttatagccagaaaaaaaaacaagggcatgagttcaaatgcattactatcagtgtcctaggcaatacctaacctactctgaaattgtgattcaaaagcagtatttcaagaggcattctccttttttggtttgctgaccccacttggactggtaggtttggtgaggcccccataaaccagctggagcagacccttttcatctcctgtgcctgtaacacccctcttcccccaccccctccgcaattcaatgagggctttcttgggtcagaggacttcaaggttgtctagagaagtttgccatgtgtgtaaggtgctgtgaactgtgagtgctgaagattcgcagcattcaataccaggcagccaaagagctgctcttgcaattattttggctctcaagctctgttcttcatcgcattctcatttctgtgtacatttgcaagatgtgtgtaatgtcattttccaaaaataaaatttgatttcaata

SEQ ID NO: 1356 - protein, 365 aa, Homo sapiens
MELDFGHFDERDKTSRNMRGSRMNGLPSPTHSAHCSFYRTRTLQALSNEKKAKKVRFYRNGDRYFKGIVYAVSSDRFRSFDALLADLTRSLSDNINLPQGVRYIYTIDGSRKIGSMDELEEGESYVCSSDNFFKKVEYTKNVNPNWSVNVKTSANMKAPQSLASSNSAQARENKDFVRPKLVTIIRSGVKPRKAVRVLLNKKTAHSFEQVLTDITEAIKLETGVVKKLYTLDGKQVTCLHDFFGDDDVFIACGPEKFRYAQDDFSLDENECRVMKGNPSATAGPKASPTPQKTSAKSPGPMRRSKSPADSGNDQDANGTSSSQLSTPKSKQSPISTPTSPGSLRKHKDLYLPLSLDDSDSLGDSM

SEQ ID NO: 1357 - DNA, 9054 bp, Homo sapiens
tttctttctctcagcatctccacccaaccagcagaaaaccggtctctgaggttccaccaaaatatggaacttgattttggacactttgacgaaagagataagacatccaggaacatgcgaggctcccggatgaatgggttgcctagccccactcacagcgcccactgtagcttctaccgaaccagaaccttgcaggcactgagtaatgagaagaaagccaagaaggtacgtttctaccgcaatggggaccgctacttcaaggggattgtgtacgctgtgtcctctgaccgttttcgcagctttgacgccttgctggctgacctgacgcgatctctgtctgacaacatcaacctgcctcagggagtgcgttacatttacaccattgatggatccaggaagatcggaagcatggatgaactggaggaaggggaaagctatgtctgttcctcagacaacttctttaaaaaggtggagtacaccaagaatgtcaatcccaactggtctgtcaacgtaaaaacatctgccaatatgaaagccccccagtccttggctagcagcaacagtgcacaggccagggagaacaaggactttgtgcgccccaagctggttaccatcatccgcagtggggtgaagcctcggaaggctgtgcgtgtgcttctgaacaagaagacagcccactcttttgagcaagtcctcactgatatcacagaagccatcaaactggagaccggggttgtcaaaaaactctacactctggatggaaaacaggtaacttgtctccatgatttctttggtgatgatgatgtgtttattgcctgtggtcctgaaaaatttcgctatgctcaggatgatttttctctggatgaaaatgaatgccgagtcatgaagggaaacccatcagccacagctggcccaaaggcatccccaacacctcagaagacttcagccaagagccctggtcctatgcgccgaagcaagtctccagctgactcagcaaacggaacctccagcagccagctctctacccccaagtctaagcagtctcccatctctacgcccaccagtcctggcagcctccggaagcacaaggacctgtacctgcctctgtccttggatgactcggactcgcttggtgattccatgtaaaggaggggagagtgctcagagtccagagtacaaatccaagcctatcattgtagtagggtacttctgctcaagtgtccaacagggctattggtgctttcaagtttttattttgttgttgttgttattttgaaaaacacattgtaatatgttgggtttattttcctgtgatttctcctctgggccactgatccacagttaccaattatgagagatagattgataaccatcctttggggcagcattccagggatgcaaaatgtgctagtccatgacctttcaatggaaagcttaggtgcctgcgttatatttgccctgtctaattttgcccatacagtcttccttctgtagagggctgtttacatatacagcacttaaaatgtttgtgtgggaaaaaaaaaactcattggcagatccaagaatgacaaacacaagtgccccttttctctggatctcaagaatggtggaggaccctggaaggacagcaaggcagctccccagcctcactcttcactcctgattgaggcccgggtttgttgtccagcaccaattctggctgtcaatggggagaaataaaccaacaacttataattgtgacaccagatgcttaggatcctggtgctgggttagctaagagaatagacagaattggaaaatactgcagacatttccgaagagtttataaagcacagtgaattcctggtcaatctctccactgaggcaatttggaatcaataagcaattgataatagtttggagtaagggacttcatatacctgattcctctagaaggctgtctaacataccacatgattacatgaactgtatggtatccatctatctctgttctattgaatgccttgttaacagccaacactgaaaacactgtgagaatttgttttcaggtctgacacctttcagtctctttttatagcaagaaatcaatatcctttttataaaaattcatgtctgtatttcaggagcaaactcttcaggctccttttttataaactggtgatttttcttttgtctaaaaaacacatgaagaaaatttaccaaaaaaaaaaaaaaaagcagaagaataatgtagtttagaaattatgctgtcactgccaaacagtaacctccaggagaaaacaagatgaatagcagaggccaattcaatagaatcagttttttgatagctttttaacagttatgcttgcattaataatttcaatgtggaccagacattctaattatattttaaatgaaatgttacagcatattttaagcaactctttttatctataatcctaatatttcatactgaagacacagaaatctttcacttgtctttaacattagaaaggatttctctttactaaggactgatcatttgaaatagttttcagtcttttgagatacaggtttataacactgcttttttttttctgtaatcatagcccataatggcaaagacaactaaatttaagtgaaggtcatgcatgccaattctgtgtttgcttttagcagatatgaagatttccttatttctttgtaattgtgcagatattttgaaaggcacagcattcgaagccaagctgctgtttggctactgaatggcttgcagttgttcctccactctaaatggaatgagcttgctgtgtgtgtgtgtggtggtggtgggagggggtggtgcatgtgtgtgtgtgtgtgtgcatctgcagctgcttcaaaattaggaaatactacaggacacccctgtaatggattggtggcaactgggtggcactgctgatgtgcactgtgtaggggggaacccagtggtggtggggtagctcagatgcccctagacaagcttcagatgtctgtagctaccagaaacattttcggttcaggaaaagtgagatgatggtagtactggtttctggtgaaattgaagaaccccaaatgatgaggatctctttttgccccctctcctttttttgtagacccattcaaaaccattaataagcccattttactaagcccctatttctttctagaagctcagggttttcttagtgcctcccagaacattttgtagttaattgggaaaaagtgatacttggattagggggtgtgggcataaagaatggtgggaggcctgattttaaacttcaggccagaacccccaatgactccacccatagtctcactttaggtctcatttagtccatcacctttattttaagttgaggaagtggaggctggtaaagagcaggaccagaggaagaatccagatttccttatgcttgggcctcacactagctctctgagtatttccttgattgcggtatatgtactactagaaaataccaaatggatatattttctttaggataacctttgaaccaacaatcttcaataacaatagtacatcttccatcttacttttaatcgagtataaggaaatgtttctttatggccattttggagggagcaggggatgaggcttggcatagtccaaaatttaagtctccaataattaattgcattttaaattggcccactttcaaggcaattttttttgtgtgtctgtaactgagctcctccacccctgtcattcacttccaattttacccaatccaattttagcactcaagttccattgtgttaatttctgcacggtcaacaaacatcaagtcagcaagcatttgccaccactccctatacttctccctccttcttacacacacacacacacacacacacacaatccatctcttgcttgttcctacctcctgatttttcttccctacagaaatagaaatagggacaaagaaggggaaaatgtatatattggggctgggctgaacaactaacttcataagtagtattaactaggggtaaattgagagaaaagctccttttctcttcactgttttggaaaggatagccattagcatgactgctttgtgtccttatggactttagtattagcctagattgaattatagcgttttctagctggaaggaaccttaagatcacatcatctactcctctactccaaatttctcattcttcaggccaggaaaccgagacacagaggtaaagtaatttccccaaggtcacacagctggctggggcaggattgggtttacaacccacatctcctggctcttattccagggccttttcccactaagtagtattgccttccattaggctcctgagagttatttctcagggtcatgttgcatcttggagccacatgctgctgccctgatctcagtgggaaatccacccagcaacctaatacagccccttttccctgcattcacctggttcccatccacatgggttgcagatgtccttgaagagagtgaggcattgagggccaataggagcaatggggtccctggccttgtccatctgattcaggagatcactgctccatcgtgaggagccctctgaatagccccccactgaatgcttgccttgcccaaatggaatggaggaagattgattttctccatcagttcaccttgtgtcatctcataatggttggtctttccaggctgagggaaatgtttcttgtttccagagtagaaaaagaaagagtggaacaatagctttgttcatcctaactttctgagatggcttttcaacattttaaaaaaactagtgtggctaccattcactggcaatgatttcttttagaatatgggagtaagatgagctagagaaaataacctggtctcactgtggttgccctcatccacaatgtccccaaagccatcctgctctgatgaggacaatttccaggtataagcaaggggctttgtgacaaaaatgtaccctggctgatgttaaacattggctcctgtgtttgcaccaaaatagcaagctgtgtgctctatacactcttcccatcgtcttgtgtacactgctcctgtggccttccacagcagaaaccagggcaaaagggtccaaacacatggttttccttgctgcaaggctcttcctgggaactaagggggtatttattagttcagttctaagagacctccttctgggcttaccccactcctcaggtacttctctctccttcctccttctcctccacagtcacaagtaaccaaggaacctgaaagtggatgtgtagctatttgaagaaggcaaggaaccctgagattcttctttgaatcctctagtccaagtcttagaccagtgattggtgcttaccttgaacaaaattttgtctgtgttcctaatcccttcaatactctgggtacaatgctcccaatcaccctgcacatttgattctaaatggcttttattttttaaaaatccatatccctaggacaagagaacaggatgcctatatccccaaaatgagctccaggacactgatgggaatgatcccaaagatcaccccacctcagaaacgtctgtgccaagagacttccccagatagaaacactgggacagtggtttgaacgacttcttttatggttgtccagtttgctatggaaataaaaggcattgattttttaaaaagatgattggaacctgtctttggccacatagggccacttggatccatttccaggccttactcatatattgccttcactgaagggctttggctttaagtcccagactggtctcccaagtgaaccataagtgttttggagctcatctggggtgaggcatgagaatgttgccccatctatcccttcaggaaaaggtgccttccctccctttctcctaaagcctggtccccagaaattgtttttgtctccaaaagtctagtatggtctttatacacccagactcttagtgttgcgtcctgccttgtttccttgttaaggatctatgcagacctcccgctttggcttagctagcgtgacattggctatcatttgacaagactaacttttttttttttttttttttgactgagtctccctctgtcacctaggctggagtgcagtggcacaatcttggctcgctgcaaccttcacccttcacctcccaggtcgaagcgattctcctgcctcagtctcccgagtagctgggattacaggcgtgcgccaccaaatctggctatttttttattattattatttttagtagagatggggtttcaccatgttggccagactggtcttgaactcttggcctcaaattatctgcccacctcggcctcccaaagtgctgggattacaggcatgagccaccatgcccagctgacaagactaattttttatcccttggtttattggcttcaacatcttctggaatcagaggtgattttttcttaccttggatgcctgagactaggggagtatagaattccaattggtaattaaggcatctttctgctcctgatcagaagggcaggttagttgggagaggtcagatggcacaacagaagtcaccttgtaagtaaggcaaagacttgaaggcattagcgtttctcattactaggtcaataacctgagggaatcaatggctttttgccgctctacctcttgtgtatctctttgacttttctttctctgtctagtttcctctgttctcagtttatattctatgttatcagtctctctttccacagtacaaacatccatcctttctcctgtgcaattctgtctctccctcttattatctttatttgtactttttccttcctccctgtctaggcattgggcatgtgcctcttcttagcctgtgattttgccttgggactgatgataaattatttccagattcaatcagccctggtcctaccccagtccaatcagaagtatgttggtgggaatcaacctgatcctggccctttcttcttctccattttcattcgtaatccccctcagcagatctttacaagcagtttccttatagctcatgtatctttaggtctttgccttccaagcactgtacagaatactttgtggttcctttttagtctgacattttgtggagcagtgaagcgtgctcagagacataatcagctgaagagaaaaaatccacccatggatttatatcagctaaatactaataattgattttgtttgatgtgcccataatttttaaagctgcaatataatataatgagggaccacaggtaatttctcctgtcatttgttttggctggatgggggtgggggagtaattgcttaaagttttaccattacacattaaactctctataataatcttgtttggggcttgctaactgttgagctgttttaactaaactggtaggcaatcggagttgatttaaatgaaaagataatttaacaaatctatactataaaaagagacatttgcttaattgacatgtattttttccttctgagtcacctaaacatttactcttgacaccaactgttcatgatactgaatagacagtccatataagagaaattagtggacctaaagaagccagattgtaggtgttaatttattaaacagagtgcaaagcccttggaaatgtcactgcttggcaataccatatggaatgccaaaatttacaatgacttttctttataagttatccaaaagggatttgaacaagtaagaggttatgccaaaatgtctccaatgtatggtcctgtaatatattgcagcttgaagccaatgatcccttatgacttgtatacaactaatgcatgttttattgaattttgcatttcccacgtgtggtaagttctttaaaatgtttttgatcacctttttgtgccattaaacttgtacagaaaatgtttttatggccattttcaaagggagaaagtttaaaatggaaacagcccaccctttctgccctatagctgtagttagaattgagtacctgtagcaaaacagctgtaattggtggttgtagtgttagaggtgttagcttgctagtgactagctttggagagtaaatgcatggtattgtacatcacatttcttaactcgttttaacctctgaaaagaatatattcttctttgtagtccttcttcccacccccttgccctctccctctccctgctcccagttgtcttacagttgtaaatatctgatttgaggcccaataactcttgccaagtaaagtcagcaaacaacaaacaaaccaaaatgtggggaaaaggcatttctcaaccatctctcagcagttattgatcatttcttaaggaacagcattgtgatcaaagactcaactttacgtaaaaatcagtggtaaattggggttgtatttggccatttgattacatttcaggattgaatagttttcagaatcacatgtaatccaaagacagtaggtagtgatgtcccttatccctgcagctgttttaagatagagacctcagaagactctgcttgaccgatgaccaataattatttgaaaaaaaaagaaaaaatgagagaaataaaacagatatttaagaactttagccacctatttagaatagttatagccagaaaaaaaaacaagggcatgagttcaaatgcattactatcagtgtcctaggcaatacctaacctactctgaaattgtgattcaaaagcagtatttcaagaggcattctccttttttggtttgctgaccccacttggactggtaggtttggtgaggcccccataaaccagctggagcagacccttttcatctcctgtgcctgtaacacccctcttcccccaccccctccgcaattcaatgagggctttcttgggtcagaggacttcaaggttgtctagagaagtttgccatgtgtgtaaggtgctgtgaactgtgagtgctgaagattcgcagcattcaataccaggcagccaaagagctgctcttgcaattattttggctctcaagctctgttcttcatcgcattctcatttctgtgtacatttgcaagatgtgtgtaatgtcattttccaaaaataaaatttgatttcaata

SEQ ID NO: 1358 - protein, 360 aa, Homo sapiens; identical to SEQ ID NO: 1354

SEQ ID NO: 1359 - DNA, 1451 bp, Homo sapiens
ggagataagattcagaggttgaggatggggtgtcctggtggactgaaggtagcctactagctgtacatgggtgacaacttgaaacttcagaaccctgaagtttaaaaaattctaaaggtgcctgtcatctcagagagtgacgtaagtgttctttctttatttgggggaagtccaggagaacatattacagacatgtttaatccacatgcattagatgttcctgctgtaatttttgacaatggttcaggactctgcaaagcaggcctgtctggagagattggaccccgccatgtcatcagctccgtcttgggacattgtaaattcaatgtgcctttagcaagacttaatcagaagtacttcgtggggcaagaagccctgtacaagtatgaggccctacatttgcactaccccattgagcgtggactggtaacaggatgggatgacatggagaaactctggaaacatctctttgagcgggagcttggagtaaaacccagccaacagcctgtacttatgaccgagccctctttgaatcctagggaaattcgagaaaagctagcagaaatgatgtttgagaccttcagtgtgcctggtttctacctgtctaatcatgcggtggcagcgctctatgcctctgcctgtgtcacaggcctggtggtggacagtggagatggggtcacttgcactgtccccatctttgagggttactccctgcctcacgcagtcaccaaactctgtatggcagggagggacatcacagagcacctcacccggctcctctttgctagcgggtttaacttcccttgcatactcaacaaggccgtggtaaataacatcaaagagaagttgtgctacatcgccttggagccagagaaagagctacgcaagagccggggagaggtcctgggagcatacagactgccagatggacatgtcatccactttggggatgagctgtaccaagtgcccgaggttctttttgcacctgaccagctgggcatccacagcccaggactctcaaaaatggtctccagcagcatcatgaagtgtgacactgacatccagaataaactttatgcagacattgtactctccgggggcaccactctcctccctgggctggaggaaaggctcatgaaggaagtggaacagctggcttccaaaggtactcccatcaagatcacagcttctcctgatagatgcttctctgcatggattggtgcatccatcatgacctctatgagcagtttcaagcagatgtgggtcacctcggcagacttcaaggagtatgggacatctgtggttcaaagaaggtgcttttaaagatccttgagcagaggagacatcttgaagtgtcagattacaggagtaccagtgggagatggcattttcttctgggcttcagcatgatgttcaataaaagttttgccattccaaaaaaaaaaaaaaaa

SEQ ID NO: 1360 - protein, 376 aa, Homo sapiens
MFNPHALDVPAVIFDNGSGLCKAGLSGEIGPRHVISSVLGHCKFNVPLARLNQKYFVGQEALYKYEALHLHYPIERGLVTGWDDMEKLWKHLFERELGVKPSQQPVLMTEPSLNPREIREKLAEMMFETFSVPGFYLSNHAVAALYASACVTGLVVDSGDGVTCTVPIFEGYSLPHAVTKLCMAGRDITEHLTRLLFASGFNFPCILNKAVVNNIKEKLCYIALEPEKELRKSRGEVLGAYRLPDGHVIHFGDELYQVPEVLFAPDQLGIHSPGLSKMVSSSIMKCDTDIQNKLYADIVLSGGTTLLPGLEERLMKEVEQLASKGTPIKITASPDRCFSAWIGASIMTSMSSFKQMWVTSADFKEYGTSVVQRRCF

SEQ ID NO: 1361 - DNA, 1126 bp, Homo sapiens
atatatcagaccatcagaaggatttgtataaagagtgactctcctatgaaggtaaaggccacccctcttcagttccagtgactgagatacatttttccaatcctgggggcaaatacagacacagcaagttccttcttccctttggaaatttggcagctgccttcaccagtgagcacaaagccacatttcaaaggaaactgacaaattatccccagctgccagaagaagaaatcctcactggacggcttcctgtttcctgtggttcattatctgattggctgcagggatgaaagtttttaagttcataggactgatgatcctcctcacctctgcgttttcagccggttcaggacaaagtccaatgactgtgctgtgctccatagactggttcatggtcacagtgcaccccttcatgctaaacaacgatgtgtgtgtacactttcatgaactacacttgggcctgggttgccccccaaaccatgttcagccacacgcctaccagttcacctaccgtgttactgaatgtggcatcagggccaaagctgtctctcaggacatggttatctacagcactgagatacactactcttctaagggcacgccatctaagtttgtgatcccagtgtcatgtgctgccccccaaaagtccccatggctcaccaagccctgctccatgagagtagccagcaagagcagggccacagcccagaaggatgagaaatgctacgaggtgttcagcttgtcacagtccagtcaaaggcccaactgcgattgtccaccttgtgtcttcagtgaagaagagcatacccaggtcccttgtcaccaagcaggggctcaggaggctcaacctctgcagccatctcactttcttgatatttctgaggattggtctcttcacacagatgatatgattgggtccatgtgatcctcaggtttggggtctcctgaagatgctatttctagaattagtatatagtgtacaaatgtctgacaaataagtgctcttgtgaccctcatgtgagcacttttgagaaagagaaacctatagcaacttcatgaattaagcctttttctatatttttatattcatgtgtaaacaaaaaataaaataaaattctgatcgcat

SEQ ID NO: 1362 - protein, 212 aa, Homo sapiens
MKVFKFIGLMILLTSAFSAGSGQSPMTVLCSIDWFMVTVHPFMLNNDVCVHFHELHLGLGCPPNHVQPHAYQFTYRVTECGIRAKAVSQDMVIYSTEIHYSSKGTPSKFVIPVSCAAPQKSPWLTKPCSMRVASKSRATAQKDEKCYEVFSLSQSSQRPNCDCPPCVFSEEEHTQVPCHQAGAQEAQPLQPSHFLDISEDWSLHTDDMIGSM

SEQ ID NO: 1363 - DNA, 2380 bp, Homo sapiens
caggaccagagacccctccagcgggagtgccacctgctgcttcctcccaggtgtgggctgcaggaccagctgcccaggaatggctttctcgggacctcctgcaccggccttccgacgcactggccaaagcacgtctatggctgcatcctctgcccatggtttcctccaaagagtctggtccccaagaagtatcggtagacccagctgggcctgaggcccttctctttcaccaccattcttccaaagagagccccactctgatccccaaccatgttacctcctcaaattcagaatatttcccatagaaagctgggcccccaagagctcccacctgagggcagcccccctcatctgtcggcctggatcacggcagcctcccagggccttgagacacagccaaaggaggcagcagagggtggggggtcagcagctatgcacacaaatggagggagggaaactgaggcacaccagaggactggagacccagaggtcacagtttcctccagctcttcttttttttttttttttgagatggggtcttgctttgtcatccaggctggagtccagtggcacgatcttggcttactgcagcctccacctcccagattcaggcgatccttctgcctcagcttcccgagtagctgggattacaggcccacgccaccacacctggctaattttgtatttttagtagagatggggtttcaccatgttggccaggccagtctggaactcctggcctcaagtgatccacccgccttggcctcctattgtgttgggattacagtcgtgagccaccgcacccggtccctcgaacccatctttgggttgagattctcagggcagccggagcccatgtgttcttgtttctaatgctttttctctctccacttctctcttggtgaagaaggggcttggaccattcctgcaaacagccaaaccggcgagaagaggccagacatctgcctccattctccccagagtggtgcaagctcagcgaggtccccagcctcccccaggggaagcagggatccctggacaccccacacctccagccacgctcccctcggagcctgtagagggtgtccaggctagtccctggcggccacgtccagtcttgccaacgcacccggctctgaccctgcccgtgtcctcagatgcctcctctccttcaccgccagccccgaggcctgaacgacctgaatcacttctggtctcaggaccatctgtcaccctgactgaaggtctaggaactgtgaggcctgaacaggaccccgccaagtctccaggaagtcccctcctgctgagaggcttgtcaagcggggatgtggctgcacctgagcccatcatgggggagcccggccaagccagtgaggagttccagccattggcgaggccctggcgggccacactggctgcagaggagctggtttctcaccgttctcccggagagccccaggaaacgtgctctggaacggaggtggagaggccacgccagacagggcctggtctccccagggagggggccagggggcacatggacctttcatcctcagaaccaagccaggacatagaggggccgggactctccatcctgccagcgagggatgccacattctccaccccaagtgtgaggcagccagaccccagtgcctggctgagttcaggacctgaactcaccgggatgcccagggtgaggctggcagcgcccctggcagttcttcctatggaacctctgccaccagaacctgttcgcccagcagctcttctgacacccgaagcctcatctgtgggagggccagaccaggcccgatacctggagtcagcccctggctggcctgtgggccaggaggagtggggggttgcacacacgtccagccctccatccacgcaaaccctgagcctgtgggctcccacaggagtgttgctacccagcctggtggagcttgaataccccttccaggctggccggggggcctcactccagcaggagctgacagagcccaccttggccctcagtgctgaaagccacaggcctcctgagcttcaagacagtgtggaggggctttctgagaggccctcacgctgagcctccatggagactccaggcagccggtaccccgctggcttggacagccccagtgaccctcagtgacccagctgtccccaggctccctggcttagatgcccagctgtggctgggtacagtgttctgggccggaagagcactcactcagtgcttccctggaaaggtggacccccagacgcccacctccaggcagacccatcactggaagtgggatttgaaatgcagccaagaagaggagaccgtcggcaacgcccgcccggaacaagaaataaataaataaataatcagggt

SEQ ID NO: 1364 - protein, 246 aa, Homo sapiens
MGEPGQASEEFQPLARPWRATLAAEELVSHRSPGEPQETCSGTEVERPRQTGPGLPREGARGHMDLSSSEPSQDIEGPGLSILPARDATFSTPSVRQPDPSAWLSSGPELTGMPRVRLAAPLAVLPMEPLPPEPVRPAALLTPEASSVGGPDQARYLESAPGWPVGQEEWGVAHTSSPPSTQTLSLWAPTGVLLPSLVELEYPFQAGRGASLQQELTEPTLALSAESHRPPELQDSVEGLSERPSR

SEQ ID NO: 1365 - DNA, 2267 bp, Homo sapiens
acataatgaagtgtccgatgctaaggtcaaggctgggccaggaaagcgtccactgtgggcccatgttcatccaggtctcccggcccctgcccctgtggagggacaatagacagactccatggctgctgtcccttcgaggggagctggtggcttctcttgaagacgccagcctgatgggactgtatgtggacatgaatgccaccactgtcaccgtccaaagcccgagacaaggccttcttcagaggtgggaggtcagtggtgggcagcaggctctgccaggagtgtcattccagccagagtcggaggtcttagttcacatccccaagcagagactgggtctagtcaaaagaggttcctacattgaggaaaccctgagcctcagattcctccgagtccaccagtccaacatctttatggtgactgagaacaaggactttgtggtggtcagcattccggcggccggggtgctccaggtccagcgatgccaagaagtcggaggaaccccgggaacacaagctttctatagggtagacctgagcctggaatttgccgagatggctgccccggtcctctggacagtggagagcttcttccagtgtgtgggttcaggaacagagtcgcctgcctcaactgctgcactgaggaccactccctccccaccatccccaggaccagagacccctccagcgggagtgccacctgctgcttcctcccaggtgtgggctgcaggaccagctgcccaggaatggctttctcgggacctcctgcaccggccttccgacgcactggccaaaaaggggcttggaccattcctgcaaacagccaaaccggcgagaagaggccagacatctgcctccattctccccagagtggtgcaagctcagcgaggtccccagcctcccccaggggaagcagggatccctggacaccccacacctccagccacgctcccctcggagcctgtagagggtgtccaggctagtccctggcggccacgtccagtcttgccaacgcacccggctctgaccctgcccgtgtcctcagatgcctcctctccttcaccgccagccccgaggcctgaacgacctgaatcacttctggtctcaggaccatctgtcaccctgactgaaggtctaggaactgtgaggcctgaacaggaccccgccaagtctccaggaagtcccctcctgctgagaggcttgtcaagcggggatgtggctgcacctgagcccatcatgggggagcccggccaagccagtgaggagttccagccattggcgaggccctggcgggccacactggctgcagaggagctggtttctcaccgttctcccggagagccccaggaaacgtgctctggaacggaggtggagaggccacgccagacagggcctggtctccccagggagggggccagggggcacatggacctttcatcctcagaaccaagccaggacatagaggggccgggactctccatcctgccagcgagggatgccacattctccaccccaagtgtgaggcagccagaccccagtgcctggctgagttcaggacctgaactcaccgggatgcccagggtgaggctggcagcgcccctggcagttcttcctatggaacctctgccaccagaacctgttcgcccagcagctcttctgacacccgaagcctcatctgtgggagggccagaccaggcccgatacctggagtcagcccctggctggcctgtgggccaggaggagtggggggttgcacacacgtccagccctccatccacgcaaaccctgagcctgtgggctcccacaggagtgttgctacccagcctggtggagcttgaataccccttccaggctggccggggggcctcactccagcaggagctgacagagcccaccttggccctcagtgctgaaagccacaggcctcctgagcttcaagacagtgtggaggggctttctgagaggccctcacgctgagcctccatggagactccaggcagccggtaccccgctggcttggacagccccagtgaccctcagtgacccagctgtccccaggctccctggcttagatgcccagctgtggctgggtacagtgttctgggccggaagagcactcactcagtgcttccctggaaaggtggacccccagacgcccacctccaggcagacccatcactggaagtgggatttgaaatgcagccaagaagaggagaccgtcggcaacgcccgcccggaacaagaaataaataaataaataatcagggt

SEQ ID NO: 1366 - protein, 656 aa, Homo sapiens
MKCPMLRSRLGQESVHCGPMFIQVSRPLPLWRDNRQTPWLLSLRGELVASLEDASLMGLYVDMNATTVTVQSPRQGLLQRWEVSGGQQALPGVSFQPESEVLVHIPKQRLGLVKRGSYIEETLSLRFLRVHQSNIFMVTENKDFVVVSIPAAGVLQVQRCQEVGGTPGTQAFYRVDLSLEFAEMAAPVLWTVESFFQCVGSGTESPASTAALRTTPSPPSPGPETPPAGVPPAASSQVWAAGPAAQEWLSRDLLHRPSDALAKKGLGPFLQTAKPARRGQTSASILPRVVQAQRGPQPPPGEAGIPGHPTPPATLPSEPVEGVQASPWRPRPVLPTHPALTLPVSSDASSPSPPAPRPERPESLLVSGPSVTLTEGLGTVRPEQDPAKSPGSPLLLRGLSSGDVAAPEPIMGEPGQASEEFQPLARPWRATLAAEELVSHRSPGEPQETCSGTEVERPRQTGPGLPREGARGHMDLSSSEPSQDIEGPGLSILPARDATFSTPSVRQPDPSAWLSSGPELTGMPRVRLAAPLAVLPMEPLPPEPVRPAALLTPEASSVGGPDQARYLESAPGWPVGQEEWGVAHTSSPPSTQTLSLWAPTGVLLPSLVELEYPFQAGRGASLQQELTEPTLALSAESHRPPELQDSVEGLSERPSR

SEQ ID NO: 1367 - DNA, 786 bp, Homo sapiens
tcaccgttctcccggagagccccaggaaacgtgctctggaacggaggtggagaggccacgccagacagggcctggtctccccagggagggggccagggggcacatggacctttcatcctcagaaccaagccaggacatagaggggccgggactctccatcctgccagcgagggatgccacattctccaccccaagtgtgaggcagccagaccccagtgcctggctgagttcaggacctgaactcaccgggatgcccagggtgaggctggcagcgcccctggcagttcttcctatggaacctctgccaccagaacctgttcgcccagcagctcttctgacacccgaagcctcatctgtgggagggccagaccaggcccgatacctggagtcagcccctggctggcctgtgggccaggaggagtggggggttgcacacacgtccagccctccatccacgcaaaccctgagcctgtgggctcccacaggagtgttgctacccagcctggtggagcttgaataccccttccaggctggccggggggcctcactccagcaggagctgacagagcccaccttggccctcagtgctgaaagccacaggcctcctgagcttcaagacagtgtggaggggctttctgagaggccctcacgctgagcctccatggagactccaggacgcccacctccaggcagacccatcactggaagtgggatttgaaatgcagccaagaagaggagaccgtcggcaacgcccgcccggaacaagaaataaataaataaataatc

SEQ ID NO: 1368 - protein, 183 aa, Homo sapiens [sequence omitted]

SEQ ID NO: 1369 - DNA, 464 bp, Homo sapiens
agaaaggggtgatggggttggagcggagtgatcgctacataatgaagtgtccgatgctaaggtcaaggctgggccaggaaagcgtccactgtgggcccatgttcatccaggtctcccggcccctgcccctgtggagggacaatagacagactccatggctgctgtcccttcgaggggagctggtggcttctcttgaagacgccagcctgatgggactgtatgtggacatgaatgccaccactgtcaccgtccaaagcccgagacaaggccttcttcagaggtgggaggtcagtggtgggcagcaggctctgccaggaggtgaggggcctctggggcatagcacctagaagagcaggttgccacccctccagtgacaagtcaaatgtccacctgcgagactggacagatttaggcaggcgccttcgaaaattgggccccattagcgtaaagcgctccgctctgca

SEQ ID NO: 1370 - protein, 111 aa, Homo sapiens
MGLERSDRYIMKCPMLRSRLGQESVHCGPMFIQVSRPLPLWRDNRQTPWLLSLRGELVASLEDASLMGLYVDMNATTVTVQSPRQGLLQRWEVSGGQQALPGGEGPLGHST

SEQ ID NO: 1371 - DNA, 4216 bp, Homo sapiens
ggtgggcggggggaggaggcggccctagcgccattttgtgggagcgaagcggtggctgggctgcgcttgggtccgtcgctgcttcggtgtccctgtcgggcttcccagcagcggcctagcgggaaaagtaaaagatgtctgaatatattcgggtaaccgaagatgagaacgatgagcccattgaaataccatcggaagacgatgggacggtgctgctctccacggttacagcccagtttccaggggcgtgtgggcttcgctacaggaatccagtgtctcagtgtatgagaggtgtccggctggtagaaggaattctgcatgccccagatgctggctggggaaatctggtgtatgttgtcaactatccaaaagataacaaaagaaaaatggatgagacagatgcttcatcagcagtgaaagtgaaaagagcagtccagaaaacatccgatttaatagtgttgggtctcccatggaaaacaaccgaacaggacctgaaagagtattttagtacctttggagaagttcttatggtgcaggtcaagaaagatcttaagactggtcattcaaaggggtttggctttgttcgttttacggaatatgaaacacaagtgaaagtaatgtcacagcgacatatgatagatggacgatggtgtgactgcaaacttcctaattctaagcaaagccaagatgagcctttgagaagcagaaaagtgtttgtggggcgctgtacagaggacatgactgaggatgagctgcgggagttcttctctcagtacggggatgtgatggatgtcttcatccccaagccattcagggcctttgcctttgttacatttgcagatgatcagattgcgcagtctctttgtggagaggacttgatcattaaaggaatcagcgttcatatatccaatgccgaacctaagcacaatagcaatagacagttagaaagaagtggaagatttggtggtaatccaggtggctttgggaatcagggtggatttggtaatagcagagggggtggagctggtttgggaaacaatcaaggtagtaatatgggtggtgggatgaactttggtgcgttcagcattaatccagccatgatggctgccgcccaggcagcactacagagcagttggggtatgatgggcatgttagccagccagcagaaccagtcaggcccatcgggtaataaccaaaaccaaggcaacatgcagagggagccaaaccaggccttcggttctggaaataactcttatagtggctctaattctggtgcagcaattggttggggatcagcatccaatgcagggtcgggcagtggttttaatggaggctttggctcaagcatggattctaagtcttctggctggggaatgtagacagtggggttgtggttggttggtatagaatggtgggaattcaaatttttctaaactcatggtaagtatattgtaaaatacatatgtactaagaattttcaaaattggtttgttcagtgtggagtatattcagcagtatttttgacatttttctttagaaaaaggaagagctaaaggaattttataagttttgttacatgaaaggttgaaatattgagtggttgaaagtgaactgctgtttgcctgattggtaaaccaacacactacaattgatatcaaaaggtttctcctgtaatattttatccctggacttgtcaagtgaattctttgcatgttcaaaacggaaaccattgattagaactacattctttaccccttgttttaatttgaaccccaccatatggatttttttccttaagaaaatctccttttaggagatcatggtgtcacagtgtttggttcttttgttttgttttttaacacttgtctcccctcatacacaaaagtacaatatgaagccttcatttaatctctgcagttcatctcatttcaaatgtttatggaagaagcacttcattgaaagtagtgctgtaaatattctgccataggaatactgtctacatgctttctcattcaagaattcgtcatcacgcatcacaggccgcgtctttgacggtgggtgtcccatttttatccgctactctttatttcatggagtcgtatcaacgctatgaacgcaaggctgtgatatggaaccagaaggctgtctgaacttttgaaaccttgtgtgggattgatggtggtgccgaggcatgaaaggctagtatgagcgagaaaaggagagagcgcgtgcagagacttggtggtgcataatggatattttttaacttggcgagatgtgtctctcaatcctgtggctttggtgagagagtgtgcagagagcaatgatagcaaataatgtacgaatgttttttgcattcaaaggacatccacatctgttggaagacttttaagtgagtttttgttcttagataacccacattagatgaatgtgttaagtgaaatgatacttgtactccccctacccctttgtcaactgctgtgaatgctgtatggtgtgtgttctcttctgttactgatatgtaagtgtggcaatgtgaactgaagctgatgggctgagaacatggactgagcttgtggtgtgctttgcaggaggacttgaagcagagttcaccagtgagctcaggtgtctcaaagaagggtggaagttctaatgtctgttagctacccataagaatgctgtttgctgcagttctgtgtcctgtgcttggatgctttttataagagttgtcattgttggaaattcttaaataaaactgatttaaataatatgtgtctttgttttgcagccctgaatgcaaagaattcatagcagttaattccccttttttgacccttttgagatggaactttcataaagtttcttggcagtagtttattttgcttcaaataaacttatttgaaaagttgtctcaagtcaaatggattcatcacctgtcatgcattgacacctgatacccagacttaattggtatttgttcttgcattggccaaagtgaaaatttttttttttcttttgaaatctagttttgaataagtctgggtgaccgcacctaaaatggtaagcagtaccctccggctttttcttagtgcctctgtgcatttgggtgatgttctatttacatggcctgtgtaaatctccattgggaagtcatgccttctaaaaagattcttatttgggggagtgggcaaaatgttgattattttctaatgctttgtagcaaagcatatcaattgaaaagggaatatcagcaccttcctagtttgggatttgaaaagtggaattaattgcagtagggataaagtagaagaaaccacaaattatcttgtgcctgaaatccattaagaggcctgatagctttaagaattagggtgggttgtctgtctggaagtgttaagtggaatgggctttgtcctccaggaggtgggggaatgtggtaacattgaatacagttgaataaaatcgcttacaaaactcacactctcacaatgcattgttaagtatgtaaaagcaataacattgattctctgttgtacttttttgtaactaattctgtgagagttgagctcattttctagttggaagaatgtgatatttgttgtgttggtagtttacctaatgcccttacctaattagattatgataaataggtttgtcattttgcaagttacataaacatttatcaatgaagtcatcctttagacttgtaatcgccacattgtttcattattcagtttcctctgtaaagggatcttgagttgttttaattttttttttctgcatctgaatctgcatgatttccaaaccctgtaccatctgaattttgcattttagcacttgcactattactcagcagcagtaacatggtaacacttaaaatggtactcggggacctccaaagactaaactgacaagccttcaaggagcccaggggtaagttaacttgtcaacggcatggtttaatcccttctttacacttgtgtaaatttcagttactggtcatagaaggctttcaatgttgagtggccttttattaacatgtttatggtactgcatagatacgggtatttattttaccctaagaagattttgaagtttaaaagtacttaaactatttggcaaagatttgtttttaaaaatctatttggtcaatctaaatgcattcattctaaaaaattttttgaaccagataaataaaatttttttttgacaccac

SEQ ID NO: 1372 - protein, 414 aa, Homo sapiens; identical to SEQ ID NO: 5

SEQ ID NO: 1373 - DNA, 608 bp, Homo sapiens
gggggaggaggcggccctagcgccattttgtgggagcgaagcggtggctgggctgcgcttgggtccgtcgctgcttcggtgtccctgtcgggcttcccagcagcggcctagcgggaaaagtaaaagatgtctgaatatattcgggtaaccgaagatgagaacgatgagcccattgaaataccatcggaagacgatgggacggtgctgctctccacggttacagcccagtttccaggggcgtgtgggcttcgctacaggaatccagtgtctcagtgtatgagaggtgtccggctggtagaaggaattctgcatgccccagatgctggctggggaaatctggtgtatgttgtcaactatccaaaagataacaaaagaaaaatggatgagacagatgcttcatcagcagtgaaagtgaaaagagcagtccagaaaacatccgatttaatagtgttgggtctcccatggaaaacaaccgaacaggacctgaaagagtattttagtacctttggagaagttcttatggtgcagagacagggttttgctgtgttgcccaggctggtcctgaactcctgtgctcaagcgatccaccctcctcagcatcccaaagc

SEQ ID NO: 1374 - protein, 159 aa, Homo sapiens
MSEYIRVTEDENDEPIEIPSEDDGTVLLSTVTAQFPGACGLRYRNPVSQCMRGVRLVEGILHAPDAGWGNLVYVVNYPKDNKRKMDETDASSAVKVKRAVQKTSDLIVLGLPWKTTEQDLKEYFSTFGEVLMVQRQGFAVLPRLVLNSCAQAIHPPQHP

SEQ ID NO: 1375 - DNA, 2761 bp, Homo sapiens
gggggaggaggcggccctagcgccattttgtgggagcgaagcggtggctgggctgcgcttgggtccgtcgctgcttcggtgtccctgtcgggcttcccagcagcggcctagcgggaaaagtaaaagatgtctgaatatattcgggtaaccgaagatgagaacgatgagcccattgaaataccatcggaagacgatgggacggtgctgctctccacggttacagcccagtttccaggggcgtgtgggcttcgctacaggaatccagtgtctcagtgtatgagaggtgtccggctggtagaaggaattctgcatgccccagatgctggctggggaaatctggtgtatgttgtcaactatccaaaagataacaaaagaaaaatggatgagacagatgcttcatcagcagtgaaagtgaaaagagcagtccagaaaacatccgatttaatagtgttgggtctcccatggaaaacaaccgaacaggacctgaaagagtattttagtacctttggagaagttcttatggtgcaggtcaagaaagatcttaagactggtcattcaaaggggtttggctttgttcgttttacggaatatgaaacacaagtgaaagtaatgtcacagcgacatatgatagatggacgatggtgtgactgcaaacttcctaattctaagcaaagccaagatgagcctttgagaagcagaaaagtgtttgtggggcgctgtacagaggacatgactgaggatgagctgcgggagttcttctctcagtacggggatgtgatggatgtcttcatccccaagccattcagggcctttgcctttgttacatttgcagatgatcagattgcgcagtctctttgtggagaggacttgatcattaaaggaatcagcgttcatatatccaatgccgaacctaagcacaatagcaatagacagttagaaagaagtggaagatttggtggtaatccaggtggctttgggaatcagggtggatttggtaatagcagagggggtggagctggtttgggaaacaatcaaggtagtaatatgggtggtgggatgaactttggtgcgttcagcattaatccagccatgatggctgccgcccaggcagcactacagagcagttggggtatgatgggcatgttagccagccagcagaaccagtcaggcccatcgggtaataaccaaaaccaaggcaacatgcagagggagccaaaccaggccttcggttctggaaataactcttatagtggctctaattctggtgcagcaattggttggggatcagcatccaatgcagggtcgggcagtggttttaatggaggctttggctcaagcatggattctaagtcttctggctggggaatgtagacagtggggttgtggttggttggtatagaatggtgggaattcaaatttttctaaactcatggtaagtatattgtaaaatacatatgtactaagaattttcaaaattggtttgttcagtgtggagtatattcagcagtatttttgacatttttctttagaaaaaggaagagctaaaggaattttataagttttgttacatgaaaggttgaaatattgagtggttgaaagtgaactgctgtttgcctgattggtaaaccaacacactacaattgatatcaaaaggtttctcctgtaatattttatccctggacttgtcaagtgaattctttgcatgttcaaaacggaaaccattgattagaactacattctttaccccttgttttaatttgaaccccaccatatggatttttttccttaagaaaatctccttttaggagatcatggtgtcacagtgtttggttcttttgttttgttttttaacacttgtctcccctcatacacaaaagtacaatatgaagccttcatttaatctctgcagttcatctcatttcaaatgtttatggaagaagcacttcattgaaagtagtgctgtaaatattctgccataggaatactgtctacatgctttctcattcaagaattcgtcatcacgcatcacaggccgcgtctttgacggtgggtgtcccatttttatccgctactctttatttcatggagtcgtatcaacgctatgaacgcaaggctgtgatatggaaccagaaggctgtctgaacttttgaaaccttgtgtgggattgatggtggtgccgaggcatgaaaggctagtatgagcgagaaaaggagagagcgcgtgcagagacttggtggtgcataatggatattttttaacttggcgagatgtgtctctcaatcctgtggctttggtgagagagtgtgcagagagcaatgatagcaaataatgtacgaatgttttttgcattcaaaggacatccacatctgttggaagacttttaagtgagtttttgttcttagataacccacattagatgaatgtgttaagtgaaatgatacttgtactccccctacccctttgtcaactgctgtgaatgctgtatggtgtgtgttctcttctgttactgatatgtaagtgtggcaatgtgaactgaagctgatgggctgagaacatggactgagcttgtggtgtgctttgcaggaggacttgaagcagagttcaccagtgagctcaggtgtctcaaagaagggtggaagttctaatgtctgttagctacccataagaatgctgtttgctgcagttctgtgtcctgtgcttggatgctttttataagagttgtcattgttggaaattcttaaataaaactgatttaaataat

SEQ ID NO: 1376 - protein, 414 aa, Homo sapiens; identical to SEQ ID NO: 5

SEQ ID NO: 1377 - DNA, 2901 bp, Homo sapiens
gggggaggaggcggccctagcgccattttgtgggagcgaagcggtggctgggctgcgcttgggtccgtcgctgcttcggtgtccctgtcgggcttcccagcagcggcctagcgggaaaagtaaaagatgtctgaatatattcgggtaaccgaagatgagaacgatgagcccattgaaataccatcggaagacgatgggacggtgctgctctccacggttacagcccagtttccaggggcgtgtgggcttcgctacaggaatccagtgtctcagtgtatgagaggtgtccggctggtagaaggaattctgcatgccccagatgctggctggggaaatctggtgtatgttgtcaactatccaaaagataacaaaagaaaaatggatgagacagatgcttcatcagcagtgaaagtgaaaagagcagtccagaaaacatccgatttaatagtgttgggtctcccatggaaaacaaccgaacaggacctgaaagagtattttagtacctttggagaagttcttatggtgcaggtcaagaaagatcttaagactggtcattcaaaggggtttggctttgttcgttttacggaatatgaaacacaagtgaaagtaatgtcacagcgacatatgatagatggacgatggtgtgactgcaaacttcctaattctaagcaaagccaagatgagcctttgagaagcagaaaagtgtttgtggggcgctgtacagaggacatgactgaggatgagctgcgggagttcttctctcagtacggggatgtgatggatgtcttcatccccaagccattcagggcctttgcctttgttacatttgcagatgatcagattgcgcagtctctttgtggagaggacttgatcattaaaggaatcagcgttcatatatccaatgccgaacctaagcacaatagcaatagacagttagaaagaagtggaagatttggtggtaatccaggtggctttgggaatcagggtggatttggtaatagcagagggggtggagctggtttgggaaacaatcaaggtagtaatatgggtggtgggatgaactttggtgcgttcagcattaatccagccatgatggctgccgcccaggcagcactacagagcagttggggtatgatgggcatgttagccagccagcagaaccagtcaggcccatcgggtaataaccaaaaccaaggcaacatgcagagggagccaaaccaggccttcggttctggaaataactcttatagtggctctaattctggtgcagcaattggttggggatcagcatccaatgcagggtcgggcagtggttttaatggaggctttggctcaagcatggattctaagtcttctggctggggaatgtagacagtggggttgtggttggttggtatagaatggtgggaattcaaatttttctaaactcatggtaagtatattgtaaaatacatatgtactaagaattttcaaaattggtttgttcagtgtggagtatattcagcagtatttttgacatttttctttagaaaaaggaagagctaaaggaattttataagttttgttacatgaaaggttgaaatattgagtggttgaaagtgaactgctgtttgcctgattggtaaaccaacacactacaattgatatcaaaaggtttctcctgtaatattttatccctggacttgtcaagtgaattctttgcatgttcaaaacggaaaccattgattagaactacattctttaccccttgttttaatttgaaccccaccatatggatttttttccttaagaaaatctccttttaggagatcatggtgtcacagtgtttggttcttttgttttgttttttaacacttgtctcccctcatacacaaaagtacaatatgaagccttcatttaatctctgcagttcatctcatttcaaatgtttatggaagaagcacttcattgaaagtagtgctgtaaatattctgccataggaatactgtctacatgctttctcattcaagaattcgtcatcacgcatcacaggccgcgtctttgacggtgggtgtcccatttttatccgctactctttatttcatggagtcgtatcaacgctatgaacgcaaggctgtgatatggaaccagaaggctgtctgaacttttgaaaccttgtgtgggattgatggtggtgccgaggcatgaaaggctagtatgagcgagaaaaggagagagcgcgtgcagagacttggtggtgcataatggatattttttaacttggcgagatgtgtctctcaatcctgtggctttggtgagagagtgtgcagagagcaatgatagcaaataatgtacgaatgttttttgcattcaaaggacatccacatctgttggaagacttttaagtgagtttttgttcttagataacccacattagatgaatgtgttaagtgaaatgatacttgtactccccctacccctttgtcaactgctgtgaatgctgtatggtgtgtgttctcttctgttactgatatgtaagtgtggcaatgtgaactgaagctgatgggctgagaacatggactgagcttgtggtgtgctttgcaggaggacttgaagcagagttcaccagtgagctcaggtgtctcaaagaagggtggaagttctaatgtctgttagctacccataagaatgctgtttgctgcagttctgtgtcctgtgcttggatgctttttataagagttgtcattgttggaaattcttaaataaaactgatttaaataatatgtgtctttgttttgcagccctgaatgcaaagaattcatagcagttaattccccttttttgacccttttgagatggaactttcataaagtttcttggcagtagtttattttgcttcaaataaacttatttgaaaagttg

SEQ ID NO: 1378 - protein, 414 aa, Homo sapiens; identical to SEQ ID NO: 5

SEQ ID NO: 1379 - DNA, 4305 bp, Homo sapiens
gggggaggaggcggccctagcgccattttgtgggagcgaagcggtggctgggctgcgcttgggtccgtcgctgcttcggtgtccctgtcgggcttcccagcagcggcctagcgggaaaagtaaaagatgtctgaatatattcgggtaaccgaagatgagaacgatgagcccattgaaataccatcggaagacgatgggacggtgctgctctccacggttacagcccagtttccaggggcgtgtgggcttcgctacaggaatccagtgtctcagtgtatgagaggtgtccggctggtagaaggaattctgcatgccccagatgctggctggggaaatctggtgtatgttgtcaactatccaaaagataacaaaagaaaaatggatgagacagatgcttcatcagcagtgaaagtgaaaagagcagtccagaaaacatccgatttaatagtgttgggtctcccatggaaaacaaccgaacaggacctgaaagagtattttagtacctttggagaagttcttatggtgcaggtcaagaaagatcttaagactggtcattcaaaggggtttggctttgttcgttttacggaatatgaaacacaagtgaaagtaatgtcacagcgacatatgatagatggacgatggtgtgactgcaaacttcctaattctaagcaaagccaagatgagcctttgagaagcagaaaagtgtttgtggggcgctgtacagaggacatgactgaggatgagctgcgggagttcttctctcagtacggggatgtgatggatgtcttcatccccaagccattcagggcctttgcctttgttacatttgcagatgatcagattgcgcagtctctttgtggagaggacttgatcattaaaggaatcagcgttcatatatccaatgccgaacctaagcacaatagcaatagacagttagaaagaagtggaagatttggtggtaatccaggtggctttgggaatcagggtggatttggtaatagcagagggggtggagctggtttgggaaacaatcaaggtagtaatatgggtggtgggatgaactttggtgcgttcagcattaatccagccatgatggctgccgcccaggcagcactacagagcagttggggtatgatgggcatgttagccagccagcagaaccagtcaggcccatcgggtaataaccaaaaccaaggcaacatgcagagggagccaaaccaggccttcggttctggaaataactcttatagtggctctaattctggtgcagcaattggttggggatcagcatccaatgcagggtcgggcagtggttttaatggaggctttggctcaagcatggattctaagtcttctggctggggaatgtagacagtggggttgtggttggttggtatagaatggtgggaattcaaatttttctaaactcatggtaagtatattgtaaaatacatatgtactaagaattttcaaaattggtttgttcagtgtggagtatattcagcagtatttttgacatttttctttagaaaaaggaagagctaaaggaattttataagttttgttacatgaaaggttgaaatattgagtggttgaaagtgaactgctgtttgcctgattggtaaaccaacacactacaattgatatcaaaaggtttctcctgtaatattttatccctggacttgtcaagtgaattctttgcatgttcaaaacggaaaccattgattagaactacattctttaccccttgttttaatttgaaccccaccatatggatttttttccttaagaaaatctccttttaggagatcatggtgtcacagtgtttggttcttttgttttgttttttaacacttgtctcccctcatacacaaaagtacaatatgaagccttcatttaatctctgcagttcatctcatttcaaatgtttatggaagaagcacttcattgaaagtagtgctgtaaatattctgccataggaatactgtctacatgctttctcattcaagaattcgtcatcacgcatcacaggccgcgtctttgacggtgggtgtcccatttttatccgctactctttatttcatggagtcgtatcaacgctatgaacgcaaggctgtgatatggaaccagaaggctgtctgaacttttgaaaccttgtgtgggattgatggtggtgccgaggcatgaaaggctagtatgagcgagaaaaggagagagcgcgtgcagagacttggtggtgcataatggatattttttaacttggcgagatgtgtctctcaatcctgtggctttggtgagagagtgtgcagagagcaatgatagcaaataatgtacgaatgttttttgcattcaaaggacatccacatctgttggaagacttttaagtgagtttttgttcttagataacccacattagatgaatgtgttaagtgaaatgatacttgtactccccctacccctttgtcaactgctgtgaatgctgtatggtgtgtgttctcttctgttactgatatgtaagtgtggcaatgtgaactgaagctgatgggctgagaacatggactgagcttgtggtgtgctttgcaggaggacttgaagcagagttcaccagtgagctcaggtgtctcaaagaagggtggaagttctaatgtctgttagctacccataagaatgctgtttgctgcagttctgtgtcctgtgcttggatgctttttataagagttgtcattgttggaaattcttaaataaaactgatttaaataatatgtgtctttgttttgcagccctgaatgcaaagaattcatagcagttaattccccttttttgacccttttgagatggaactttcataaagtttcttggcagtagtttattttgcttcaaataaacttatttgaaaagttgtctcaagtcaaatggattcatcacctgtcatgcattgacacctgatacccagacttaattggtatttgttcttgcattggccaaagtgaaaatttttttttttcttttgaaatctagttttgaataagtctgggtgaccgcacctaaaatggtaagcagtaccctccggctttttcttagtgcctctgtgcatttgggtgatgttctatttacatggcctgtgtaaatctccattgggaagtcatgccttctaaaaagattcttatttgggggagtgggcaaaatgttgattattttctaatgctttgtagcaaagcatatcaattgaaaagggaatatcagcaccttcctagtttgggatttgaaaagtggaattaattgcagtagggataaagtagaagaaaccacaaattatcttgtgcctgaaatccattaagaggcctgatagctttaagaattagggtgggttgtctgtctggaagtgttaagtggaatgggctttgtcctccaggaggtgggggaatgtggtaacattgaatacagttgaataaaatcgcttacaaaactcacactctcacaatgcattgttaagtatgtaaaagcaataacattgattctctgttgtacttttttgtaactaattctgtgagagttgagctcattttctagttggaagaatgtgatatttgttgtgttggtagtttacctaatgcccttacctaattagattatgataaataggtttgtcattttgcaagttacataaacatttatcaatgaagtcatcctttagacttgtaatcgccacattgtttcattattcagtttcctctgtaaagggatcttgagttgttttaattttttttttctgcatctgaatctgcatgatttccaaaccctgtaccatctgaattttgcattttagcacttgcactattactcagcagcagtaacatggtaacacttaaaatggtactcggggacctccaaagactaaactgacaagccttcaaggagcccaggggtaagttaacttgtcaacggcatggtttaatcccttctttacacttgtgtaaatttcagttactggtcatagaaggctttcaatgttgagtggccttttattaacatgtttatggtactgcatagatacgggtatttattttaccctaagaagattttgaagtttaaaagtacttaaactatttggcaaagatttgtttttaaaaatctatttggtcaatctaaatgcattcattctaaaaaattttttgaaccagataaataaaatttttttttgacaccacagtttagtgtctggagtcttactggaaaaacacgatttctttttatatgtgatatacagatgctggaaagttacctttaaaaattgagtctctaaag

SEQ ID NO: 1380 - protein, 414 aa, Homo sapiens; identical to SEQ ID NO: 5

SEQ ID NO: 1381 - DNA, 336 bp, Homo sapiens
cattttgtgggagcgaagcggtggctgggctgcgcttgggtccgtcgctgcttcggtgtccctgtcgggcttcccagcagcggcctagcgggaaaagtaaaagatgtctgaatatattcgggtaaccgaagatgagaacgatgagcccattgaaataccatcggaagacgatgggacggtgctgctctccacggttacagcccagtttccaggggcgtgtgggcttcgctacaggaatccagtgtctcagtgtatgagaggtgtccggctggtagaaggaattctgcatgccccagatgctggctggggaaatctggtgtatgttgtcaactatcc

SEQ ID NO: 1382 - protein, 76 aa, Homo sapiens
MSEYIRVTEDENDEPIEIPSEDDGTVLLSTVTAQFPGACGLRYRNPVSQCMRGVRLVEGILHAPDAGWGNLVYVVN

SEQ ID NO: 1383 - DNA, 539 bp, Homo sapiens
cattttgtgggagcgaagcggtggctgggctgcgcttgggtccgtcgctgcttcggtgtccctgtcgggcttcccagcagcggcctagcgggaaaagtaaaagatgtctgaatatattcgggtaaccgaagatgagaacgatgagcccattgaaataccatcggaagacgatgggacggtgctgctctccacggttacagcccagtttccaggggcgtgtgggcttcgctacaggaatccagtgtctcagtgtatgagaggtgtccggctggtagaaggaattctgcatgccccagatgctggctggggaaatctggtgtatgttgtcaactatccaaaaggctggacatggtggctcacatctgtaatcccagctactcgggaggctgaggcaggagaatcacttgaacccgggaggcagaggttgcagagaggggagattgcgccactgcactccagcctagataacaaaagaaaaatggatgagacagatgcttcatcagcagtgaaagtgaaaagagcagtccagaaaacatccg

SEQ ID NO: 1384 - protein, 144 aa, Homo sapiens
MSEYIRVTEDENDEPIEIPSEDDGTVLLSTVTAQFPGACGLRYRNPVSQCMRGVRLVEGILHAPDAGWGNLVYVVNYPKGWTWWLTSVIPATREAEAGESLEPGRQRLQRGEIAPLHSSLDNKRKMDETDASSAVKVKRAVQKT

SEQ ID NO: 1385 - DNA, 564 bp, Homo sapiens
cattttgtgggagcgaagcggtggctgggctgcgcttgggtccgtcgctgcttcggtgtccctgtcgggcttcccagcagcggcctagcgggaaaagtaaaagatgtctgaatatattcgggtaaccgaagatgagaacgatgagcccattgaaataccatcggaagacgatgggacggtgctgctctccacggttacagcccagtttccaggggcgtgtgggcttcgctacaggaatccagtgtctcagtgtatgagaggtgtccggctggtagaaggaattctgcatgccccagatgctggctggggaaatctggtgtatgttgtcaactatccaaaagtatagacggcgtttcaccatcttggccaggctggtcttgaactcctgaccttgtgatccacctgcctcagactcccaaagtgctgggattacaagtgtgagccaccgcgcccagccagttatgtttttttaaataacaaaagaaaaatggatgagacagatgcttcatcagcagtgaaagtgaaaagagcagtccagaaaacatccgatttaatagtgttggg

SEQ ID NO: 1386 - protein, 80 aa, Homo sapiens
MSEYIRVTEDENDEPIEIPSEDDGTVLLSTVTAQFPGACGLRYRNPVSQCMRGVRLVEGILHAPDAGWGNLVYVVNYPKV

SEQ ID NO: 1387 - DNA, 3017 bp, Homo sapiens
cattttgtgggagcgaagcggtggctgggctgcgcttgggtccgtcgctgcttcggtgtccctgtcgggcttcccagcagcggcctagcgggaaaagtaaaagatgtctgaatatattcgggtaaccgaagatgagaacgatgagcccattgaaataccatcggaagacgatgggacggtgctgctctccacggttacagcccagtttccaggggcgtgtgggcttcgctacaggaatccagtgtctcagtgtatgagaggtgtccggctggtagaaggaattctgcatgccccagatgctggctggggaaatctggtgtatgttgtcaactatccaaaagtatagacggcgtttcaccatcttggccaggctggtcttgaactcctgaccttgtgatccaccacgcctggccagttttttgtatctttagtagataacggggtttcactgttttgatctggctggtcttgaactcctgacctcaggtgatccacccccctcagcctcccaaagtgctgggattacaggcgtgagccactgctcctgctcccggcccattttttaaattattattttgagacagggtctcactctgttgcccaggctggtggaacacagtggtgtaatcatagctcactacaccctagaactcctgggctcagcctccagggggaggatcctccagcttcagcctcccaagtagctaggacagatgcatgccactacgcccagctaatgtggcttttttgtggttttttttgatagaggtggggtctccctgtgttgtctaggctgccaggctagtcttgaactattggcctcacacagtcctcccaccttggcctcccaaagcgctaggattacaggcatgagccaccatgcccagcctatgtcttttgaaaatcgactgaaatatcactgctgctgttaataaaactaaaagctgtattgggggtttaaatgaaatgagtgttcattgcttatttttcctctggctttagataaattaatgcttgtaatctaagttttgttgctactttaaatatatgaatcagtggtttaatcttctttgtttacatcccttatttcttatagattgcgcagtctctttgtggagaggacttgatcattaaaggaatcagcgttcatatatccaatgccgaacctaagcacaatagcaatagacagttagaaagaagtggaagatttggtggtaatccaggtggctttgggaatcagggtggatttggtaatagcagagggggtggagctggtttgggaaacaatcaaggtagtaatatgggtggtgggatgaactttggtgcgttcagcattaatccagccatgatggctgccgcccaggcagcactacagagcagttggggtatgatgggcatgttagccagccagcagaaccagtcaggcccatcgggtaataaccaaaaccaaggcaacatgcagagggagccaaaccaggccttcggttctggaaataactcttatagtggctctaattctggtgcagcaattggttggggatcagcatccaatgcagggtcgggcagtggttttaatggaggctttggctcaagcatggattctaagtcttctggctggggaatgtagacagtggggttgtggttggttggtatagaatggtgggaattcaaatttttctaaactcatggtaagtatattgtaaaatacatatgtactaagaattttcaaaattggtttgttcagtgtggagtatattcagcagtatttttgacatttttctttagaaaaaggaagagctaaaggaattttataagttttgttacatgaaaggttgaaatattgagtggttgaaagtgaactgctgtttgcctgattggtaaaccaacacactacaattgatatcaaaaggtttctcctgtaatattttatccctggacttgtcaagtgaattctttgcatgttcaaaacggaaaccattgattagaactacattctttaccccttgttttaatttgaaccccaccatatggatttttttccttaagaaaatctccttttaggagatcatggtgtcacagtgtttggttcttttgttttgttttttaacacttgtctcccctcatacacaaaagtacaatatgaagccttcatttaatctctgcagttcatctcatttcaaatgtttatggaagaagcacttcattgaaagtagtgctgtaaatattctgccataggaatactgtctacatgctttctcattcaagaattcgtcatcacgcatcacaggccgcgtctttgacggtgggtgtcccatttttatccgctactctttatttcatggagtcgtatcaacgctatgaacgcaaggctgtgatatggaaccagaaggctgtctgaacttttgaaaccttgtgtgggattgatggtggtgccgaggcatgaaaggctagtatgagcgagaaaaggagagagcgcgtgcagagacttggtggtgcataatggatattttttaacttggcgagatgtgtctctcaatcctgtggctttggtgagagagtgtgcagagagcaatgatagcaaataatgtacgaatgttttttgcattcaaaggacatccacatctgttggaagacttttaagtgagtttttgttcttagataacccacattagatgaatgtgttaagtgaaatgatacttgtactccccctacccctttgtcaactgctgtgaatgctgtatggtgtgtgttctcttctgttactgatatgtaagtgtggcaatgtgaactgaagctgatgggctgagaacatggactgagcttgtggtgtgctttgcaggaggacttgaagcagagttcaccagtgagctcaggtgtctcaaagaagggtggaagttctaatgtctgttagctacccataagaatgctgtttgctgcagttctgtgtcctgtgcttggatgctttttataagagttgtcattgttggaaattcttaaataaaactgatttaaataat

SEQ ID NO: 1388 - protein, 80 aa, Homo sapiens; identical to SEQ ID NO: 1386

SEQ ID NO: 1389 - DNA, 3157 bp, Homo sapiens
cattttgtgggagcgaagcggtggctgggctgcgcttgggtccgtcgctgcttcggtgtccctgtcgggcttcccagcagcggcctagcgggaaaagtaaaagatgtctgaatatattcgggtaaccgaagatgagaacgatgagcccattgaaataccatcggaagacgatgggacggtgctgctctccacggttacagcccagtttccaggggcgtgtgggcttcgctacaggaatccagtgtctcagtgtatgagaggtgtccggctggtagaaggaattctgcatgccccagatgctggctggggaaatctggtgtatgttgtcaactatccaaaagtatagacggcgtttcaccatcttggccaggctggtcttgaactcctgaccttgtgatccaccacgcctggccagttttttgtatctttagtagataacggggtttcactgttttgatctggctggtcttgaactcctgacctcaggtgatccacccccctcagcctcccaaagtgctgggattacaggcgtgagccactgctcctgctcccggcccattttttaaattattattttgagacagggtctcactctgttgcccaggctggtggaacacagtggtgtaatcatagctcactacaccctagaactcctgggctcagcctccagggggaggatcctccagcttcagcctcccaagtagctaggacagatgcatgccactacgcccagctaatgtggcttttttgtggttttttttgatagaggtggggtctccctgtgttgtctaggctgccaggctagtcttgaactattggcctcacacagtcctcccaccttggcctcccaaagcgctaggattacaggcatgagccaccatgcccagcctatgtcttttgaaaatcgactgaaatatcactgctgctgttaataaaactaaaagctgtattgggggtttaaatgaaatgagtgttcattgcttatttttcctctggctttagataaattaatgcttgtaatctaagttttgttgctactttaaatatatgaatcagtggtttaatcttctttgtttacatcccttatttcttatagattgcgcagtctctttgtggagaggacttgatcattaaaggaatcagcgttcatatatccaatgccgaacctaagcacaatagcaatagacagttagaaagaagtggaagatttggtggtaatccaggtggctttgggaatcagggtggatttggtaatagcagagggggtggagctggtttgggaaacaatcaaggtagtaatatgggtggtgggatgaactttggtgcgttcagcattaatccagccatgatggctgccgcccaggcagcactacagagcagttggggtatgatgggcatgttagccagccagcagaaccagtcaggcccatcgggtaataaccaaaaccaaggcaacatgcagagggagccaaaccaggccttcggttctggaaataactcttatagtggctctaattctggtgcagcaattggttggggatcagcatccaatgcagggtcgggcagtggttttaatggaggctttggctcaagcatggattctaagtcttctggctggggaatgtagacagtggggttgtggttggttggtatagaatggtgggaattcaaatttttctaaactcatggtaagtatattgtaaaatacatatgtactaagaattttcaaaattggtttgttcagtgtggagtatattcagcagtatttttgacatttttctttagaaaaaggaagagctaaaggaattttataagttttgttacatgaaaggttgaaatattgagtggttgaaagtgaactgctgtttgcctgattggtaaaccaacacactacaattgatatcaaaaggtttctcctgtaatattttatccctggacttgtcaagtgaattctttgcatgttcaaaacggaaaccattgattagaactacattctttaccccttgttttaatttgaaccccaccatatggatttttttccttaagaaaatctccttttaggagatcatggtgtcacagtgtttggttcttttgttttgttttttaacacttgtctcccctcatacacaaaagtacaatatgaagccttcatttaatctctgcagttcatctcatttcaaatgtttatggaagaagcacttcattgaaagtagtgctgtaaatattctgccataggaatactgtctacatgctttctcattcaagaattcgtcatcacgcatcacaggccgcgtctttgacggtgggtgtcccatttttatccgctactctttatttcatggagtcgtatcaacgctatgaacgcaaggctgtgatatggaaccagaaggctgtctgaacttttgaaaccttgtgtgggattgatggtggtgccgaggcatgaaaggctagtatgagcgagaaaaggagagagcgcgtgcagagacttggtggtgcataatggatattttttaacttggcgagatgtgtctctcaatcctgtggctttggtgagagagtgtgcagagagcaatgatagcaaataatgtacgaatgttttttgcattcaaaggacatccacatctgttggaagacttttaagtgagtttttgttcttagataacccacattagatgaatgtgttaagtgaaatgatacttgtactccccctacccctttgtcaactgctgtgaatgctgtatggtgtgtgttctcttctgttactgatatgtaagtgtggcaatgtgaactgaagctgatgggctgagaacatggactgagcttgtggtgtgctttgcaggaggacttgaagcagagttcaccagtgagctcaggtgtctcaaagaagggtggaagttctaatgtctgttagctacccataagaatgctgtttgctgcagttctgtgtcctgtgcttggatgctttttataagagttgtcattgttggaaattcttaaataaaactgatttaaataatatgtgtctttgttttgcagccctgaatgcaaagaattcatagcagttaattccccttttttgacccttttgagatggaactttcataaagtttcttggcagtagtttattttgcttcaaataaacttatttgaaaagttg

SEQ ID NO: 1390 - protein, 80 aa, Homo sapiens; identical to SEQ ID NO: 1386

SEQ ID NO: 1391 - DNA, 4464 bp, Homo sapiens
cattttgtgggagcgaagcggtggctgggctgcgcttgggtccgtcgctgcttcggtgtccctgtcgggcttcccagcagcggcctagcgggaaaagtaaaagatgtctgaatatattcgggtaaccgaagatgagaacgatgagcccattgaaataccatcggaagacgatgggacggtgctgctctccacggttacagcccagtttccaggggcgtgtgggcttcgctacaggaatccagtgtctcagtgtatgagaggtgtccggctggtagaaggaattctgcatgccccagatgctggctggggaaatctggtgtatgttgtcaactatccaaaagtatagacggcgtttcaccatcttggccaggctggtcttgaactcctgaccttgtgatccaccacgcctggccagttttttgtatctttagtagataacggggtttcactgttttgatctggctggtcttgaactcctgacctcaggtgatccacccccctcagcctcccaaagtgctgggattacaggcgtgagccactgctcctgctcccggcccattttttaaattattattttgagacagggtctcactctgttgcccaggctggtggaacacagtggtgtaatcatagctcactacaccctagaactcctgggctcagcctccagggggaggatcctccagcttcagcctcccaagtagctaggacagatgcatgccactacgcccagctaatgtggcttttttgtggttttttttgatagaggtggggtctccctgtgttgtctaggctgccaggctagtcttgaactattggcctcacacagtcctcccaccttggcctcccaaagcgctaggattacaggcatgagccaccatgcccagcctatgtcttttgaaaatcgactgaaatatcactgctgctgttaataaaactaaaagctgtattgggggtttaaatgaaatgagtgttcattgcttatttttcctctggctttagataaattaatgcttgtaatctaagttttgttgctactttaaatatatgaatcagtggtttaatcttctttgtttacatcccttatttcttatagattgcgcagtctctttgtggagaggacttgatcattaaaggaatcagcgttcatatatccaatgccgaacctaagcacaatagcaatagacagttagaaagaagtggaagatttggtggtaatccaggtggctttgggaatcagggtggatttggtaatagcagagggggtggagctggtttgggaaacaatcaaggtagtaatatgggtggtgggatgaactttggtgcgttcagcattaatccagccatgatggctgccgcccaggcagcactacagagcagttggggtatgatgggcatgttagccagccagcagaaccagtcaggcccatcgggtaataaccaaaaccaaggcaacatgcagagggagccaaaccaggccttcggttctggaaataactcttatagtggctctaattctggtgcagcaattggttggggatcagcatccaatgcagggtcgggcagtggttttaatggaggctttggctcaagcatggattctaagtcttctggctggggaatgtagacagtggggttgtggttggttggtatagaatggtgggaattcaaatttttctaaactcatggtaagtatattgtaaaatacatatgtactaagaattttcaaaattggtttgttcagtgtggagtatattcagcagtatttttgacatttttctttagaaaaaggaagagctaaaggaattttataagttttgttacatgaaaggttgaaatattgagtggttgaaagtgaactgctgtttgcctgattggtaaaccaacacactacaattgatatcaaaaggtttctcctgtaatattttatccctggacttgtcaagtgaattctttgcatgttcaaaacggaaaccattgattagaactacattctttaccccttgttttaatttgaaccccaccatatggatttttttccttaagaaaatctccttttaggagatcatggtgtcacagtgtttggttcttttgttttgttttttaacacttgtctcccctcatacacaaaagtacaatatgaagccttcatttaatctctgcagttcatctcatttcaaatgtttatggaagaagcacttcattgaaagtagtgctgtaaatattctgccataggaatactgtctacatgctttctcattcaagaattcgtcatcacgcatcacaggccgcgtctttgacggtgggtgtcccatttttatccgctactctttatttcatggagtcgtatcaacgctatgaacgcaaggctgtgatatggaaccagaaggctgtctgaacttttgaaaccttgtgtgggattgatggtggtgccgaggcatgaaaggctagtatgagcgagaaaaggagagagcgcgtgcagagacttggtggtgcataatggatattttttaacttggcgagatgtgtctctcaatcctgtggctttggtgagagagtgtgcagagagcaatgatagcaaataatgtacgaatgttttttgcattcaaaggacatccacatctgttggaagacttttaagtgagtttttgttcttagataacccacattagatgaatgtgttaagtgaaatgatacttgtactccccctacccctttgtcaactgctgtgaatgctgtatggtgtgtgttctcttctgttactgatatgtaagtgtggcaatgtgaactgaagctgatgggctgagaacatggactgagcttgtggtgtgctttgcaggaggacttgaagcagagttcaccagtgagctcaggtgtctcaaagaagggtggaagttctaatgtctgttagctacccataagaatgctgtttgctgcagttctgtgtcctgtgcttggatgctttttataagagttgtcattgttggaaattcttaaataaaactgatttaaataatatgtgtctttgttttgcagccctgaatgcaaagaattcatagcagttaattccccttttttgacccttttgagatggaactttcataaagtttcttggcagtagtttattttgcttcaaataaacttatttgaaaagttgtctcaagtcaaatggattcatcacctgtcatgcattgacacctgatacccagacttaattggtatttgttcttgcattggccaaagtgaaaatttttttttttcttttgaaatctagttttgaataagtctgggtgaccgcacctaaaatggtaagcagtaccctccggctttttcttagtgcctctgtgcatttgggtgatgttctatttacatggcctgtgtaaatctccattgggaagtcatgccttctaaaaagattcttatttgggggagtgggcaaaatgttgattattttctaatgctttgtagcaaagcatatcaattgaaaagggaatatcagcaccttcctagtttgggatttgaaaagtggaattaattgcagtagggataaagtagaagaaaccacaaattatcttgtgcctgaaatccattaagaggcctgatagctttaagaattagggtgggttgtctgtctggaagtgttaagtggaatgggctttgtcctccaggaggtgggggaatgtggtaacattgaatacagttgaataaaatcgcttacaaaactcacactctcacaatgcattgttaagtatgtaaaagcaataacattgattctctgttgtacttttttgtaactaattctgtgagagttgagctcattttctagttggaagaatgtgatatttgttgtgttggtagtttacctaatgcccttacctaattagattatgataaataggtttgtcattttgcaagttacataaacatttatcaatgaagtcatcctttagacttgtaatcgccacattgtttcattattcagtttcctctgtaaagggatcttgagttgttttaattttttttttctgcatctgaatctgcatgatttccaaaccctgtaccatctgaattttgcattttagcacttgcactattactcagcagcagtaacatggtaacacttaaaatggtactcggggacctccaaagactaaactgacaagccttcaaggagcccaggggtaagttaacttgtcaacggcatggtttaatcccttctttacacttgtgtaaatttcagttactggtcatagaaggctttcaatgttgagtggccttttattaacatgtttatggtactgcatagatacgggtatttattttaccctaagaagattttgaagtttaaaagtacttaaactatttggcaaagatttgtttttaaaaatctatttggtcaatctaaatgcattcattctaaaaaattttttgaaccagataaataaaatttttttttgacaccac

SEQ ID NO: 1392 - protein, 80 aa, Homo sapiens; identical to SEQ ID NO: 1386

SEQ ID NO: 1393 - DNA, 4561 bp, Homo sapiens
cattttgtgggagcgaagcggtggctgggctgcgcttgggtccgtcgctgcttcggtgtccctgtcgggcttcccagcagcggcctagcgggaaaagtaaaagatgtctgaatatattcgggtaaccgaagatgagaacgatgagcccattgaaataccatcggaagacgatgggacggtgctgctctccacggttacagcccagtttccaggggcgtgtgggcttcgctacaggaatccagtgtctcagtgtatgagaggtgtccggctggtagaaggaattctgcatgccccagatgctggctggggaaatctggtgtatgttgtcaactatccaaaagtatagacggcgtttcaccatcttggccaggctggtcttgaactcctgaccttgtgatccaccacgcctggccagttttttgtatctttagtagataacggggtttcactgttttgatctggctggtcttgaactcctgacctcaggtgatccacccccctcagcctcccaaagtgctgggattacaggcgtgagccactgctcctgctcccggcccattttttaaattattattttgagacagggtctcactctgttgcccaggctggtggaacacagtggtgtaatcatagctcactacaccctagaactcctgggctcagcctccagggggaggatcctccagcttcagcctcccaagtagctaggacagatgcatgccactacgcccagctaatgtggcttttttgtggttttttttgatagaggtggggtctccctgtgttgtctaggctgccaggctagtcttgaactattggcctcacacagtcctcccaccttggcctcccaaagcgctaggattacaggcatgagccaccatgcccagcctatgtcttttgaaaatcgactgaaatatcactgctgctgttaataaaactaaaagctgtattgggggtttaaatgaaatgagtgttcattgcttatttttcctctggctttagataaattaatgcttgtaatctaagttttgttgctactttaaatatatgaatcagtggtttaatcttctttgtttacatcccttatttcttatagattgcgcagtctctttgtggagaggacttgatcattaaaggaatcagcgttcatatatccaatgccgaacctaagcacaatagcaatagacagttagaaagaagtggaagatttggtggtaatccaggtggctttgggaatcagggtggatttggtaatagcagagggggtggagctggtttgggaaacaatcaaggtagtaatatgggtggtgggatgaactttggtgcgttcagcattaatccagccatgatggctgccgcccaggcagcactacagagcagttggggtatgatgggcatgttagccagccagcagaaccagtcaggcccatcgggtaataaccaaaaccaaggcaacatgcagagggagccaaaccaggccttcggttctggaaataactcttatagtggctctaattctggtgcagcaattggttggggatcagcatccaatgcagggtcgggcagtggttttaatggaggctttggctcaagcatggattctaagtcttctggctggggaatgtagacagtggggttgtggttggttggtatagaatggtgggaattcaaatttttctaaactcatggtaagtatattgtaaaatacatatgtactaagaattttcaaaattggtttgttcagtgtggagtatattcagcagtatttttgacatttttctttagaaaaaggaagagctaaaggaattttataagttttgttacatgaaaggttgaaatattgagtggttgaaagtgaactgctgtttgcctgattggtaaaccaacacactacaattgatatcaaaaggtttctcctgtaatattttatccctggacttgtcaagtgaattctttgcatgttcaaaacggaaaccattgattagaactacattctttaccccttgttttaatttgaaccccaccatatggatttttttccttaagaaaatctccttttaggagatcatggtgtcacagtgtttggttcttttgttttgttttttaacacttgtctcccctcatacacaaaagtacaatatgaagccttcatttaatctctgcagttcatctcatttcaaatgtttatggaagaagcacttcattgaaagtagtgctgtaaatattctgccataggaatactgtctacatgctttctcattcaagaattcgtcatcacgcatcacaggccgcgtctttgacggtgggtgtcccatttttatccgctactctttatttcatggagtcgtatcaacgctatgaacgcaaggctgtgatatggaaccagaaggctgtctgaacttttgaaaccttgtgtgggattgatggtggtgccgaggcatgaaaggctagtatgagcgagaaaaggagagagcgcgtgcagagacttggtggtgcataatggatattttttaacttggcgagatgtgtctctcaatcctgtggctttggtgagagagtgtgcagagagcaatgatagcaaataatgtacgaatgttttttgcattcaaaggacatccacatctgttggaagacttttaagtgagtttttgttcttagataacccacattagatgaatgtgttaagtgaaatgatacttgtactccccctacccctttgtcaactgctgtgaatgctgtatggtgtgtgttctcttctgttactgatatgtaagtgtggcaatgtgaactgaagctgatgggctgagaacatggactgagcttgtggtgtgctttgcaggaggacttgaagcagagttcaccagtgagctcaggtgtctcaaagaagggtggaagttctaatgtctgttagctacccataagaatgctgtttgctgcagttctgtgtcctgtgcttggatgctttttataagagttgtcattgttggaaattcttaaataaaactgatttaaataatatgtgtctttgttttgcagccctgaatgcaaagaattcatagcagttaattccccttttttgacccttttgagatggaactttcataaagtttcttggcagtagtttattttgcttcaaataaacttatttgaaaagttgtctcaagtcaaatggattcatcacctgtcatgcattgacacctgatacccagacttaattggtatttgttcttgcattggccaaagtgaaaatttttttttttcttttgaaatctagttttgaataagtctgggtgaccgcacctaaaatggtaagcagtaccctccggctttttcttagtgcctctgtgcatttgggtgatgttctatttacatggcctgtgtaaatctccattgggaagtcatgccttctaaaaagattcttatttgggggagtgggcaaaatgttgattattttctaatgctttgtagcaaagcatatcaattgaaaagggaatatcagcaccttcctagtttgggatttgaaaagtggaattaattgcagtagggataaagtagaagaaaccacaaattatcttgtgcctgaaatccattaagaggcctgatagctttaagaattagggtgggttgtctgtctggaagtgttaagtggaatgggctttgtcctccaggaggtgggggaatgtggtaacattgaatacagttgaataaaatcgcttacaaaactcacactctcacaatgcattgttaagtatgtaaaagcaataacattgattctctgttgtacttttttgtaactaattctgtgagagttgagctcattttctagttggaagaatgtgatatttgttgtgttggtagtttacctaatgcccttacctaattagattatgataaataggtttgtcattttgcaagttacataaacatttatcaatgaagtcatcctttagacttgtaatcgccacattgtttcattattcagtttcctctgtaaagggatcttgagttgttttaattttttttttctgcatctgaatctgcatgatttccaaaccctgtaccatctgaattttgcattttagcacttgcactattactcagcagcagtaacatggtaacacttaaaatggtactcggggacctccaaagactaaactgacaagccttcaaggagcccaggggtaagttaacttgtcaacggcatggtttaatcccttctttacacttgtgtaaatttcagttactggtcatagaaggctttcaatgttgagtggccttttattaacatgtttatggtactgcatagatacgggtatttattttaccctaagaagattttgaagtttaaaagtacttaaactatttggcaaagatttgtttttaaaaatctatttggtcaatctaaatgcattcattctaaaaaattttttgaaccagataaataaaatttttttttgacaccacagtttagtgtctggagtcttactggaaaaacacgatttctttttatatgtgatatacagatgctggaaagttacctttaaaaattgagtctctaaag

SEQ ID NO: 1394 - protein, 80 aa, Homo sapiens; identical to SEQ ID NO: 1386

SEQ ID NO: 1395 - DNA, 2720 bp, Homo sapiens
tgattttgttatatcccttaccttaatgtttttttcattgttcataacatatttctgagtttttttcttccttttgatttgatcagcaaagccaagatgagccaccacgcctggccagttttttgtatctttagtagataacggggtttcactgttttgatctggctggtcttgaactcctgacctcaggtgatccacccccctcagcctcccaaagtgctgggattacaggcgtgagccactgctcctgctcccggcccattttttaaattattattttgagacagggtctcactctgttgcccaggctggtggaacacagtggtgtaatcatagctcactacaccctagaactcctgggctcagcctccagggggaggatcctccagcttcagcctcccaagtagctaggacagatgcatgccactacgcccagctaatgtggcttttttgtggttttttttgatagaggtggggtctccctgtgttgtctaggctgccaggctagtcttgaactattggcctcacacagtcctcccaccttggcctcccaaagcgctaggattacaggcatgagccaccatgcccagcctatgtcttttgaaaatcgactgaaatatcactgctgctgttaataaaactaaaagctgtattgggggtttaaatgaaatgagtgttcattgcttatttttcctctggctttagataaattaatgcttgtaatctaagttttgttgctactttaaatatatgaatcagtggtttaatcttctttgtttacatcccttatttcttatagattgcgcagtctctttgtggagaggacttgatcattaaaggaatcagcgttcatatatccaatgccgaacctaagcacaatagcaatagacagttagaaagaagtggaagatttggtggtaatccaggtggctttgggaatcagggtggatttggtaatagcagagggggtggagctggtttgggaaacaatcaaggtagtaatatgggtggtgggatgaactttggtgcgttcagcattaatccagccatgatggctgccgcccaggcagcactacagagcagttggggtatgatgggcatgttagccagccagcagaaccagtcaggcccatcgggtaataaccaaaaccaaggcaacatgcagagggagccaaaccaggccttcggttctggaaataactcttatagtggctctaattctggtgcagcaattggttggggatcagcatccaatgcagggtcgggcagtggttttaatggaggctttggctcaagcatggattctaagtcttctggctggggaatgtagacagtggggttgtggttggttggtatagaatggtgggaattcaaatttttctaaactcatggtaagtatattgtaaaatacatatgtactaagaattttcaaaattggtttgttcagtgtggagtatattcagcagtatttttgacatttttctttagaaaaaggaagagctaaaggaattttataagttttgttacatgaaaggttgaaatattgagtggttgaaagtgaactgctgtttgcctgattggtaaaccaacacactacaattgatatcaaaaggtttctcctgtaatattttatccctggacttgtcaagtgaattctttgcatgttcaaaacggaaaccattgattagaactacattctttaccccttgttttaatttgaaccccaccatatggatttttttccttaagaaaatctccttttaggagatcatggtgtcacagtgtttggttcttttgttttgttttttaacacttgtctcccctcatacacaaaagtacaatatgaagccttcatttaatctctgcagttcatctcatttcaaatgtttatggaagaagcacttcattgaaagtagtgctgtaaatattctgccataggaatactgtctacatgctttctcattcaagaattcgtcatcacgcatcacaggccgcgtctttgacggtgggtgtcccatttttatccgctactctttatttcatggagtcgtatcaacgctatgaacgcaaggctgtgatatggaaccagaaggctgtctgaacttttgaaaccttgtgtgggattgatggtggtgccgaggcatgaaaggctagtatgagcgagaaaaggagagagcgcgtgcagagacttggtggtgcataatggatattttttaacttggcgagatgtgtctctcaatcctgtggctttggtgagagagtgtgcagagagcaatgatagcaaataatgtacgaatgttttttgcattcaaaggacatccacatctgttggaagacttttaagtgagtttttgttcttagataacccacattagatgaatgtgttaagtgaaatgatacttgtactccccctacccctttgtcaactgctgtgaatgctgtatggtgtgtgttctcttctgttactgatatgtaagtgtggcaatgtgaactgaagctgatgggctgagaacatggactgagcttgtggtgtgctttgcaggaggacttgaagcagagttcaccagtgagctcaggtgtctcaaagaagggtggaagttctaatgtctgttagctacccataagaatgctgtttgctgcagttctgtgtcctgtgcttggatgctttttataagagttgtcattgttggaaattcttaaataaaactgatttaaataat

SEQ ID NO: 1396 - protein, 108 aa, Homo sapiens
MGGGMNFGAFSINPAMMAAAQAALQSSWGMMGMLASQQNQSGPSGNNQNQGNMQREPNQAFGSGNNSYSGSNSGAAIGWGSASNAGSGSGFNGGFGSSMDSKSSGWGM

SEQ ID NO: 1397 - DNA, 4167 bp, Homo sapiens
tgattttgttatatcccttaccttaatgtttttttcattgttcataacatatttctgagtttttttcttccttttgatttgatcagcaaagccaagatgagccaccacgcctggccagttttttgtatctttagtagataacggggtttcactgttttgatctggctggtcttgaactcctgacctcaggtgatccacccccctcagcctcccaaagtgctgggattacaggcgtgagccactgctcctgctcccggcccattttttaaattattattttgagacagggtctcactctgttgcccaggctggtggaacacagtggtgtaatcatagctcactacaccctagaactcctgggctcagcctccagggggaggatcctccagcttcagcctcccaagtagctaggacagatgcatgccactacgcccagctaatgtggcttttttgtggttttttttgatagaggtggggtctccctgtgttgtctaggctgccaggctagtcttgaactattggcctcacacagtcctcccaccttggcctcccaaagcgctaggattacaggcatgagccaccatgcccagcctatgtcttttgaaaatcgactgaaatatcactgctgctgttaataaaactaaaagctgtattgggggtttaaatgaaatgagtgttcattgcttatttttcctctggctttagataaattaatgcttgtaatctaagttttgttgctactttaaatatatgaatcagtggtttaatcttctttgtttacatcccttatttcttatagattgcgcagtctctttgtggagaggacttgatcattaaaggaatcagcgttcatatatccaatgccgaacctaagcacaatagcaatagacagttagaaagaagtggaagatttggtggtaatccaggtggctttgggaatcagggtggatttggtaatagcagagggggtggagctggtttgggaaacaatcaaggtagtaatatgggtggtgggatgaactttggtgcgttcagcattaatccagccatgatggctgccgcccaggcagcactacagagcagttggggtatgatgggcatgttagccagccagcagaaccagtcaggcccatcgggtaataaccaaaaccaaggcaacatgcagagggagccaaaccaggccttcggttctggaaataactcttatagtggctctaattctggtgcagcaattggttggggatcagcatccaatgcagggtcgggcagtggttttaatggaggctttggctcaagcatggattctaagtcttctggctggggaatgtagacagtggggttgtggttggttggtatagaatggtgggaattcaaatttttctaaactcatggtaagtatattgtaaaatacatatgtactaagaattttcaaaattggtttgttcagtgtggagtatattcagcagtatttttgacatttttctttagaaaaaggaagagctaaaggaattttataagttttgttacatgaaaggttgaaatattgagtggttgaaagtgaactgctgtttgcctgattggtaaaccaacacactacaattgatatcaaaaggtttctcctgtaatattttatccctggacttgtcaagtgaattctttgcatgttcaaaacggaaaccattgattagaactacattctttaccccttgttttaatttgaaccccaccatatggatttttttccttaagaaaatctccttttaggagatcatggtgtcacagtgtttggttcttttgttttgttttttaacacttgtctcccctcatacacaaaagtacaatatgaagccttcatttaatctctgcagttcatctcatttcaaatgtttatggaagaagcacttcattgaaagtagtgctgtaaatattctgccataggaatactgtctacatgctttctcattcaagaattcgtcatcacgcatcacaggccgcgtctttgacggtgggtgtcccatttttatccgctactctttatttcatggagtcgtatcaacgctatgaacgcaaggctgtgatatggaaccagaaggctgtctgaacttttgaaaccttgtgtgggattgatggtggtgccgaggcatgaaaggctagtatgagcgagaaaaggagagagcgcgtgcagagacttggtggtgcataatggatattttttaacttggcgagatgtgtctctcaatcctgtggctttggtgagagagtgtgcagagagcaatgatagcaaataatgtacgaatgttttttgcattcaaaggacatccacatctgttggaagacttttaagtgagtttttgttcttagataacccacattagatgaatgtgttaagtgaaatgatacttgtactccccctacccctttgtcaactgctgtgaatgctgtatggtgtgtgttctcttctgttactgatatgtaagtgtggcaatgtgaactgaagctgatgggctgagaacatggactgagcttgtggtgtgctttgcaggaggacttgaagcagagttcaccagtgagctcaggtgtctcaaagaagggtggaagttctaatgtctgttagctacccataagaatgctgtttgctgcagttctgtgtcctgtgcttggatgctttttataagagttgtcattgttggaaattcttaaataaaactgatttaaataatatgtgtctttgttttgcagccctgaatgcaaagaattcatagcagttaattccccttttttgacccttttgagatggaactttcataaagtttcttggcagtagtttattttgcttcaaataaacttatttgaaaagttgtctcaagtcaaatggattcatcacctgtcatgcattgacacctgatacccagacttaattggtatttgttcttgcattggccaaagtgaaaatttttttttttcttttgaaatctagttttgaataagtctgggtgaccgcacctaaaatggtaagcagtaccctccggctttttcttagtgcctctgtgcatttgggtgatgttctatttacatggcctgtgtaaatctccattgggaagtcatgccttctaaaaagattcttatttgggggagtgggcaaaatgttgattattttctaatgctttgtagcaaagcatatcaattgaaaagggaatatcagcaccttcctagtttgggatttgaaaagtggaattaattgcagtagggataaagtagaagaaaccacaaattatcttgtgcctgaaatccattaagaggcctgatagctttaagaattagggtgggttgtctgtctggaagtgttaagtggaatgggctttgtcctccaggaggtgggggaatgtggtaacattgaatacagttgaataaaatcgcttacaaaactcacactctcacaatgcattgttaagtatgtaaaagcaataacattgattctctgttgtacttttttgtaactaattctgtgagagttgagctcattttctagttggaagaatgtgatatttgttgtgttggtagtttacctaatgcccttacctaattagattatgataaataggtttgtcattttgcaagttacataaacatttatcaatgaagtcatcctttagacttgtaatcgccacattgtttcattattcagtttcctctgtaaagggatcttgagttgttttaattttttttttctgcatctgaatctgcatgatttccaaaccctgtaccatctgaattttgcattttagcacttgcactattactcagcagcagtaacatggtaacacttaaaatggtactcggggacctccaaagactaaactgacaagccttcaaggagcccaggggtaagttaacttgtcaacggcatggtttaatcccttctttacacttgtgtaaatttcagttactggtcatagaaggctttcaatgttgagtggccttttattaacatgtttatggtactgcatagatacgggtatttattttaccctaagaagattttgaagtttaaaagtacttaaactatttggcaaagatttgtttttaaaaatctatttggtcaatctaaatgcattcattctaaaaaattttttgaaccagataaataaaatttttttttgacaccac

SEQ ID NO: 1398 - protein, 108 aa, Homo sapiens; identical to SEQ ID NO: 1396

SEQ ID NO: 1399 - DNA, 4264 bp, Homo sapiens
tgattttgttatatcccttaccttaatgtttttttcattgttcataacatatttctgagtttttttcttccttttgatttgatcagcaaagccaagatgagccaccacgcctggccagttttttgtatctttagtagataacggggtttcactgttttgatctggctggtcttgaactcctgacctcaggtgatccacccccctcagcctcccaaagtgctgggattacaggcgtgagccactgctcctgctcccggcccattttttaaattattattttgagacagggtctcactctgttgcccaggctggtggaacacagtggtgtaatcatagctcactacaccctagaactcctgggctcagcctccagggggaggatcctccagcttcagcctcccaagtagctaggacagatgcatgccactacgcccagctaatgtggcttttttgtggttttttttgatagaggtggggtctccctgtgttgtctaggctgccaggctagtcttgaactattggcctcacacagtcctcccaccttggcctcccaaagcgctaggattacaggcatgagccaccatgcccagcctatgtcttttgaaaatcgactgaaatatcactgctgctgttaataaaactaaaagctgtattgggggtttaaatgaaatgagtgttcattgcttatttttcctctggctttagataaattaatgcttgtaatctaagttttgttgctactttaaatatatgaatcagtggtttaatcttctttgtttacatcccttatttcttatagattgcgcagtctctttgtggagaggacttgatcattaaaggaatcagcgttcatatatccaatgccgaacctaagcacaatagcaatagacagttagaaagaagtggaagatttggtggtaatccaggtggctttgggaatcagggtggatttggtaatagcagagggggtggagctggtttgggaaacaatcaaggtagtaatatgggtggtgggatgaactttggtgcgttcagcattaatccagccatgatggctgccgcccaggcagcactacagagcagttggggtatgatgggcatgttagccagccagcagaaccagtcaggcccatcgggtaataaccaaaaccaaggcaacatgcagagggagccaaaccaggccttcggttctggaaataactcttatagtggctctaattctggtgcagcaattggttggggatcagcatccaatgcagggtcgggcagtggttttaatggaggctttggctcaagcatggattctaagtcttctggctggggaatgtagacagtggggttgtggttggttggtatagaatggtgggaattcaaatttttctaaactcatggtaagtatattgtaaaatacatatgtactaagaattttcaaaattggtttgttcagtgtggagtatattcagcagtatttttgacatttttctttagaaaaaggaagagctaaaggaattttataagttttgttacatgaaaggttgaaatattgagtggttgaaagtgaactgctgtttgcctgattggtaaaccaacacactacaattgatatcaaaaggtttctcctgtaatattttatccctggacttgtcaagtgaattctttgcatgttcaaaacggaaaccattgattagaactacattctttaccccttgttttaatttgaaccccaccatatggatttttttccttaagaaaatctccttttaggagatcatggtgtcacagtgtttggttcttttgttttgttttttaacacttgtctcccctcatacacaaaagtacaatatgaagccttcatttaatctctgcagttcatctcatttcaaatgtttatggaagaagcacttcattgaaagtagtgctgtaaatattctgccataggaatactgtctacatgctttctcattcaagaattcgtcatcacgcatcacaggccgcgtctttgacggtgggtgtcccatttttatccgctactctttatttcatggagtcgtatcaacgctatgaacgcaaggctgtgatatggaaccagaaggctgtctgaacttttgaaaccttgtgtgggattgatggtggtgccgaggcatgaaaggctagtatgagcgagaaaaggagagagcgcgtgcagagacttggtggtgcataatggatattttttaacttggcgagatgtgtctctcaatcctgtggctttggtgagagagtgtgcagagagcaatgatagcaaataatgtacgaatgttttttgcattcaaaggacatccacatctgttggaagacttttaagtgagtttttgttcttagataacccacattagatgaatgtgttaagtgaaatgatacttgtactccccctacccctttgtcaactgctgtgaatgctgtatggtgtgtgttctcttctgttactgatatgtaagtgtggcaatgtgaactgaagctgatgggctgagaacatggactgagcttgtggtgtgctttgcaggaggacttgaagcagagttcaccagtgagctcaggtgtctcaaagaagggtggaagttctaatgtctgttagctacccataagaatgctgtttgctgcagttctgtgtcctgtgcttggatgctttttataagagttgtcattgttggaaattcttaaataaaactgatttaaataatatgtgtctttgttttgcagccctgaatgcaaagaattcatagcagttaattccccttttttgacccttttgagatggaactttcataaagtttcttggcagtagtttattttgcttcaaataaacttatttgaaaagttgtctcaagtcaaatggattcatcacctgtcatgcattgacacctgatacccagacttaattggtatttgttcttgcattggccaaagtgaaaatttttttttttcttttgaaatctagttttgaataagtctgggtgaccgcacctaaaatggtaagcagtaccctccggctttttcttagtgcctctgtgcatttgggtgatgttctatttacatggcctgtgtaaatctccattgggaagtcatgccttctaaaaagattcttatttgggggagtgggcaaaatgttgattattttctaatgctttgtagcaaagcatatcaattgaaaagggaatatcagcaccttcctagtttgggatttgaaaagtggaattaattgcagtagggataaagtagaagaaaccacaaattatcttgtgcctgaaatccattaagaggcctgatagctttaagaattagggtgggttgtctgtctggaagtgttaagtggaatgggctttgtcctccaggaggtgggggaatgtggtaacattgaatacagttgaataaaatcgcttacaaaactcacactctcacaatgcattgttaagtatgtaaaagcaataacattgattctctgttgtacttttttgtaactaattctgtgagagttgagctcattttctagttggaagaatgtgatatttgttgtgttggtagtttacctaatgcccttacctaattagattatgataaataggtttgtcattttgcaagttacataaacatttatcaatgaagtcatcctttagacttgtaatcgccacattgtttcattattcagtttcctctgtaaagggatcttgagttgttttaattttttttttctgcatctgaatctgcatgatttccaaaccctgtaccatctgaattttgcattttagcacttgcactattactcagcagcagtaacatggtaacacttaaaatggtactcggggacctccaaagactaaactgacaagccttcaaggagcccaggggtaagttaacttgtcaacggcatggtttaatcccttctttacacttgtgtaaatttcagttactggtcatagaaggctttcaatgttgagtggccttttattaacatgtttatggtactgcatagatacgggtatttattttaccctaagaagattttgaagtttaaaagtacttaaactatttggcaaagatttgtttttaaaaatctatttggtcaatctaaatgcattcattctaaaaaattttttgaaccagataaataaaatttttttttgacaccacagtttagtgtctggagtcttactggaaaaacacgatttctttttatatgtgatatacagatgctggaaagttacctttaaaaattgagtctctaaag

SEQ ID NO: 1400 - protein, 108 aa, Homo sapiens; identical to SEQ ID NO: 1396

SEQ ID NO: 1401 - DNA, 1976 bp, Homo sapiens
ggattacaggcatgagccaccatgcccagcctatgtcttttgaaaatcgactgaaatatcactgctgctgttaataaaactaaaagctgtattgggggtttaaatgaaatgagtgttcattgcttatttttcctctggctttagataaattaatgcttgtaatctaagttttgttgctactttaaatatatgaatcagtggtttaatcttctttgtttacatcccttatttcttatagattgcgcagtctctttgtggagaggacttgatcattaaaggaatcagcgttcatatatccaatgccgaacctaagcacaatagcaatagacagttagaaagaagtggaagatttggtggtaatccaggtggctttgggaatcagggtggatttggtaataaccaaaaccaaggcaacatgcagagggagccaaaccaggccttcggttctggaaataactcttatagtggctctaattctggtgcagcaattggttggggatcagcatccaatgcagggtcgggcagtggttttaatggaggctttggctcaagcatggattctaagtcttctggctggggaatgtagacagtggggttgtggttggttggtatagaatggtgggaattcaaatttttctaaactcatggtaagtatattgtaaaatacatatgtactaagaattttcaaaattggtttgttcagtgtggagtatattcagcagtatttttgacatttttctttagaaaaaggaagagctaaaggaattttataagttttgttacatgaaaggttgaaatattgagtggttgaaagtgaactgctgtttgcctgattggtaaaccaacacactacaattgatatcaaaaggtttctcctgtaatattttatccctggacttgtcaagtgaattctttgcatgttcaaaacggaaaccattgattagaactacattctttaccccttgttttaatttgaaccccaccatatggatttttttccttaagaaaatctccttttaggagatcatggtgtcacagtgtttggttcttttgttttgttttttaacacttgtctcccctcatacacaaaagtacaatatgaagccttcatttaatctctgcagttcatctcatttcaaatgtttatggaagaagcacttcattgaaagtagtgctgtaaatattctgccataggaatactgtctacatgctttctcattcaagaattcgtcatcacgcatcacaggccgcgtctttgacggtgggtgtcccatttttatccgctactctttatttcatggagtcgtatcaacgctatgaacgcaaggctgtgatatggaaccagaaggctgtctgaacttttgaaaccttgtgtgggattgatggtggtgccgaggcatgaaaggctagtatgagcgagaaaaggagagagcgcgtgcagagacttggtggtgcataatggatattttttaacttggcgagatgtgtctctcaatcctgtggctttggtgagagagtgtgcagagagcaatgatagcaaataatgtacgaatgttttttgcattcaaaggacatccacatctgttggaagacttttaagtgagtttttgttcttagataacccacattagatgaatgtgttaagtgaaatgatacttgtactccccctacccctttgtcaactgctgtgaatgctgtatggtgtgtgttctcttctgttactgatatgtaagtgtggcaatgtgaactgaagctgatgggctgagaacatggactgagcttgtggtgtgctttgcaggaggacttgaagcagagttcaccagtgagctcaggtgtctcaaagaagggtggaagttctaatgtctgttagctacccataagaatgctgtttgctgcagttctgtgtcctgtgcttggatgctttttataagagttgtcattgttggaaattcttaaataaaactgatttaaataat

SEQ ID NO: 1402 - protein, 56 aa, Homo sapiens
MQREPNQAFGSGNNSYSGSNSGAAIGWGSASNAGSGSGFNGGFGSSMDSKSSGWGM

SEQ ID NO: 1403 - DNA, 3423 bp, Homo sapiens
ggattacaggcatgagccaccatgcccagcctatgtcttttgaaaatcgactgaaatatcactgctgctgttaataaaactaaaagctgtattgggggtttaaatgaaatgagtgttcattgcttatttttcctctggctttagataaattaatgcttgtaatctaagttttgttgctactttaaatatatgaatcagtggtttaatcttctttgtttacatcccttatttcttatagattgcgcagtctctttgtggagaggacttgatcattaaaggaatcagcgttcatatatccaatgccgaacctaagcacaatagcaatagacagttagaaagaagtggaagatttggtggtaatccaggtggctttgggaatcagggtggatttggtaataaccaaaaccaaggcaacatgcagagggagccaaaccaggccttcggttctggaaataactcttatagtggctctaattctggtgcagcaattggttggggatcagcatccaatgcagggtcgggcagtggttttaatggaggctttggctcaagcatggattctaagtcttctggctggggaatgtagacagtggggttgtggttggttggtatagaatggtgggaattcaaatttttctaaactcatggtaagtatattgtaaaatacatatgtactaagaattttcaaaattggtttgttcagtgtggagtatattcagcagtatttttgacatttttctttagaaaaaggaagagctaaaggaattttataagttttgttacatgaaaggttgaaatattgagtggttgaaagtgaactgctgtttgcctgattggtaaaccaacacactacaattgatatcaaaaggtttctcctgtaatattttatccctggacttgtcaagtgaattctttgcatgttcaaaacggaaaccattgattagaactacattctttaccccttgttttaatttgaaccccaccatatggatttttttccttaagaaaatctccttttaggagatcatggtgtcacagtgtttggttcttttgttttgttttttaacacttgtctcccctcatacacaaaagtacaatatgaagccttcatttaatctctgcagttcatctcatttcaaatgtttatggaagaagcacttcattgaaagtagtgctgtaaatattctgccataggaatactgtctacatgctttctcattcaagaattcgtcatcacgcatcacaggccgcgtctttgacggtgggtgtcccatttttatccgctactctttatttcatggagtcgtatcaacgctatgaacgcaaggctgtgatatggaaccagaaggctgtctgaacttttgaaaccttgtgtgggattgatggtggtgccgaggcatgaaaggctagtatgagcgagaaaaggagagagcgcgtgcagagacttggtggtgcataatggatattttttaacttggcgagatgtgtctctcaatcctgtggctttggtgagagagtgtgcagagagcaatgatagcaaataatgtacgaatgttttttgcattcaaaggacatccacatctgttggaagacttttaagtgagtttttgttcttagataacccacattagatgaatgtgttaagtgaaatgatacttgtactccccctacccctttgtcaactgctgtgaatgctgtatggtgtgtgttctcttctgttactgatatgtaagtgtggcaatgtgaactgaagctgatgggctgagaacatggactgagcttgtggtgtgctttgcaggaggacttgaagcagagttcaccagtgagctcaggtgtctcaaagaagggtggaagttctaatgtctgttagctacccataagaatgctgtttgctgcagttctgtgtcctgtgcttggatgctttttataagagttgtcattgttggaaattcttaaataaaactgatttaaataatatgtgtctttgttttgcagccctgaatgcaaagaattcatagcagttaattccccttttttgacccttttgagatggaactttcataaagtttcttggcagtagtttattttgcttcaaataaacttatttgaaaagttgtctcaagtcaaatggattcatcacctgtcatgcattgacacctgatacccagacttaattggtatttgttcttgcattggccaaagtgaaaatttttttttttcttttgaaatctagttttgaataagtctgggtgaccgcacctaaaatggtaagcagtaccctccggctttttcttagtgcctctgtgcatttgggtgatgttctatttacatggcctgtgtaaatctccattgggaagtcatgccttctaaaaagattcttatttgggggagtgggcaaaatgttgattattttctaatgctttgtagcaaagcatatcaattgaaaagggaatatcagcaccttcctagtttgggatttgaaaagtggaattaattgcagtagggataaagtagaagaaaccacaaattatcttgtgcctgaaatccattaagaggcctgatagctttaagaattagggtgggttgtctgtctggaagtgttaagtggaatgggctttgtcctccaggaggtgggggaatgtggtaacattgaatacagttgaataaaatcgcttacaaaactcacactctcacaatgcattgttaagtatgtaaaagcaataacattgattctctgttgtacttttttgtaactaattctgtgagagttgagctcattttctagttggaagaatgtgatatttgttgtgttggtagtttacctaatgcccttacctaattagattatgataaataggtttgtcattttgcaagttacataaacatttatcaatgaagtcatcctttagacttgtaatcgccacattgtttcattattcagtttcctctgtaaagggatcttgagttgttttaattttttttttctgcatctgaatctgcatgatttccaaaccctgtaccatctgaattttgcattttagcacttgcactattactcagcagcagtaacatggtaacacttaaaatggtactcggggacctccaaagactaaactgacaagccttcaaggagcccaggggtaagttaacttgtcaacggcatggtttaatcccttctttacacttgtgtaaatttcagttactggtcatagaaggctttcaatgttgagtggccttttattaacatgtttatggtactgcatagatacgggtatttattttaccctaagaagattttgaagtttaaaagtacttaaactatttggcaaagatttgtttttaaaaatctatttggtcaatctaaatgcattcattctaaaaaattttttgaaccagataaataaaatttttttttgacaccac

SEQ ID NO: 1404 - protein, 56 aa, Homo sapiens; identical to SEQ ID NO: 1402

SEQ ID NO: 1405 - DNA, 3520 bp, Homo sapiens
ggattacaggcatgagccaccatgcccagcctatgtcttttgaaaatcgactgaaatatcactgctgctgttaataaaactaaaagctgtattgggggtttaaatgaaatgagtgttcattgcttatttttcctctggctttagataaattaatgcttgtaatctaagttttgttgctactttaaatatatgaatcagtggtttaatcttctttgtttacatcccttatttcttatagattgcgcagtctctttgtggagaggacttgatcattaaaggaatcagcgttcatatatccaatgccgaacctaagcacaatagcaatagacagttagaaagaagtggaagatttggtggtaatccaggtggctttgggaatcagggtggatttggtaataaccaaaaccaaggcaacatgcagagggagccaaaccaggccttcggttctggaaataactcttatagtggctctaattctggtgcagcaattggttggggatcagcatccaatgcagggtcgggcagtggttttaatggaggctttggctcaagcatggattctaagtcttctggctggggaatgtagacagtggggttgtggttggttggtatagaatggtgggaattcaaatttttctaaactcatggtaagtatattgtaaaatacatatgtactaagaattttcaaaattggtttgttcagtgtggagtatattcagcagtatttttgacatttttctttagaaaaaggaagagctaaaggaattttataagttttgttacatgaaaggttgaaatattgagtggttgaaagtgaactgctgtttgcctgattggtaaaccaacacactacaattgatatcaaaaggtttctcctgtaatattttatccctggacttgtcaagtgaattctttgcatgttcaaaacggaaaccattgattagaactacattctttaccccttgttttaatttgaaccccaccatatggatttttttccttaagaaaatctccttttaggagatcatggtgtcacagtgtttggttcttttgttttgttttttaacacttgtctcccctcatacacaaaagtacaatatgaagccttcatttaatctctgcagttcatctcatttcaaatgtttatggaagaagcacttcattgaaagtagtgctgtaaatattctgccataggaatactgtctacatgctttctcattcaagaattcgtcatcacgcatcacaggccgcgtctttgacggtgggtgtcccatttttatccgctactctttatttcatggagtcgtatcaacgctatgaacgcaaggctgtgatatggaaccagaaggctgtctgaacttttgaaaccttgtgtgggattgatggtggtgccgaggcatgaaaggctagtatgagcgagaaaaggagagagcgcgtgcagagacttggtggtgcataatggatattttttaacttggcgagatgtgtctctcaatcctgtggctttggtgagagagtgtgcagagagcaatgatagcaaataatgtacgaatgttttttgcattcaaaggacatccacatctgttggaagacttttaagtgagtttttgttcttagataacccacattagatgaatgtgttaagtgaaatgatacttgtactccccctacccctttgtcaactgctgtgaatgctgtatggtgtgtgttctcttctgttactgatatgtaagtgtggcaatgtgaactgaagctgatgggctgagaacatggactgagcttgtggtgtgctttgcaggaggacttgaagcagagttcaccagtgagctcaggtgtctcaaagaagggtggaagttctaatgtctgttagctacccataagaatgctgtttgctgcagttctgtgtcctgtgcttggatgctttttataagagttgtcattgttggaaattcttaaataaaactgatttaaataatatgtgtctttgttttgcagccctgaatgcaaagaattcatagcagttaattccccttttttgacccttttgagatggaactttcataaagtttcttggcagtagtttattttgcttcaaataaacttatttgaaaagttgtctcaagtcaaatggattcatcacctgtcatgcattgacacctgatacccagacttaattggtatttgttcttgcattggccaaagtgaaaatttttttttttcttttgaaatctagttttgaataagtctgggtgaccgcacctaaaatggtaagcagtaccctccggctttttcttagtgcctctgtgcatttgggtgatgttctatttacatggcctgtgtaaatctccattgggaagtcatgccttctaaaaagattcttatttgggggagtgggcaaaatgttgattattttctaatgctttgtagcaaagcatatcaattgaaaagggaatatcagcaccttcctagtttgggatttgaaaagtggaattaattgcagtagggataaagtagaagaaaccacaaattatcttgtgcctgaaatccattaagaggcctgatagctttaagaattagggtgggttgtctgtctggaagtgttaagtggaatgggctttgtcctccaggaggtgggggaatgtggtaacattgaatacagttgaataaaatcgcttacaaaactcacactctcacaatgcattgttaagtatgtaaaagcaataacattgattctctgttgtacttttttgtaactaattctgtgagagttgagctcattttctagttggaagaatgtgatatttgttgtgttggtagtttacctaatgcccttacctaattagattatgataaataggtttgtcattttgcaagttacataaacatttatcaatgaagtcatcctttagacttgtaatcgccacattgtttcattattcagtttcctctgtaaagggatcttgagttgttttaattttttttttctgcatctgaatctgcatgatttccaaaccctgtaccatctgaattttgcattttagcacttgcactattactcagcagcagtaacatggtaacacttaaaatggtactcggggacctccaaagactaaactgacaagccttcaaggagcccaggggtaagttaacttgtcaacggcatggtttaatcccttctttacacttgtgtaaatttcagttactggtcatagaaggctttcaatgttgagtggccttttattaacatgtttatggtactgcatagatacgggtatttattttaccctaagaagattttgaagtttaaaagtacttaaactatttggcaaagatttgtttttaaaaatctatttggtcaatctaaatgcattcattctaaaaaattttttgaaccagataaataaaatttttttttgacaccacagtttagtgtctggagtcttactggaaaaacacgatttctttttatatgtgatatacagatgctggaaagttacctttaaaaattgagtctctaaag

SEQ ID NO: 1406 - protein, 56 aa, Homo sapiens; identical to SEQ ID NO: 1402

SEQ ID NO: 1407 - DNA, 1301 bp, Homo sapiens
acttgatcattaaaggaatcagcgttcatatatccaatgccgaacctaagcacaatagcaatagacagttagaaagaagtggaagatttggtggtaatccaggtggctttgggaatcagggtggatttggtaatagcagagggggtggagctggtttgggaaacaatcaaggtagtaatatgggtggtgggatgaactttggtgcgttcagcattaatccagccatgatggctgccgcccaggcagcactacagagcagttggggtatgatgggcatgttagccagccagcagaaccagtcaggcccatcgggtaataaccaaaaccaaggcaacatgcagagggagccaaaccaggccttcggttctggaaataactcttatagtggctctaattctggtgcagcaattggttggggatcagcatccaatgcagggtcgggcagtggttttaatggaggctttggctcaagcatggattctaagtcttctggctggggaatgtagacagtggggttgtggttggttggtatagaatggtgggaattcaaatttttctaaactcatggtaagtatattgtaaaatacatatgtactaagaattttcaaaattggtttgttcagtgtggagtatattcagcagtatttttgacatttttctttagaaaaaggaagagctaaaggaattttataagttttgttacatgaaaggttgaaatattgagtggttgaaagtgaactgctgtttgcctgattggtaaaccaacacactacaattgatatcaaaaggtttctcctgtaatattttatccctggacttgtcaagtgaattctttgcatgttcaaaacggaaaccattgattagaactacattctttaccccttgttttaatttgaaccccaccatatggatttttttccttaagaaaatctccttttaggagatcatggtgtcacagtgtttggttcttttgttttgttttttaacacttgtctcccctcatacacaaaagtacaatatgaagccttcatttaatctctgcagttcatctcatttcaaatgtttatggaagaagcacttcattgaaagtagtgctgtaaatattctgccataggaatactgtctacatgctttctcattcaagaattcgtcatcacgcatcacaggccgcgtctttgacgccctgaatgcaaagaattcatagcagttaattccccttttttgacccttttgagatggaactttcataaagtttcttggcagtagtttattttgcttcaaataaacttatttgaaaagtt

SEQ ID NO: 1408 - protein, 108 aa, Homo sapiens; identical to SEQ ID NO: 1396

SEQ ID NO: 1409 - DNA, 2609 bp, Homo sapiens
acttgatcattaaaggaatcagcgttcatatatccaatgccgaacctaagcacaatagcaatagacagttagaaagaagtggaagatttggtggtaatccaggtggctttgggaatcagggtggatttggtaatagcagagggggtggagctggtttgggaaacaatcaaggtagtaatatgggtggtgggatgaactttggtgcgttcagcattaatccagccatgatggctgccgcccaggcagcactacagagcagttggggtatgatgggcatgttagccagccagcagaaccagtcaggcccatcgggtaataaccaaaaccaaggcaacatgcagagggagccaaaccaggccttcggttctggaaataactcttatagtggctctaattctggtgcagcaattggttggggatcagcatccaatgcagggtcgggcagtggttttaatggaggctttggctcaagcatggattctaagtcttctggctggggaatgtagacagtggggttgtggttggttggtatagaatggtgggaattcaaatttttctaaactcatggtaagtatattgtaaaatacatatgtactaagaattttcaaaattggtttgttcagtgtggagtatattcagcagtatttttgacatttttctttagaaaaaggaagagctaaaggaattttataagttttgttacatgaaaggttgaaatattgagtggttgaaagtgaactgctgtttgcctgattggtaaaccaacacactacaattgatatcaaaaggtttctcctgtaatattttatccctggacttgtcaagtgaattctttgcatgttcaaaacggaaaccattgattagaactacattctttaccccttgttttaatttgaaccccaccatatggatttttttccttaagaaaatctccttttaggagatcatggtgtcacagtgtttggttcttttgttttgttttttaacacttgtctcccctcatacacaaaagtacaatatgaagccttcatttaatctctgcagttcatctcatttcaaatgtttatggaagaagcacttcattgaaagtagtgctgtaaatattctgccataggaatactgtctacatgctttctcattcaagaattcgtcatcacgcatcacaggccgcgtctttgacgccctgaatgcaaagaattcatagcagttaattccccttttttgacccttttgagatggaactttcataaagtttcttggcagtagtttattttgcttcaaataaacttatttgaaaagttgtctcaagtcaaatggattcatcacctgtcatgcattgacacctgatacccagacttaattggtatttgttcttgcattggccaaagtgaaaatttttttttttcttttgaaatctagttttgaataagtctgggtgaccgcacctaaaatggtaagcagtaccctccggctttttcttagtgcctctgtgcatttgggtgatgttctatttacatggcctgtgtaaatctccattgggaagtcatgccttctaaaaagattcttatttgggggagtgggcaaaatgttgattattttctaatgctttgtagcaaagcatatcaattgaaaagggaatatcagcaccttcctagtttgggatttgaaaagtggaattaattgcagtagggataaagtagaagaaaccacaaattatcttgtgcctgaaatccattaagaggcctgatagctttaagaattagggtgggttgtctgtctggaagtgttaagtggaatgggctttgtcctccaggaggtgggggaatgtggtaacattgaatacagttgaataaaatcgcttacaaaactcacactctcacaatgcattgttaagtatgtaaaagcaataacattgattctctgttgtacttttttgtaactaattctgtgagagttgagctcattttctagttggaagaatgtgatatttgttgtgttggtagtttacctaatgcccttacctaattagattatgataaataggtttgtcattttgcaagttacataaacatttatcaatgaagtcatcctttagacttgtaatcgccacattgtttcattattcagtttcctctgtaaagggatcttgagttgttttaattttttttttctgcatctgaatctgcatgatttccaaaccctgtaccatctgaattttgcattttagcacttgcactattactcagcagcagtaacatggtaacacttaaaatggtactcggggacctccaaagactaaactgacaagccttcaaggagcccaggggtaagttaacttgtcaacggcatggtttaatcccttctttacacttgtgtaaatttcagttactggtcatagaaggctttcaatgttgagtggccttttattaacatgtttatggtactgcatagatacgggtatttattttaccctaagaagattttgaagtttaaaagtacttaaactatttggcaaagatttgtttttaaaaatctatttggtcaatctaaatgcattcattctaaaaaattttttgaaccagataaataaaatttttttttgacaccac

SEQ ID NO: 1410 - protein, 108 aa, Homo sapiens; identical to SEQ ID NO: 1396

SEQ ID NO: 1411 - DNA, 2706 bp, Homo sapiens
acttgatcattaaaggaatcagcgttcatatatccaatgccgaacctaagcacaatagcaatagacagttagaaagaagtggaagatttggtggtaatccaggtggctttgggaatcagggtggatttggtaatagcagagggggtggagctggtttgggaaacaatcaaggtagtaatatgggtggtgggatgaactttggtgcgttcagcattaatccagccatgatggctgccgcccaggcagcactacagagcagttggggtatgatgggcatgttagccagccagcagaaccagtcaggcccatcgggtaataaccaaaaccaaggcaacatgcagagggagccaaaccaggccttcggttctggaaataactcttatagtggctctaattctggtgcagcaattggttggggatcagcatccaatgcagggtcgggcagtggttttaatggaggctttggctcaagcatggattctaagtcttctggctggggaatgtagacagtggggttgtggttggttggtatagaatggtgggaattcaaatttttctaaactcatggtaagtatattgtaaaatacatatgtactaagaattttcaaaattggtttgttcagtgtggagtatattcagcagtatttttgacatttttctttagaaaaaggaagagctaaaggaattttataagttttgttacatgaaaggttgaaatattgagtggttgaaagtgaactgctgtttgcctgattggtaaaccaacacactacaattgatatcaaaaggtttctcctgtaatattttatccctggacttgtcaagtgaattctttgcatgttcaaaacggaaaccattgattagaactacattctttaccccttgttttaatttgaaccccaccatatggatttttttccttaagaaaatctccttttaggagatcatggtgtcacagtgtttggttcttttgttttgttttttaacacttgtctcccctcatacacaaaagtacaatatgaagccttcatttaatctctgcagttcatctcatttcaaatgtttatggaagaagcacttcattgaaagtagtgctgtaaatattctgccataggaatactgtctacatgctttctcattcaagaattcgtcatcacgcatcacaggccgcgtctttgacgccctgaatgcaaagaattcatagcagttaattccccttttttgacccttttgagatggaactttcataaagtttcttggcagtagtttattttgcttcaaataaacttatttgaaaagttgtctcaagtcaaatggattcatcacctgtcatgcattgacacctgatacccagacttaattggtatttgttcttgcattggccaaagtgaaaatttttttttttcttttgaaatctagttttgaataagtctgggtgaccgcacctaaaatggtaagcagtaccctccggctttttcttagtgcctctgtgcatttgggtgatgttctatttacatggcctgtgtaaatctccattgggaagtcatgccttctaaaaagattcttatttgggggagtgggcaaaatgttgattattttctaatgctttgtagcaaagcatatcaattgaaaagggaatatcagcaccttcctagtttgggatttgaaaagtggaattaattgcagtagggataaagtagaagaaaccacaaattatcttgtgcctgaaatccattaagaggcctgatagctttaagaattagggtgggttgtctgtctggaagtgttaagtggaatgggctttgtcctccaggaggtgggggaatgtggtaacattgaatacagttgaataaaatcgcttacaaaactcacactctcacaatgcattgttaagtatgtaaaagcaataacattgattctctgttgtacttttttgtaactaattctgtgagagttgagctcattttctagttggaagaatgtgatatttgttgtgttggtagtttacctaatgcccttacctaattagattatgataaataggtttgtcattttgcaagttacataaacatttatcaatgaagtcatcctttagacttgtaatcgccacattgtttcattattcagtttcctctgtaaagggatcttgagttgttttaattttttttttctgcatctgaatctgcatgatttccaaaccctgtaccatctgaattttgcattttagcacttgcactattactcagcagcagtaacatggtaacacttaaaatggtactcggggacctccaaagactaaactgacaagccttcaaggagcccaggggtaagttaacttgtcaacggcatggtttaatcccttctttacacttgtgtaaatttcagttactggtcatagaaggctttcaatgttgagtggccttttattaacatgtttatggtactgcatagatacgggtatttattttaccctaagaagattttgaagtttaaaagtacttaaactatttggcaaagatttgtttttaaaaatctatttggtcaatctaaatgcattcattctaaaaaattttttgaaccagataaataaaatttttttttgacaccacagtttagtgtctggagtcttactggaaaaacacgatttctttttatatgtgatatacagatgctggaaagttacctttaaaaattgagtctctaaag

SEQ ID NO: 1412 - protein, 108 aa, Homo sapiens; identical to SEQ ID NO: 1396

SEQ ID NO: 1413 - DNA, 1217 bp, Homo sapiens
gcatccaatgcagggtcgggcagtggttttaatggaggctttggctcaagcatggattctaagtcttctggctggggaatgtagacagtggggttgtggttggttggtatagaatggtgggaattcaaatttttctaaactcatggtaagtatattgtaaaatacatatgtactaagaattttcaaaattggtttgttcagtgtggagtatattcagcagtatttttgacatttttctttagaaaaaggaagagctaaaggaattttataagttttgttacatgaaaggttgaaatattgagtggttgaaagtgaactgctgtttgcctgattggtaaaccaacacactacaattgatatcaaaaggtttctcctgtaatattttatccctggacttgtcaagtgaattctttgcatgttcaaaacggaaaccattgattagaactacattctttaccccttgttttaatttgaaccccaccatatggatttttttccttaagaaaatctccttttaggagatcatggtgtcacagtgtttggttcttttgttttgttttttaacacttgtctcccctcatacacaaaagtacaatatgaagccttcatttaatctctgcagttcatctcatttcaaatgtttatggaagaagcacttcattgaaagtagtgctgtaaatattctgccataggaatactgtctacatgctttctcattcaagaattcgtcatcacgcatcacaggccgcgtctttgacggtgggtgtcccatttttatccgctactctttatttcatggagtcgtatcaacgctatgaacgcaaggctgtgatatggaaccagaaggctgtctgaacttttgaaaccttgtgtgggattgatggtggtgccgaggcatgaaaggctagtatgagcgagaaaaggagagagcgcgtgcagagacttggtggtgcataatggatattttttaacttggcgagatgtgtctctcaatcctgtggctttggtgagagagtgtgcagagagcaatgatagcaaataatgtacgaatgttttttgcattcaaaggacatccacatctgttggaagacttttaaccctgaatgcaaagaattcatagcagttaattccccttttttgacccttttgagatggaactttcataaagtttcttggcagtagtttattttgcttcaaataaacttatttgaaaagtt

SEQ ID NO: 1414 - protein, 46 aa, Homo sapiens
MYECFLHSKDIHICWKTFNPECKEFIAVNSPFLTLLRWNFHKVSWQ

SEQ ID NO: 1415 - DNA, 2525 bp, Homo sapiens
gcatccaatgcagggtcgggcagtggttttaatggaggctttggctcaagcatggattctaagtcttctggctggggaatgtagacagtggggttgtggttggttggtatagaatggtgggaattcaaatttttctaaactcatggtaagtatattgtaaaatacatatgtactaagaattttcaaaattggtttgttcagtgtggagtatattcagcagtatttttgacatttttctttagaaaaaggaagagctaaaggaattttataagttttgttacatgaaaggttgaaatattgagtggttgaaagtgaactgctgtttgcctgattggtaaaccaacacactacaattgatatcaaaaggtttctcctgtaatattttatccctggacttgtcaagtgaattctttgcatgttcaaaacggaaaccattgattagaactacattctttaccccttgttttaatttgaaccccaccatatggatttttttccttaagaaaatctccttttaggagatcatggtgtcacagtgtttggttcttttgttttgttttttaacacttgtctcccctcatacacaaaagtacaatatgaagccttcatttaatctctgcagttcatctcatttcaaatgtttatggaagaagcacttcattgaaagtagtgctgtaaatattctgccataggaatactgtctacatgctttctcattcaagaattcgtcatcacgcatcacaggccgcgtctttgacggtgggtgtcccatttttatccgctactctttatttcatggagtcgtatcaacgctatgaacgcaaggctgtgatatggaaccagaaggctgtctgaacttttgaaaccttgtgtgggattgatggtggtgccgaggcatgaaaggctagtatgagcgagaaaaggagagagcgcgtgcagagacttggtggtgcataatggatattttttaacttggcgagatgtgtctctcaatcctgtggctttggtgagagagtgtgcagagagcaatgatagcaaataatgtacgaatgttttttgcattcaaaggacatccacatctgttggaagacttttaaccctgaatgcaaagaattcatagcagttaattccccttttttgacccttttgagatggaactttcataaagtttcttggcagtagtttattttgcttcaaataaacttatttgaaaagttgtctcaagtcaaatggattcatcacctgtcatgcattgacacctgatacccagacttaattggtatttgttcttgcattggccaaagtgaaaatttttttttttcttttgaaatctagttttgaataagtctgggtgaccgcacctaaaatggtaagcagtaccctccggctttttcttagtgcctctgtgcatttgggtgatgttctatttacatggcctgtgtaaatctccattgggaagtcatgccttctaaaaagattcttatttgggggagtgggcaaaatgttgattattttctaatgctttgtagcaaagcatatcaattgaaaagggaatatcagcaccttcctagtttgggatttgaaaagtggaattaattgcagtagggataaagtagaagaaaccacaaattatcttgtgcctgaaatccattaagaggcctgatagctttaagaattagggtgggttgtctgtctggaagtgttaagtggaatgggctttgtcctccaggaggtgggggaatgtggtaacattgaatacagttgaataaaatcgcttacaaaactcacactctcacaatgcattgttaagtatgtaaaagcaataacattgattctctgttgtacttttttgtaactaattctgtgagagttgagctcattttctagttggaagaatgtgatatttgttgtgttggtagtttacctaatgcccttacctaattagattatgataaataggtttgtcattttgcaagttacataaacatttatcaatgaagtcatcctttagacttgtaatcgccacattgtttcattattcagtttcctctgtaaagggatcttgagttgttttaattttttttttctgcatctgaatctgcatgatttccaaaccctgtaccatctgaattttgcattttagcacttgcactattactcagcagcagtaacatggtaacacttaaaatggtactcggggacctccaaagactaaactgacaagccttcaaggagcccaggggtaagttaacttgtcaacggcatggtttaatcccttctttacacttgtgtaaatttcagttactggtcatagaaggctttcaatgttgagtggccttttattaacatgtttatggtactgcatagatacgggtatttattttaccctaagaagattttgaagtttaaaagtacttaaactatttggcaaagatttgtttttaaaaatctatttggtcaatctaaatgcattcattctaaaaaattttttgaaccagataaataaaatttttttttgacaccac

SEQ ID NO: 1416 - protein, 46 aa, Homo sapiens; identical to SEQ ID NO: 1414

SEQ ID NO: 1417 - DNA, 2622 bp, Homo sapiens
gcatccaatgcagggtcgggcagtggttttaatggaggctttggctcaagcatggattctaagtcttctggctggggaatgtagacagtggggttgtggttggttggtatagaatggtgggaattcaaatttttctaaactcatggtaagtatattgtaaaatacatatgtactaagaattttcaaaattggtttgttcagtgtggagtatattcagcagtatttttgacatttttctttagaaaaaggaagagctaaaggaattttataagttttgttacatgaaaggttgaaatattgagtggttgaaagtgaactgctgtttgcctgattggtaaaccaacacactacaattgatatcaaaaggtttctcctgtaatattttatccctggacttgtcaagtgaattctttgcatgttcaaaacggaaaccattgattagaactacattctttaccccttgttttaatttgaaccccaccatatggatttttttccttaagaaaatctccttttaggagatcatggtgtcacagtgtttggttcttttgttttgttttttaacacttgtctcccctcatacacaaaagtacaatatgaagccttcatttaatctctgcagttcatctcatttcaaatgtttatggaagaagcacttcattgaaagtagtgctgtaaatattctgccataggaatactgtctacatgctttctcattcaagaattcgtcatcacgcatcacaggccgcgtctttgacggtgggtgtcccatttttatccgctactctttatttcatggagtcgtatcaacgctatgaacgcaaggctgtgatatggaaccagaaggctgtctgaacttttgaaaccttgtgtgggattgatggtggtgccgaggcatgaaaggctagtatgagcgagaaaaggagagagcgcgtgcagagacttggtggtgcataatggatattttttaacttggcgagatgtgtctctcaatcctgtggctttggtgagagagtgtgcagagagcaatgatagcaaataatgtacgaatgttttttgcattcaaaggacatccacatctgttggaagacttttaaccctgaatgcaaagaattcatagcagttaattccccttttttgacccttttgagatggaactttcataaagtttcttggcagtagtttattttgcttcaaataaacttatttgaaaagttgtctcaagtcaaatggattcatcacctgtcatgcattgacacctgatacccagacttaattggtatttgttcttgcattggccaaagtgaaaatttttttttttcttttgaaatctagttttgaataagtctgggtgaccgcacctaaaatggtaagcagtaccctccggctttttcttagtgcctctgtgcatttgggtgatgttctatttacatggcctgtgtaaatctccattgggaagtcatgccttctaaaaagattcttatttgggggagtgggcaaaatgttgattattttctaatgctttgtagcaaagcatatcaattgaaaagggaatatcagcaccttcctagtttgggatttgaaaagtggaattaattgcagtagggataaagtagaagaaaccacaaattatcttgtgcctgaaatccattaagaggcctgatagctttaagaattagggtgggttgtctgtctggaagtgttaagtggaatgggctttgtcctccaggaggtgggggaatgtggtaacattgaatacagttgaataaaatcgcttacaaaactcacactctcacaatgcattgttaagtatgtaaaagcaataacattgattctctgttgtacttttttgtaactaattctgtgagagttgagctcattttctagttggaagaatgtgatatttgttgtgttggtagtttacctaatgcccttacctaattagattatgataaataggtttgtcattttgcaagttacataaacatttatcaatgaagtcatcctttagacttgtaatcgccacattgtttcattattcagtttcctctgtaaagggatcttgagttgttttaattttttttttctgcatctgaatctgcatgatttccaaaccctgtaccatctgaattttgcattttagcacttgcactattactcagcagcagtaacatggtaacacttaaaatggtactcggggacctccaaagactaaactgacaagccttcaaggagcccaggggtaagttaacttgtcaacggcatggtttaatcccttctttacacttgtgtaaatttcagttactggtcatagaaggctttcaatgttgagtggccttttattaacatgtttatggtactgcatagatacgggtatttattttaccctaagaagattttgaagtttaaaagtacttaaactatttggcaaagatttgtttttaaaaatctatttggtcaatctaaatgcattcattctaaaaaattttttgaaccagataaataaaatttttttttgacaccacagtttagtgtctggagtcttactggaaaaacacgatttctttttatatgtgatatacagatgctggaaagttacctttaaaaattgagtctctaaag

SEQ ID NO: 1418 - protein, 46 aa, Homo sapiens; identical to SEQ ID NO: 1414

SEQ ID NO: 1419 - DNA, 2454 bp, Homo sapiens
agaccaggccaggccagctggacgggcacaccatgaggctgctgaccctcctgggccttctgtgtggctcggtggccacccccttgggcccgaagtggcctgaacctgtgttcgggcgcctggcatcccccggctttccaggggagtatgccaatgaccaggagcggcgctggaccctgactgcaccccccggctaccgcctgcgcctctacttcacccacttcgacctggagctctcccacctctgcgagtacgacttcgtcaagctgagctcgggggccaaggtgctggccacgctgtgcgggcaggagagcacagacacggagcgggcccctggcaaggacactttctactcgctgggctccagcctggacattaccttccgctccgactactccaacgagaagccgttcacggggttcgaggccttctatgcagccgaggacattgacgagtgccaggtggccccgggagaggcgcccacctgcgaccaccactgccacaaccacctgggcggtttctactgctcctgccgcgcaggctacgtcctgcaccgtaacaagcgcacctgctcagccctgtgctccggccaggtcttcacccagaggtctggggagctcagcagccctgaatacccacggccgtatcccaaactctccagttgcacttacagcatcagcctggaggaggggttcagtgtcattctggactttgtggagtccttcgatgtggagacacaccctgaaaccctgtgtccctacgactttctcaagattcaaacagacagagaagaacatggcccattctgtgggaagacattgccccacaggattgaaacaaaaagcaacacggtgaccatcacctttgtcacagatgaatcaggagaccacacaggctggaagatccactacacgagcacagcgcagccttgcccttatccgatggcgccacctaatggccacgtttcacctgtgcaagccaaatacatcctgaaagacagcttctccatcttttgcgagactggctatgagcttctgcaaggtcacttgcccctgaaatcctttactgcagtttgtcagaaagatggatcttgggaccggccaatgcccgcgtgcagcattgttgactgtggccctcctgatgatctacccagtggccgagtggagtacatcacaggtcctggagtgaccacctacaaagctgtgattcagtacagctgtgaagagaccttctacacaatgaaagtgaatgatggtaaatatgtgtgtgaggctgatggattctggacgagctccaaaggagaaaaatcactcccagtctgtgagcctgtttgtggactatcagcccgcacaacaggagggcgtatatatggagggcaaaaggcaaaacctggtgattttccttggcaagtcctgatattaggtggaaccacagcagcaggtgcacttttatatgacaactgggtcctaacagctgctcatgccgtctatgagcaaaaacatgatgcatccgccctggacattcgaatgggcaccctgaaaagactatcacctcattatacacaagcctggtctgaagctgtttttatacatgaaggttatactcatgatgctggctttgacaatgacatagcactgattaaattgaataacaaagttgtaatcaatagcaacatcacgcctatttgtctgccaagaaaagaagctgaatcctttatgaggacagatgacattggaactgcatctggatggggattaacccaaaggggttttcttgctagaaatctaatgtatgtcgacataccgattgttgaccatcaaaaatgtactgctgcatatgaaaagccaccctatccaaggggaagtgtaactgctaacatgctttgtgctggcttagaaagtgggggcaaggacagctgcagaggtgacagcggaggggcactggtgtttctagatagtgaaacagagaggtggtttgtgggaggaatagtgtcctggggttccatgaattgtggggaagcaggtcagtatggagtctacacaaaagttattaactatattccctggatcgagaacataattagtgatttttaacttgcgtgtctgcagtcaaggattcttcatttttagaaatgcctgtgaagaccttggcagcgacgtggctcgagaagcattcatcattactgtggacatggcagttgttgctccacccaaaaaaacagactccaggtgaggctgctgtcatttctccacttgccagtttaattccagccttacccattgactcaaggggacataaaccacgagagtgacagtcatctttgcccacccagtgtaatgtcactgctcaaattacatttcattaccttaaaaagccagtctcttttcatactggctgttggcatttctgtaaactgcctgtccatgctctttgtttttaaacttgttcttattg

SEQ ID NO: 1420 - protein, 686 aa, Homo sapiens; identical to SEQ ID NO: 7

SEQ ID NO: 1421 - DNA, 369 bp, Homo sapiens
gtaaaatgggtatttatgtaatcctaggaaagcaggaactaaagtcagtatcaggatttgcaaaattacttttacctttgaacatacaaatgttttagaaattagaatgttgcagttgtggctaggaccctgtggattccaaaattttatttttggtctagttgattcttccaaactaagttttattgtatctttattgcaaattaaatacgcccattaatgtagcatatatgtttgctgttgtggtagtgtacttgcattaatacctacagacgttgtgttagccaaatacaggtttaaaaaaactaatttgagccaaataacacaagggtaattaatatattactatctttctgggtttgttttttt

SEQ ID NO: 1422 - protein, 37 aa, Homo sapiens
MLQLWLGPCGFQNFIFGLVDSSKLSFIVSLLQIKYAH

SEQ ID NO: 1423 - DNA, 443 bp, Homo sapiens
aaggctggggccttcgagtacaagtgtgggaggcagagtggggaggggcaccccaatccatggcctgggttggcctcattggctgtccctgaaatgctgaggaggtgggttacttccctccggcccaggccagacccaggcagctgctccccagctttcatgagcttctttctcagattcaaacagacagagaagaacatggcccattctgtgggaagacattgccccacaggattgaaacaaaaagcaacacggtgaccatcacctttgtcacagatgaatcaggagaccacacaggctggaagatccactacacgagcacagcgcagccttgcccttatccgatggcgccacctaatggccacgtttcacctgtgcaagccaaatacatcctgaaagacagcttctccatcttttgcgagactggctatgagcttctgcaa

SEQ ID NO: 1424 - protein, 39 aa, Homo sapiens
MNQETTQAGRSTTRAQRSLALIRWRHLMATFHLCKPNTS

SEQ ID NO: 1425 - DNA, 732 bp, Homo sapiens
agaccaggccaggccagctggacgggcacaccatgaggctgctgaccctcctgggccttctgtgtggctcggtggccacccccttgggcccgaagtggcctgaacctgtgttcgggcgcctggcatcccccggctttccaggggagtatgccaatgaccaggagcggcgctggaccctgactgcaccccccggctaccgcctgcgcctctacttcacccacttcgacctggagctctcccacctctgcgagtacgacttcgtcaagctgagctcgggggccaaggtgctggccacgctgtgcgggcaggagagcacagacacggagcgggcccctggcaaggacactttctactcgctgggctccagcctggacattaccttccgctccgactactccaacgagaagccgttcacggggttcgaggccttctatgcagccgaggacattgacgagtgccaggtggccccgggagaggcgcccacctgcgaccaccactgccacaaccacctgggcggtttctactgctcctgccgcgcaggctacgtcctgcaccgtaacaagcgcacctgctcagagcagagcctctagcctcccctggagctccggcctgcccagcaggtcagaagccagagccagcctgctggcctcagctccgggttgggctgagatggctgtgccccaactcccattcacccaccatggacccaataataaacctggccccacccca

SEQ ID NO: 1426 - protein, 185 aa, Homo sapiens; identical to SEQ ID NO: 9

SEQ ID NO: 1427 - DNA, 1173 bp, Homo sapiens
gccagctggacgggcacaccatgaggctgctgaccctcctgggccttctgtgtggctcggtggccacccccttgggcccgaagtggcctgaacctgtgttcgggcgcctggcatcccccggctttccaggggagtatgccaatgaccaggagcggcgctggaccctgactgcaccccccggctaccgcctgcgcctctacttcacccacttcgacctggagctctcccacctctgcgagtacgacttcgtcaagctgagctcgggggccaaggtgctggccacgctgtgcgggcaggagagcacagacacggagcgggcccctggcaaggacactttctactcgctgggctccagcctggacattaccttccgctccgactactccaacgagaagccgttcacggggttcgaggccttctatgcagccgaggacattgacgagtgccaggtggccccgggagaggcgcccacctgcgaccaccactgccacaaccacctgggcggtttctactgctcctgccgcgcaggctacgtcctgcaccgtaacaagcgcacctgctcaggtgagggaggctgcctgggccccaacgcaccctctcctgggatacccggggctcctcagggccattgctgctctgcccaggggtgcggagggcctgggccctggacactgggtgcttctaggccctgctgcctccagctccccttctcagccctgcttcccctctcagcagccaggctcatcagtgccaccctgccctagcgactgagactaattctaacatcccactgtgtacctggttccacctgggctctgggaacccctcatgtagccacgggagagtcgggggtatctagccctcgttccttgggacctggttccctggttccctgcactgtgggacgggccagtgctctggggcgtgggcagccccacctgctggcgctgaccctgcctcccccgactcggtttctccctctcggtgtctctccttgcctctctgatctctcttccagagcagagcctctagcctcccctggagctccggcctgcccagcaggtcagaagccagagccagcctgctggcctcagctccgggttgggctgagatggctgtgccccaactcccattcacccaccatggacccaataataaacctggccccacccc

SEQ ID NO: 1428 - protein, 247 aa, Homo sapiens
MRLLTLLGLLCGSVATPLGPKWPEPVFGRLASPGFPGEYANDQERRWTLTAPPGYRLRLYFTHFDLELSHLCEYDFVKLSSGAKVLATLCGQESTDTERAPGKDTFYSLGSSLDITFRSDYSNEKPFTGFEAFYAAEDIDECQVAPGEAPTCDHHCHNHLGGFYCSCRAGYVLHRNKRTCSGEGGCLGPNAPSPGIPGAPQGHCCSAQGCGGPGPWTLGASRPCCLQLPFSALLPLSAARLISATLP

SEQ ID NO: 1429 - DNA, 2190 bp, Homo sapiens
ggccagctggacgggcacaccatgaggctgctgaccctcctgggccttctgtgtggctcggtggccacccccttgggcccgaagtggcctgaacctgtgttcgggcgcctggcatcccccggctttccaggggagtatgccaatgaccaggagcggcgctggaccctgactgcaccccccggctaccgcctgcgcctctacttcacccacttcgacctggagctctcccacctctgcgagtacgacttcgtcaagctgagctcgggggccaaggtgctggccacgctgtgcgggcaggagagcacagacacggagcgggcccctggcaaggacactttctactcgctgggctccagcctggacattaccttccgctccgactactccaacgagaagccgttcacggggttcgaggccttctatgcagccgagggtgagccaagaggggtcctgcaacatctcagtctgcgcagctggctgtgggggtaactctgtcttaggccaggcagccctgccttcagtttccccacctttcccagggcaggggagaggcctctggcctgacatcatccacaatgcaaagaccaaaacagccgtgacctccattcacatgggctgagtgccaactctgagccagggatctgaggacagcatcgcctcaagtgacgcagggactggccgggcgcagcagctcacgcctgtaattccagcactttgggaggccgaggctggctgatcatttgaggtcaggagttcaaggccagccagggcaacacggtgaaactctatctccactaaaactacaaaaattagctgggcgtggtggtgcgcacctggaatcccagctactagggaggctgaggcaggagaattgcttgaacctgcgaggtggaggctgcagtgaacagagattgcaccactacactccagcctgggcgacagagctagactccgtctcaaaaaacaaaaaacaaaaacgacgcaggggccgagggccccatttacagctgacaaagtggggccctgccagcgggagcgctgccaggatgtttgatttcagatcccagtccctgcagagaccaactgtgtgacctctggcaagtggctcaatttctctgctccttaggaagctgctgcaagggttcagcgctgtagccccgccccctgggtttgattgactcccctcattagctgggtgacctcgggccggacactgaaactcccactggtttaacagaggtgatgtttgcatctttctcccagcgctgctgggagcttgcagcgaccctaggcctgtaaggtgattggcccggcaccagtcccgcaccctagacaggacgaggcctcctctgaggtccactctgaggtcatggatctcctgggaggagtccaggctggatcccgcctctttccctcctgacggcctgcctggccctgcctctcccccagacattgacgagtgccaggtggccccgggagaggcgcccacctgcgaccaccactgccacaaccacctgggcggtttctactgctcctgccgcgcaggctacgtcctgcaccgtaacaagcgcacctgctcaggtgagggaggctgcctgggccccaacgcaccctctcctgggatacccggggctcctcagggccattgctgctctgcccaggggtgcggagggcctgggccctggacactgggtgcttctaggccctgctgcctccagctccccttctcagccctgcttcccctctcagcagccaggctcatcagtgccaccctgccctagcgactgagactaattctaacatcccactgtgtacctggttccacctgggctctgggaacccctcatgtagccacgggagagtcgggggtatctagccctcgttccttgggacctggttccctggttccctgcactgtgggacgggccagtgctctggggcgtgggcagccccacctgctggcgctgaccctgcctcccccgactcggtttctccctctcggtgtctctccttgcctctctgatctctcttccagagcagagcctctagcctcccctggagctccggcctgcccagcaggtcagaagccagagccagcctgctggcctcagctccgggttgggctgagatggctgtgccccaactcccattcacccaccatggacccaataataaacctggccccacccc

SEQ ID NO: 1430 - protein, 155 aa, Homo sapiens
MRLLTLLGLLCGSVATPLGPKWPEPVFGRLASPGFPGEYANDQERRWTLTAPPGYRLRLYFTHFDLELSHLCEYDFVKLSSGAKVLATLCGQESTDTERAPGKDTFYSLGSSLDITFRSDYSNEKPFTGFEAFYAAEGEPRGVLQHLSLRSWLWG

SEQ ID NO: 1431 - DNA, 546 bp, Homo sapiens
cagaggttgcagtgagctgagatgacgccactgcactccagcgtggcaacagtgagactccgtctcaaaaaaaaaaaaaaaaaagtgccccccctgatgtgcccctggcccggtccccagagcacgaacttccaggagccggtgcagccgctgacacagcagcaggtggcgcagatgcagctgaagtactacaactccgacgtgcaccgcgccgcctttgtgctgcccgagtttgcccgcaaggccctgaatgatgtgagctgagcccaggcgccaccactgatgccacccaggacctcggaccttggagcctgcggggtgcctcggcccctccagccccgggccggacctcctgctggctctcgcccaccaaccaagtgttacaagccccagaatgctgcccggcctgccctgctgggcggactgtctgtgtgtctgtctctctggcgttccacctccaagcctataccagctgtgtacagcgccatctctctgccttctgttgcccctcactcaccaaacacgtgtatttatagcaaagattgg

SEQ ID NO: 1432 - protein, 80 aa, Homo sapiens
MTPLHSSVATVRLRLKKKKKKVPPLMCPWPGPQSTNFQEPVQPLTQQQVAQMQLKYYNSDVHRAAFVLPEFARKALNDVS

SEQ ID NO: 1433 - DNA, 1280 bp, Homo sapiens
gcgcgggcggcgggcggagctggtcccgttgtgctgcggcgccgcgcggcctgcagtcccgggcccgcgccccgcgccgcccgcccgcccgccatggagcccggccccgacggccccgccgcctccggccccgccgccatccgcgagggctggttccgcgagacctgcagcctgtggcccggccaggccctgtcactgcaggtggagcagctgctccaccaccggcgctcgcgctaccaggacatcctcgtcttccgcagtaagacctatggcaacgtgctggtgttggacggtgtcatccagtgcacggagagagacgagttctcctaccaggagatgatcgccaacctgcctctctgcagccaccccaacccgcgaaaggtgctgatcatcgggggcggagatggaggtgtcctgcgggaggtggtgaagcacccctccgtggagtccgtggtccagtgtgagatcgacgaggatgtcatccaagtctccaagaagttcctgccaggcatggccattggctactctagctcgaagctgaccctacatgtgggtgacggttttgagttcatgaaacagaatcaggatgccttcgacgtgatcatcactgactcctcagaccccatgggccccgccgaaagtctcttcaaggagtcctattaccagctcatgaagacagccctcaaggaagatggtgtcctctgctgccagggcgagtgccagtggctgcacctggacctcatcaaggagatgcggcagttctgccagtccctgttccccgtggtggcctatgcctactgcaccatccccacctaccccagcggccagatcggcttcatgctgtgcagcaagaacccgagcacgaacttccaggagccggtgcagccgctgacacagcagcaggtggcgcagatgcagctgaagtactacaactccgacgtgcaccgcgccgcctttgtgctgcccgagtttgcccgcaaggccctgaatgatgtgagctgagcccaggcgccaccactgatgccacccaggacctcggaccttggagcctgcggggtgcctcggcccctccagccccgggccggacctcctgctggctctcgcccaccaaccaagtgttacaagccccagaatgctgcccggcctgccctgctgggcggactgtctgtgtgtctgtctctctggcgttccacctccaagcctataccagctgtgtacagcgccatctctctgccttctgttgcccctcactcaccaaacacgtgtatttatagcaaaga

SEQ ID NO: 1434 - protein, 302 aa, Homo sapiens; identical to SEQ ID NO: 11

SEQ ID NO: 1435 - DNA, 536 bp, Homo sapiens
cagcggccagatcggcttcatgctgtgcagcaagaacccgagcacgaacttccaggagccggtgcagccgctgacacagcagcaggtggcgcagatgcagctgaagtactacaactccgacgtgcaccgcgccgcctttgtgctgcccgagtttgcccgcaaggtgggtggcctgcggggctgggtggtgggacccagggacccagagcgccctcctgactggcctcatgtccctccaggccctgaatgatgtgagctgagcccaggcgccaccactgatgccacccaggacctcggaccttggagcctgcggggtgcctcggcccctccagccccgggccggacctcctgctggctctcgcccaccaaccaagtgttacaagccccagaatgctgcccggcctgccctgctgggcggactgtctgtgtgtctgtctctctggcgttccacctccaagcctataccagctgtgtacagcgccatctctctgccttctgttgcccctcactcaccaaacacgtgtatttatagcaaa

SEQ ID NO: 1436 - protein, 76 aa, Homo sapiens
MLCSKNPSTNFQEPVQPLTQQQVAQMQLKYYNSDVHRAAFVLPEFARKVGGLRGWVVGPRDPERPPDWPHVPPGPE

SEQ ID NO: 1437 - DNA, 2996 bp, Homo sapiens
gatctcggctcactgtaacctccacctcccgggctcaagcctcagcctcccgagtagctgggattacagggtttcatcctgtcaccccggctggagtgcagtggagcctccacctcctcggctcaagcaaccatcccacctcagcctcccgagcagctgggactacagatgcgcaccaccactcccggctccccacactataatcagacgccccgcccgccgcttcgacctggcgcatgcgtggtgcgcacgcgtcccgtctcctcggccgacaagctctcgcgagacgagccgtgcaggctgaaaaaatggcgccacccagtacccgggagcccagggtcctgtcggcgaccagcgcaaccaaatccgacggagagatggtgctgccaggcttcccggacgccgacagctttgtgaagtttgctcttgggtccgtggtggcagtcaccaaggcatctgggggcctaccacagtttggcgatgagtatgatttttaccgaagttttcctggcttccaagcattttgcgaaacacagggagacaggttgcttcagtgcatgagcagagtaatgcagtaccatgggtgtcgcagcaacattaaggatcgaagtaaagtgactgagctggaagacaagtttgatttactagttgatgccaatgatgtaattctggagagagtgggtattttactggatgaagcctcaggtgtaaacaagaatcaacagcctgtcctccctgccggcttgcaggtccccaaaacggtagtgtccagctggaaccgtaaggcagcagaatatggcaaaaaagcaaaatctgaaactttccggctgcttcatgcaaaaaatatcatccgacctcagctcaagtttcgagagaagattgacaattccaacacaccatttcttcctaaaatcttcatcaaacccaatgctcagaaacctctccctcaagctctctctaaggaaaggcgggaacgcccacaggatcgtcctgaggacttggacgtcccccctgcactggctgatttcatccatcagcagagaacccagcaggttgagcaagacatgtttgcacatccttatcaatatgaactaaatcactttaccccagcagatgcagtgcttcaaaagccacaaccccagttatacagacctatagaagagacaccatgccatttcatatcctccctggatgaactcgtggaactcaacgaaaagctcttgaattgtcaggaatttgcagttgacttggagcaccactcttacaggagcttcctgggactgacctgcctgatgcaaatttctactcggacggaagacttcatcattgacaccctcgagcttcgaagtgacatgtacattctcaatgagagcctcacagacccagccatcgttaaggtctttcatggtgctgattcagacatagaatggctacagaaagactttgggttgtatgtagtaaacatgtttgatactcatcaggcagcacgccttcttaacctgggcaggcactcactcgatcatctcctgaaactctactgcaacgtggactcaaacaagcaatatcagctggctgattggagaatacgccctctgcccgaggagatgctcagctacgcccgggatgacacccattacctgctatatatctatgacaaaatgaggctggagatgtgggagcgcggcaacgggcagccggtgcagctgcaggtggtgtggcaacggagcagggacatctgcctcaagaaattcatcaaacctatcttcacggatgagtcctaccttgaactctataggaagcagaagaagcaccttaacacacagcagttgacagcctttcagctgctgtttgcctggagggataaaacagctcgcagggaagatgaaagttacggatatgtactgccaaaccacatgatgctgaaaatagctgaagaactgcctaaggaacctcagggcatcatagcttgctgcaacccagtaccgccccttgtgcggcagcagatcaacgaaatgcaccttttaatccagcaggcccgagagatgcccctgctcaagtctgaagttgcagccggagtgaagaagagcggaccgctgcccagtgctgagagattggagaatgttctctttggacctcacgactgctcccatgcccctccggatggctatccaatcatcccaaccagtggatctgtgccagttcagaagcaggcgagcctcttccctgatgaaaaagaagataacttgctgggtaccacatgcctgattgccacagctgtcatcacgttatttaatgaacctagtgctgaagacagtaaaaagggtccattgacagttgcacagaaaaaagcccagaacatcatggagtcctttgaaaatccatttaggatgatcagcaaccgctggaagctggcccaggtacaagtacaaaaagactctaaagaagctgtcaagaagaaggcagctgagcaaacagctgcccgggaacaggcaaaggaggcgtgcaaagctgcagcagaacaggccatctccgtccgacagcaggtcgtgctagaaaatgctgcaaagaagagagagcgagcaacaagcgacccaaggaccacagaacagaaacaagagaagaaacgactcaaaatttccaagaagccaaaggacccagagccaccagaaaaagagtttacgccttacgactacagccagtcagacttcaaggcttttgctggaaacagcaaatccaaagtttcttctcagtttgatccaaataaacagaccccgtctggcaagaaatgcattgcagccaaaaaaattaaacagtcggtgggaaacaaaagcatgtcctttccaactggaaagtcagacagaggcttcaggtacaactggccacagagatagtcctggaagacacgtggcgcctgtggaccggaagcaccaaatgctggtgctgcttttgtacatacatatttttaaaccattaaaattcttcctgaagaaagctga

SEQ ID NO: 1438 - protein, 884 aa, Homo sapiens
MRGAHASRLLGRQALARRAVQAEKMAPPSTREPRVLSATSATKSDGEMVLPGFPDADSFVKFALGSVVAVTKASGGLPQFGDEYDFYRSFPGFQAFCETQGDRLLQCMSRVMQYHGCRSNIKDRSKVTELEDKFDLLVDANDVILERVGILLDEASGVNKNQQPVLPAGLQVPKTVVSSWNRKAAEYGKKAKSETFRLLHAKNIIRPQLKFREKIDNSNTPFLPKIFIKPNAQKPLPQALSKERRERPQDRPEDLDVPPALADFIHQQRTQQVEQDMFAHPYQYELNHFTPADAVLQKPQPQLYRPIEETPCHFISSLDELVELNEKLLNCQEFAVDLEHHSYRSFLGLTCLMQISTRTEDFIIDTLELRSDMYILNESLTDPAIVKVFHGADSDIEWLQKDFGLYVVNMFDTHQAARLLNLGRHSLDHLLKLYCNVDSNKQYQLADWRIRPLPEEMLSYARDDTHYLLYIYDKMRLEMWERGNGQPVQLQVVWQRSRDICLKKFIKPIFTDESYLELYRKQKKHLNTQQLTAFQLLFAWRDKTARREDESYGYVLPNHMMLKIAEELPKEPQGIIACCNPVPPLVRQQINEMHLLIQQAREMPLLKSEVAAGVKKSGPLPSAERLENVLFGPHDCSHAPPDGYPIIPTSGSVPVQKQASLFPDEKEDNLLGTTCLIATAVITLFNEPSAEDSKKGPLTVAQKKAQNIMESFENPFRMISNRWKLAQVQVQKDSKEAVKKKAAEQTAAREQAKEACKAAAEQAISVRQQVVLENAAKKRERATSDPRTTEQKQEKKRLKISKKPKDPEPPEKEFTPYDYSQSDFKAFAGNSKSKVSSQFDPNKQTPSGKKCIAAKKIKQSVGNKSMSFPTGKSDRGFRYNWPQR

(The sequence listing continues in the following parts.)

1. A method of constructing a GeneMap for IBD (e.g. Crohn's Disease) comprising identifying at least two chromosomal loci associated with IBD (e.g. Crohn's Disease), wherein said at least two chromosomal loci are selected from the genomic regions listed in Table 1.

2. The method of claim 1, wherein said population is a general population or a founder population.

3. (canceled)

4. The method of claim 2, wherein said founder population is the German population or the Quebec founder population.

5. The method of claim 1, wherein said at least two chromosomal regions are selected from the genes in Table 2, 3 or 4.

6.-7. (canceled)

8. The method of claim 1, wherein the identifying comprises screening for the presence or absence of at least one single nucleotide polymorphisms (SNPs) from Tables 5.1, 5.2, 6.2 and 6.3 in at least one sample.

9. The method of claim 8, wherein the screening comprises the steps of: (a) obtaining biological samples from at least one disease patient; (b) screening for the presence or absence of at least one SNP or a group of SNPs from Tables 5.1, 5.2, 6.2 and 6.3 within each biological sample; and (c) evaluating whether said SNP or a group of SNPs shows a statistically significant skewed genotype distribution between a group of patients compared to a control.

10. The method of claim 9, wherein said biological samples are selected from the group consisting of fluid, biopsy samples, serum, tissue or buccal swabs, saliva, mucus, urine, stools, vaginal secretions, lymph, amiotic liquid, pleural liquid or tears.

11.-13. (canceled)

14. The method of claim 8, wherein said screening is performed by a method selected from the group consisting of an allele-specific hybridization assay, an oligonucleotide ligation assay, an allele-specific elongation/ligation assay, an allele-specific amplification assay, a single-base extension assay, a molecular inversion probe assay, an invasive cleavage assay, a selective termination assay, RFLP, a sequencing assay, SSCP, a mismatch-cleaving assay, and denaturing gradient gel electrophoresis.

15. The method of claim 8, wherein said screening is carried out on each individual of a cohort at each of at least one SNP or a group of SNPs from Tables 5.1, 5.2, 6.2 and 6.3.

16.-19. (canceled)

20. The method of claim 1, wherein the GeneMap comprises all of the genes of Tables 2-4.

21.-38. (canceled)

39. A method of detecting susceptibility to IBD (e.g. Crohn's Disease) comprising detecting at least one mutation or polymorphism in the nucleic acid molecule selected from Tables 2-4 in a patient.

40. The method of claim 39, wherein said method comprises hybridizing a probe to said patient's sample of DNA or RNA under stringent conditions which allow hybridization of said probe to nucleic acid comprising said mutation or polymorphism, wherein the presence of a hybridization signal indicates the presence of said mutation or polymorphism in at least one gene from Tables 2-4.

41. The method of claim 39, wherein the patient's DNA or RNA has been amplified and said amplified DNA or RNA is hybridized.

42. The method of claim 39, wherein said method comprises using a single-stranded conformation polymorphism technique to assay for said mutation.

43. The method of claim 39, wherein said method comprises sequencing at least one gene from Tables 2-4 in a sample of RNA or DNA from a patient.

44. The method of claim 39, wherein said method comprises determining the sequence of at least one gene from Tables 2-4 by preparing cDNA from RNA taken from said patient and sequencing said cDNA to determine the presence or absence of a mutation.

45. The method of claim 39, wherein said method comprises performing an RNAse assay.

46. The method of claim 39, wherein said probe is attached to a microarray or a bead.

47. The method of claim 39, wherein said probes are oligonucleotides.

48. The method of claim 40, wherein said sample is selected from the group consisting of blood, normal tissue and tumor tissue.

49. The method of claim 39, wherein the mutation is selected from the group consisting of at least one of the SNPs from Tables 5.1, 5.2, 6.2 and 6.3, alone or in combination.

50.-51. (canceled)

52. A method of diagnosing susceptibility to IBD (e.g. Crohn's Disease) in an individual, comprising screening for an at-risk haplotype of at least one gene or gene region from Tables 2-4, that is more frequently present in an individual susceptible to IBD (e.g. Crohn's Disease) compared to a control individual, wherein the presence of the at-risk haplotype is indicative of a susceptibility to IBD (e.g. Crohn's Disease).

53. The method of claim 52 wherein the at-risk haplotype is indicative of increased risk for IBD (e.g. Crohn's Disease).

54. The method of claim 53, wherein the risk is increased at least about 20%.

55. The method of claim 52, wherein the at-risk haplotype is characterized by the presence of at least one single nucleotide polymorphism from Tables 5.1, 5.2, 6.2 and 6.3.

56. The method of claim 52, wherein screening for the presence of an at-risk haplotype in at least one gene from Tables 2-4, comprises enzymatic amplification of nucleic acid from said individual or amplification using universal oligos on elongation/ligation products.

57. The method of claim 56, wherein the nucleic acid is DNA.

58. The method of claim 57, wherein the DNA is human DNA.

59. The method of claim 52, wherein screening for the presence of an at-risk haplotype in at least one gene from Tables 2-4 comprises: (a) obtaining material containing nucleic acid from the individual; (b) amplifying said nucleic acid; and (c) determining the presence or absence of an at-risk haplotype in said amplified nucleic acid.

60. The method of claim 59, wherein determining the presence of an at-risk haplotype is performed by electrophoretic analysis, restriction length polymorphism analysis, sequence analysis or hybridization analysis.

61.-65. (canceled)

66. A drug screening assay comprising: (a) administering a test compound to an animal having IBD (e.g. Crohn's Disease), or a cell population isolated therefrom; and (b) comparing the level of gene expression of at least one gene from Tables 2-4 in the presence of the test compound with the level of said gene expression in normal cells; wherein test compounds which provide the level of expression of one or more genes from Tables 2-4 similar to that of the normal cells are candidates for drugs to treat IBD (e.g. Crohn's Disease).

67.-68. (canceled)

69. A method for predicting the efficacy of a drug for treating IBD (e.g. Crohn's Disease) in a human patient, comprising: (a) obtaining a sample of cells from the patient; (b) obtaining a gene expression profile from the sample in the absence and presence of the drug; the gene expression profile comprising one or more genes from Tables 2-4; and (c) comparing the gene expression profile of the sample with a reference gene expression profile, wherein similarity between the sample expression profile and the reference expression profile predicts the efficacy of the drug for treating IBD (e.g. Crohn's Disease) in the patient.

70. The method of claim 69, further comprising exposing the sample to the drug for treating IBD (e.g. Crohn's Disease) prior to obtaining the gene expression profile of the sample.

71. The method of claim 69, wherein the sample of cells is derived from a tissue selected from the group consisting of: the brain, respiratory system, digestive system, skin, scalp, muscle and nervous tissue.

72. The method of claim 71, wherein the cells are selected from the group consisting of: digestive system cell, colon cell, vaginal cell, hair cell, brain cell, muscle cell, neutrophil, dentric cell, T cell, mast cell, CD4+ lymphocyte, monocyte, macrophage, dendritic cell, and epithelial cell.

73. The method of claim 69, wherein the sample is obtained via biopsy.

74. The method of claim 69, wherein the gene expression profile comprises expression values for all of the genes listed in Tables 2-4.

75. The method of claim 74, wherein the gene expression profile of the sample is obtained by detecting the protein products of said genes.

76. The method of claim 69, wherein the gene expression profile of the sample is obtained using a hybridization assay to oligonucleotides contained in a microarray.

77. The method of claim 76, wherein the oligonucleotides comprises nucleic acid molecules at least 95% identical to the gene sequences from Tables 2-4.

78. The method of claim 69, wherein the reference expression profile is that of cells derived from patients that do not have IBD (e.g. Crohn's Disease).

79. The method of claim 69, wherein the drug is selected from the group consisting of symptom relievers.

80. The method of claim 69, wherein said patient's sample of DNA has been amplified or cloned.

81. A method for predicting the efficacy of a drug for treating IBD (e.g. Crohn's Disease) in a human patient, comprising: (a) obtaining a sample of cells from the patient; (b) obtaining a set of genotypes from the sample, wherein the set of genotypes comprises genotypes of one or more polymorphic loci from Tables 2-4, 5.1. 5.2, 6.2, 6.3; and (c) comparing the set of genotypes of the sample with a set of genotypes associated with efficacy of the drug, wherein similarity between the set of genotypes of the sample and the set of genotypes associated with efficacy of the drug predicts the efficacy of the drug for treating IBD (e.g. Crohn's Disease) in the patient.

82. The method of claim 81, wherein the sample of cells is derived from a tissue selected from the group consisting of: colon cell, vaginal cell, skin, brain, nervous system, digestive system, respiratory system, and scalp.

83. The method of claim 82, wherein the cells are selected from the group consisting of: digestive system cell, hair cell, brain cell, muscle cell, neutrophil, dentric cell, T cell, mast cell, CD4+ lymphocyte, monocyte, macrophage, dendritic cell, and epithelial cell.

84. The method of claim 81, wherein the sample is obtained via biopsy.

85. The method of claim 81, wherein the set of genotypes from the sample comprises genotypes of at least two of the polymorphic loci listed in Tables 2-4, 5.1. 5.2, 6.2, 6.3.

86. The method of claim 81 wherein the set of genotypes from the sample is obtained by hybridization to allele-specific oligonucleotides complementary to the polymorphic loci from Tables 2-4, 5.1. 5.2, 6.2, 6.3, wherein said allele-specific oligonucleotides are contained on a microarray.

87. The method of claim 86, wherein the oligonucleotides comprise nucleic acid molecules at least 95% identical to SEQ ID from Tables 2-4, 5.1. 5.2, 6.2, 6.3.

88. The method of claim 81 wherein the set of genotypes from the sample is obtained by sequencing said polymorphic loci in said sample.

89. The method of claim 81, wherein the drug is selected from the group consisting of symptom relievers and drugs for IBD (e.g. Crohn's Disease).

90.-117. (canceled)

118. A method for identifying a gene that regulates drug response in IBD (e.g. Crohn's Disease), comprising: (a) obtaining a gene expression profile for at least one gene from Tables 2-4 in a resident tissue cell induced for a proinflammatory like state in the presence of the candidate drug; and (b) comparing the expression profile of said gene to a reference expression profile for said gene in a cell induced for the pro-inflammatory like state in the absence of the candidate drug, wherein genes whose expression relative to the reference expression profile is altered by the drug may identifies the gene as a gene that regulates drug response in IBD (e.g. Crohn's Disease).

119.-125. (canceled)

126. A kit for assessing a patient's risk of having or developing IBD (e.g. Crohn's Disease), comprising: (a) a detection means for detecting the genotype of at least one polymorphic locus shown in Tables 2-4, 5.1. 5.2, 6.2, 6.3; and (b) instructions for correlating the genotype of said at least one polymorphic locus with a patient's risk of having or developing IBD (e.g. Crohn's Disease).

127. The kit of claim 126, wherein the detection means includes nucleic acid probes for detecting the genotype of said at least one polymorphic locus.

128.-137. (canceled)

138. A method of assessing a patient's risk of having or developing IBD (e.g. Crohn's Disease), comprising (a) determining a genotype for at least one polymorphic locus from Tables 2-4, 5.1. 5.2, 6.2, 6.3 in a patient; (b) comparing said genotype of (a) to a genotype for at least one polymorphic locus from Tables 2-4, 5.1. 5.2, 6.2, 6.3 that is associated with IBD (e.g. Crohn's Disease); and (c) assessing the patient's risk of having or developing IBD (e.g. Crohn's Disease), wherein said patient has a higher risk of having or developing IBD (e.g. Crohn's Disease) if the genotype for at least one polymorphic locus from Tables 2-4, 5.1. 5. 2, 6.2, 6.3 in said patient is the same as said genotype for at least one polymorphic locus from Tables 2-4, 5.1. 5.2, 6.2, 6.3 that is associated with IBD (e.g. Crohn's Disease).

139.-140. (canceled)
